United States Patent Application Publication US 2007/0214517 A1 - sequence listing, part 40

SEQ ID NO: 46363 - protein, 472 aa, Arabidopsis thaliana
  peptide (1)..(472): Ceres Seq. ID no. 15168899
  misc_feature (236)..(436): Pfam Name: Protein phosphatase 2C Pfam Description: Protein phosphatase 2C
  misc_feature (247)..(467): Homolog of NCBI NO: 34872403 NR Description: similar to T-cell activation protein phosphatase
  misc_feature (247)..(467): Homolog of NCBI NO: 28893291 NR Description: T-cell activation protein phosphatase 2C [Mus
  misc_feature (195)..(470): Homolog of NCBI NO: 34896100 NR Description: B1189A09.35 [Oryza sativa (japonica
  misc_feature (197)..(472): Homolog of NCBI NO: 18402284 NR Description: expressed protein [Arabidopsis thaliana]
  misc_feature (203)..(467): Homolog of NCBI NO: 15240071 NR Description: expressed protein [Arabidopsis thaliana]
  misc_feature (221)..(467): Homolog of NCBI NO: 30683717 NR Description: expressed protein [Arabidopsis thaliana]
  misc_feature (221)..(467): Homolog of NCBI NO: 25366932 NR Description: hypothetical protein dl4315c [imported] -
  misc_feature (95)..(468): Homolog of NCBI NO: 37533570 NR Description: putative protein phosphatase 2C
  misc_feature (1)..(469): Homolog of NCBI NO: 7485658 NR Description: hypothetical protein F17M5.260 - Arabidopsis
  misc_feature (1)..(219): Homolog of NCBI NO: 7485658 NR Description: hypothetical protein F17M5.260 - Arabidopsis
MEVQARPSLSTQQEITPVSTIEIDDNLDVTEKPIEAEENLVAEPTATDDLSPDELLSTSEATHRSVDEIAQKPVIDTSEENLLNTFEAEENPVVEPTATAAVSSDELISTSEATRHSVDEIAQKPIIDTSEKNPMETFVEPEAVHSSVDESIEKLVVVTSDVENDGENVASTTEDEITVRDTITDSGSISNNDDTKVEDLQLPVPETASLEPIKAASGREELVSKAFYLDSGFASLQSPFKALAGREDAYFISHHNWIGIADGVSQWSFEGINKGMYAQELMSNCEKIISNETAKISDPVQVLHRSVNETKSSGSSTALIAHLDNNELHIANIGDSGFMVIRDGTVLQNSSPMFHHFCFPLHITQGCDVLKLAEVYHVNLEEGDVVIAATDGLFDNLYEKEIVSIVCGSLKQSLEPQKIAELVAAKAQEVGRSKTERTPIADAAKEEGYNGHKGGKLDAVTVNISFVKIVST

SEQ ID NO: 46364 - DNA, 664 bp, Arabidopsis thaliana
  misc_feature (1)..(664): Ceres Seq. ID no. 12600865
  misc_feature: MA Experiment ID: 20001807 Result: Up-regulated in Transcription
  misc_feature: MA Experiment 20001807 PARAMETER Experiment Name: At_50mM_NH4NO3_L-to-H_Sub_P Parameter: Timepoint (hr) Value: 6
  misc_feature: MA Experiment 20001807 PARAMETER Experiment Name: At_50mM_NH4NO3_L-to-H_Sub_P Parameter: Tissue Value: Leaf
  misc_feature: MA Experiment 20001807 PARAMETER Experiment Name: At_50mM_NH4NO3_L-to-H_Sub_P Parameter: Treatment Value: 50mM NH4NO3 vs 100mM Mannitol
ttcggcgatctagggttttagttgtcgcacgaggaggaaaaatgccagcgggtcatggagttcgggcgagaacgagggatctgttcgcgaggccattcaggaagaagggttacattccactctcgacttacctgagaaccttcaaggtcggcgattacgtcgatgtgaaggtgaatggtgcgatccacaagggtatgcctcacaagttctaccacggtcgtactggtcgtatctggaacgtcactaaacgcgccgtcggtgttgaagtcaacaaacagattggcaacaggatcataaggaagaggattcatgtgcgtgtggagcatgtgcagcaatcaagatgtgctgaggagttcaagctgaggaagaagaagaatgatgagctcaaggctgcagccaaagccaatggtgagaccatcagcaccaagagacagcctaaaggacccaaaccaggattcatggtcgaaggaatgaccttggagactgtcactccaatcccgtacgatgtcgtcaacgatctcaagggaggctattagttctatcttcccagtgttttgcagttgttgcttccgtatttgagtttctcttcatgtgtcttagctacaatttctgtagaatctccagatattttatgaaacagatctttttatctcgtttataacta

SEQ ID NO: 46365 - protein, 177 aa, Arabidopsis thaliana
  peptide (1)..(177): Ceres Seq. ID no. 12600866
  misc_feature (15)..(113): Pfam Name: Ribosomal protein L21e Pfam Description: Ribosomal protein L21e
  misc_feature (14)..(170): Homolog of NCBI NO: 20129705 NR Description: CG12775-PA [Drosophila melanogaster]
  misc_feature (14)..(168): Homolog of NCBI NO: 6319668 NR Description: Homology to rat L21; Rpl21ap [Saccharomyces
  misc_feature (14)..(168): Homolog of NCBI NO: 40741182 NR Description: hypothetical protein AN4802.2 [Aspergillus
  misc_feature (14)..(168): Homolog of NCBI NO: 6094029 NR Description: 60S RIBOSOMAL PROTEIN L21
  misc_feature (14)..(170): Homolog of NCBI NO: 15213768 NR Description: ribosomal protein L21 [Spodoptera frugiperda]
  misc_feature (10)..(177): Homolog of NCBI NO: 32400808 NR Description: 60s ribosomal protein L21 [Triticum aestivum]
  misc_feature (14)..(177): Homolog of NCBI NO: 11276828 NR Description: ribosomal protein L21 [imported] - rice
  misc_feature (14)..(177): Homolog of NCBI NO: 37535194 NR Description: 60S ribosomal protein L21
  misc_feature (14)..(177): Homolog of NCBI NO: 18406015 NR Description: 60S ribosomal protein L21, putative
  misc_feature (14)..(177): Homolog of NCBI NO: 18391042 NR Description: putative 60S ribosomal protein L21
RRSRVLVVARGGKMPAGHGVRARTRDLFARPFRKKGYIPLSTYLRTFKVGDYVDVKVNGAIHKGMPHKFYHGRTGRIWNVTKRAVGVEVNKQIGNRIIRKRIHVRVEHVQQSRCAEEFKLRKKKNDELKAAAKANGETISTKRQPKGPKPGFMVEGMTLETVTPIPYDVVNDLKGGY

SEQ ID NO: 46366 - protein, 164 aa, Arabidopsis thaliana; identical to SEQ ID NO: 36570
  peptide (1)..(164): Ceres Seq. ID no. 12600867
  misc_feature (2)..(100): Pfam Name: Ribosomal protein L21e Pfam Description: Ribosomal protein L21e
  misc_feature (1)..(157): Homolog of NCBI NO: 20129705 NR Description: CG12775-PA [Drosophila melanogaster]
  misc_feature (1)..(155): Homolog of NCBI NO: 6319668 NR Description: Homology to rat L21; Rpl21ap [Saccharomyces
  misc_feature (1)..(155): Homolog of NCBI NO: 40741182 NR Description: hypothetical protein AN4802.2 [Aspergillus
  misc_feature (1)..(155): Homolog of NCBI NO: 6094029 NR Description: 60S RIBOSOMAL PROTEIN L21
  misc_feature (1)..(157): Homolog of NCBI NO: 15213768 NR Description: ribosomal protein L21 [Spodoptera frugiperda]
  misc_feature (1)..(164): Homolog of NCBI NO: 32400808 NR Description: 60s ribosomal protein L21 [Triticum aestivum]
  misc_feature (1)..(164): Homolog of NCBI NO: 11276828 NR Description: ribosomal protein L21 [imported] - rice
  misc_feature (1)..(164): Homolog of NCBI NO: 37535194 NR Description: 60S ribosomal protein L21
  misc_feature (1)..(164): Homolog of NCBI NO: 18406015 NR Description: 60S ribosomal protein L21, putative
  misc_feature (1)..(164): Homolog of NCBI NO: 18391042 NR Description: putative 60S ribosomal protein L21

SEQ ID NO: 46367 - protein, 113 aa, Arabidopsis thaliana; identical to SEQ ID NO: 36571
  peptide (1)..(113): Ceres Seq. ID no. 12600868
  misc_feature (1)..(106): Homolog of NCBI NO: 20129705 NR Description: CG12775-PA [Drosophila melanogaster]
  misc_feature (1)..(104): Homolog of NCBI NO: 6319668 NR Description: Homology to rat L21; Rpl21ap [Saccharomyces
  misc_feature (1)..(104): Homolog of NCBI NO: 40741182 NR Description: hypothetical protein AN4802.2 [Aspergillus
  misc_feature (1)..(104): Homolog of NCBI NO: 6094029 NR Description: 60S RIBOSOMAL PROTEIN L21
  misc_feature (1)..(106): Homolog of NCBI NO: 15213768 NR Description: ribosomal protein L21 [Spodoptera frugiperda]
  misc_feature (1)..(113): Homolog of NCBI NO: 32400808 NR Description: 60s ribosomal protein L21 [Triticum aestivum]
  misc_feature (1)..(113): Homolog of NCBI NO: 11276828 NR Description: ribosomal protein L21 [imported] - rice
  misc_feature (1)..(113): Homolog of NCBI NO: 37535194 NR Description: 60S ribosomal protein L21
  misc_feature (1)..(113): Homolog of NCBI NO: 18406015 NR Description: 60S ribosomal protein L21, putative
  misc_feature (1)..(113): Homolog of NCBI NO: 18391042 NR Description: putative 60S ribosomal protein L21

SEQ ID NO: 46368 - DNA, 2368 bp, Arabidopsis thaliana
  misc_feature (1)..(2368): Ceres Seq. ID no. 15176027
  misc_feature: MA Experiment ID: 20000173 Result: Down-regulated in Transcription
  misc_feature: MA Experiment 20000173 PARAMETER Experiment Name: At_42deg_Heat_P Parameter: Age (day) Value: 14
  misc_feature: MA Experiment 20000173 PARAMETER Experiment Name: At_42deg_Heat_P Parameter: Organism Value: A. thaliana
  misc_feature: MA Experiment 20000173 PARAMETER Experiment Name: At_42deg_Heat_P Parameter: Plant Line Value: WS
  misc_feature: MA Experiment 20000173 PARAMETER Experiment Name: At_42deg_Heat_P Parameter: Temperature (deg C) Value: 42 vs. 22
  misc_feature: MA Experiment 20000173 PARAMETER Experiment Name: At_42deg_Heat_P Parameter: Timepoint (hr) Value: 6
  misc_feature: MA Experiment 20000173 PARAMETER Experiment Name: At_42deg_Heat_P Parameter: Tissue Value: Aerial
  misc_feature: MA Experiment ID: 20000182 Result: Up-regulated in Transcription
  misc_feature: MA Experiment 20000182 PARAMETER Experiment Name: At_2mM_SA_P Parameter: Age (day) Value: 14
  misc_feature: MA Experiment 20000182 PARAMETER Experiment Name: At_2mM_SA_P Parameter: Organism Value: A. thaliana
  misc_feature: MA Experiment 20000182 PARAMETER Experiment Name: At_2mM_SA_P Parameter: Plant Line Value: WS
  misc_feature: MA Experiment 20000182 PARAMETER Experiment Name: At_2mM_SA_P Parameter: Timepoint (hr) Value: 6
  misc_feature: MA Experiment 20000182 PARAMETER Experiment Name: At_2mM_SA_P Parameter: Tissue Value: Aerial
  misc_feature: MA Experiment 20000182 PARAMETER Experiment Name: At_2mM_SA_P Parameter: Treatment Value: 2mM SA vs. No Treatment
  misc_feature: MA Experiment ID: 20000227 Result: Down-regulated in Transcription
  misc_feature: MA Experiment 20000227 PARAMETER Experiment Name: At_Root-Tips-vs-Tops_P Parameter: Tissue Value: Root Tips vs. Root Tops
  misc_feature: MA Experiment ID: 20001558 Result: Down-regulated in Transcription
  misc_feature: MA Experiment 20001558 PARAMETER Experiment Name: At_Drought_Soil_Dry_P Parameter: Age (day) Value: 27
  misc_feature: MA Experiment 20001558 PARAMETER Experiment Name: At_Drought_Soil_Dry_P Parameter: Organism Value: A. thaliana
  misc_feature: MA Experiment 20001558 PARAMETER Experiment Name: At_Drought_Soil_Dry_P Parameter: Plant Line Value: WS
  misc_feature: MA Experiment 20001558 PARAMETER Experiment Name: At_Drought_Soil_Dry_P Parameter: Post Timepoint (hr) Value: 6
  misc_feature: MA Experiment 20001558 PARAMETER Experiment Name: At_Drought_Soil_Dry_P Parameter: Post-Treatment Value: Re-Water vs. No Drought
  misc_feature: MA Experiment 20001558 PARAMETER Experiment Name: At_Drought_Soil_Dry_P Parameter: Timepoint (day) Value: 13
  misc_feature: MA Experiment 20001558 PARAMETER Experiment Name: At_Drought_Soil_Dry_P Parameter: Treatment Value: Drought vs. No Drought
  misc_feature: MA Experiment ID: 20001560 Result: Down-regulated in Transcription
  misc_feature: MA Experiment 20001560 PARAMETER Experiment Name: At_Drought_Soil_Dry_P Parameter: Age (day) Value: 28
  misc_feature: MA Experiment 20001560 PARAMETER Experiment Name: At_Drought_Soil_Dry_P Parameter: Organism Value: A. thaliana
  misc_feature: MA Experiment 20001560 PARAMETER Experiment Name: At_Drought_Soil_Dry_P Parameter: Plant Line Value: WS
  misc_feature: MA Experiment 20001560 PARAMETER Experiment Name: At_Drought_Soil_Dry_P Parameter: Post Timepoint (hr) Value: None
  misc_feature: MA Experiment 20001560 PARAMETER Experiment Name: At_Drought_Soil_Dry_P Parameter: Post-Treatment Value: None
  misc_feature: MA Experiment 20001560 PARAMETER Experiment Name: At_Drought_Soil_Dry_P Parameter: Timepoint (day) Value: 14
  misc_feature: MA Experiment 20001560 PARAMETER Experiment Name: At_Drought_Soil_Dry_P Parameter: Treatment Value: Drought vs. No Drought
gacctttttcacttccttctcactgatcgtcgaacaataagaccgtcgcatctcccagttatggctatggccggagaatcttccggcaaaaaaattggagactgtgacggtaaagtcgcggggaacagacagcgaaaggtgggtcttatttacgacgagacgatgtgcaaacacgacacacctgacggcgaggatcaccctgagtgtcccgaccgcatcagagttatctgggagaagcttcagctcgccggagtttctcaaagatgtgtggttcttggtagtagcaaagcagaagataagcatctccaattggttcacacaaaggaccatgttaatttagttaagagtattagcacaaaacagaaagattatcggagaaacaggattgcttcacagttgaattcgatttatctgaatggaggttcatctgaagccgcatatcttgcagctggttctgttgtaaagttggcagaaaaagttgcagaaggagagttagattgtggttttgctattgtcaggcccccagggcaccatgctgaggcagatgaagccatgggtttttgtttattcaacaatgttgccgttgctgctagttttttactaaacgaaagaccggatctaggggtcaagaaaattctgatcgttgattgggatgtccatcacggaaatggtacccagaagatgttttggaaagatcctcgtgtactatttttctctgttcataggcatgagtatgggggtttctatccagcgggtgatgatggcgattataacatggttggggaaggtccaggtgaagggtttaacataaatgttccatgggatcaaggacgatgtggagatgcagattatcttgctgcatgggaccatatcttgattcctgtggcgagggaatttaacccggatgttatttttctttcagctggatttgatgcagctattaatgatccgctagggggttgttgtgtgaccccatatggatattcagttatgttgaagaagctgatggagtttgcacaaggaaagatagtgctggcgttagagggagggtacaatcttgactcaattgcaaagtcttcacttgcatgtgtccaagttttgcttgaagacaaacaaattcaaggacctccggaagcatacccattcgagtcgacatggcgtgtcatacaagcggtgcgcaagaggctatgcacatattggccttcacttgcagatgaattatcgtggaagctaattaatcagaaaactcctactccaatcatccttatctcaagctccgactctgaaactgaagacaacgcccaaggactcctggatcaaatgtcgaaactcagcattgaaaaccctcaaggtacactacttgaaaaccaccaagtagaacctgcatctacatcttggagagctgatctcgcaaaggttgacgtttggtatgcctcttttggatccaacatgtggaaaccaaggtttctttgctatattcaagggggacaggtcgatggattgaaaaaggtatgtgttggctcaatggataaaagtccaccaaaggaaacagtgtgggaaacatttccacatagattgttctttggccgtgaatcttcagttggttggggtgtaggaggagttgctttcaccaacccccttgctaatctcattgatcaaactcacatgtgtttgtaccgtatcacgcttgagcagttcaatgacgttctgtctcaagaaaatggtttgaatgtggattcagattctccggtctttgatctagctgctttgcagttagtagataacaaaggatccattttagaagctcctttgaatagttggtatggaaatgttgtctgcttgggaaaagaacgcgacattcctatacttacaatgacttgcacgctttccgctgttgagaaattcaaatccggtgagatccctataagacctcctgcaaaagcttatgccaacactttaataaggggacttgtggaaggaggaagattatctaaagaagaagctgaggcttacatagacaaggctgtgtctaaacctctctagtgtataattatttactcagaaaccgcccgtttgaacacgatttggagcttcgggtttctgagttattcaattaggataaaaaccacaagtttaggaatattgtgagacctttgaatttgtcttttgaaagagaggactgtgtcctctgttagctgtgttgtgcttgctccctaagcaaactctcaatgtattttagttatcttcgggttttaggctttaccaagaagctgtattcggtaaatgtattaaagaatcctccaaactgctttatattgaccggagagaaacattcttattcttcggaatggtactttgaagtttgaag

SEQ ID NO: 46369 - protein, 680 aa, Arabidopsis thaliana
  peptide (1)..(680): Ceres Seq. ID no. 15176028
  misc_feature (46)..(369): Pfam Name: Histone deacetylase family Pfam Description: Histone deacetylase family
  misc_feature (44)..(419): Homolog of NCBI NO: 34533888 NR Description: unnamed protein product [Homo sapiens]
  misc_feature (44)..(444): Homolog of NCBI NO: 34933421 NR Description: histone deacetylase 6 [Rattus norvegicus]
  misc_feature (432)..(680): Homolog of NCBI NO: 15239507 NR Description: hypothetical protein [Arabidopsis thaliana]
  misc_feature (441)..(638): Homolog of NCBI NO: 9759453 NR Description: gene_id:MAF19.7~unknown protein [Arabidopsis
  misc_feature (46)..(576): Homolog of NCBI NO: 34394912 NR Description: putative histone deacetylase
  misc_feature (7)..(418): Homolog of NCBI NO: 22327996 NR Description: histone deacetylase - like [Arabidopsis thaliana]
  misc_feature (7)..(418): Homolog of NCBI NO: 9759454 NR Description: contains similarity to histone
  misc_feature (441)..(680): Homolog of NCBI NO: 32968028 NR Description: HDA1 [Zea mays]
  misc_feature (47)..(457): Homolog of NCBI NO: 32968028 NR Description: HDA1 [Zea mays]
  misc_feature (18)..(392): Homolog of NCBI NO: 9759454 NR Description: contains similarity to histone
DLFHFLLTDRRTIRPSHLPVMAMAGESSGKKIGDCDGKVAGNRQRKVGLIYDETMCKHDTPDGEDHPECPDRIRVIWEKLQLAGVSQRCVVLGSSKAEDKHLQLVHTKDHVNLVKSISTKQKDYRRNRIASQLNSIYLNGGSSEAAYLAAGSVVKLAEKVAEGELDCGFAIVRPPGHHAEADEAMGFCLFNNVAVAASFLLNERPDLGVKKILIVDWDVHHGNGTQKMFWKDPRVLFFSVHRHEYGGFYPAGDDGDYNMVGEGPGEGFNINVPWDQGRCGDADYLAAWDHILIPVAREFNPDVIFLSAGFDAAINDPLGGCCVTPYGYSVMLKKLMEFAQGKIVLALEGGYNLDSIAKSSLACVQVLLEDKQIQGPPEAYPFESTWRVIQAVRKRLCTYWPSLADELSWKLINQKTPTPIILISSSDSETEDNAQGLLDQMSKLSIENPQGTLLENHQVEPASTSWRADLAKVDVWYASFGSNMWKPRFLCYIQGGQVDGLKKVCVGSMDKSPPKETVWETFPHRLFFGRESSVGWGVGGVAFTNPLANLIDQTHMCLYRITLEQFNDVLSQENGLNVDSDSPVFDLAALQLVDNKGSILEAPLNSWYGNVVCLGKERDIPILTMTCTLSAVEKFKSGEIPIRPPAKAYANTLIRGLVEGGRLSKEEAEAYIDKAVSKPL

SEQ ID NO: 46370 - protein, 660 aa, Arabidopsis thaliana
  peptide (1)..(660): Ceres Seq. ID no. 15176029
  misc_feature (26)..(349): Pfam Name: Histone deacetylase family Pfam Description: Histone deacetylase family
  misc_feature (24)..(399): Homolog of NCBI NO: 34533888 NR Description: unnamed protein product [Homo sapiens]
  misc_feature (24)..(424): Homolog of NCBI NO: 34933421 NR Description: histone deacetylase 6 [Rattus norvegicus]
  misc_feature (412)..(660): Homolog of NCBI NO: 15239507 NR Description: hypothetical protein [Arabidopsis thaliana]
  misc_feature (421)..(618): Homolog of NCBI NO: 9759453 NR Description: gene_id:MAF19.7~unknown protein [Arabidopsis
  misc_feature (26)..(556): Homolog of NCBI NO: 34394912 NR Description: putative histone deacetylase
  misc_feature (1)..(398): Homolog of NCBI NO: 22327996 NR Description: histone deacetylase - like [Arabidopsis thaliana]
  misc_feature (1)..(398): Homolog of NCBI NO: 9759454 NR Description: contains similarity to histone
  misc_feature (421)..(660): Homolog of NCBI NO: 32968028 NR Description: HDA1 [Zea mays]
  misc_feature (27)..(437): Homolog of NCBI NO: 32968028 NR Description: HDA1 [Zea mays]
  misc_feature (1)..(372): Homolog of NCBI NO: 9759454 NR Description: contains similarity to histone
MAMAGESSGKKIGDCDGKVAGNRQRKVGLIYDETMCKHDTPDGEDHPECPDRIRVIWEKLQLAGVSQRCVVLGSSKAEDKHLQLVHTKDHVNLVKSISTKQKDYRRNRIASQLNSIYLNGGSSEAAYLAAGSVVKLAEKVAEGELDCGFAIVRPPGHHAEADEAMGFCLFNNVAVAASFLLNERPDLGVKKILIVDWDVHHGNGTQKMFWKDPRVLFFSVHRHEYGGFYPAGDDGDYNMVGEGPGEGFNINVPWDQGRCGDADYLAAWDHILIPVAREFNPDVIFLSAGFDAAINDPLGGCCVTPYGYSVMLKKLMEFAQGKIVLALEGGYNLDSIAKSSLACVQVLLEDKQIQGPPEAYPFESTWRVIQAVRKRLCTYWPSLADELSWKLINQKTPTPIILISSSDSETEDNAQGLLDQMSKLSIENPQGTLLENHQVEPASTSWRADLAKVDVWYASFGSNMWKPRFLCYIQGGQVDGLKKVCVGSMDKSPPKETVWETFPHRLFFGRESSVGWGVGGVAFTNPLANLIDQTHMCLYRITLEQFNDVLSQENGLNVDSDSPVFDLAALQLVDNKGSILEAPLNSWYGNVVCLGKERDIPILTMTCTLSAVEKFKSGEIPIRPPAKAYANTLIRGLVEGGRLSKEEAEAYIDKAVSKPL

SEQ ID NO: 46371 - protein, 658 aa, Arabidopsis thaliana
  peptide (1)..(658): Ceres Seq. ID no. 15176030
  misc_feature (24)..(347): Pfam Name: Histone deacetylase family Pfam Description: Histone deacetylase family
  misc_feature (22)..(397): Homolog of NCBI NO: 34533888 NR Description: unnamed protein product [Homo sapiens]
  misc_feature (22)..(422): Homolog of NCBI NO: 34933421 NR Description: histone deacetylase 6 [Rattus norvegicus]
  misc_feature (410)..(658): Homolog of NCBI NO: 15239507 NR Description: hypothetical protein [Arabidopsis thaliana]
  misc_feature (419)..(616): Homolog of NCBI NO: 9759453 NR Description: gene_id:MAF19.7~unknown protein [Arabidopsis
  misc_feature (24)..(554): Homolog of NCBI NO: 34394912 NR Description: putative histone deacetylase
  misc_feature (1)..(396): Homolog of NCBI NO: 22327996 NR Description: histone deacetylase - like [Arabidopsis thaliana]
  misc_feature (1)..(396): Homolog of NCBI NO: 9759454 NR Description: contains similarity to histone
  misc_feature (419)..(658): Homolog of NCBI NO: 32968028 NR Description: HDA1 [Zea mays]
  misc_feature (25)..(435): Homolog of NCBI NO: 32968028 NR Description: HDA1 [Zea mays]
  misc_feature (1)..(370): Homolog of NCBI NO: 9759454 NR Description: contains similarity to histone
MAGESSGKKIGDCDGKVAGNRQRKVGLIYDETMCKHDTPDGEDHPECPDRIRVIWEKLQLAGVSQRCVVLGSSKAEDKHLQLVHTKDHVNLVKSISTKQKDYRRNRIASQLNSIYLNGGSSEAAYLAAGSVVKLAEKVAEGELDCGFAIVRPPGHHAEADEAMGFCLFNNVAVAASFLLNERPDLGVKKILIVDWDVHHGNGTQKMFWKDPRVLFFSVHRHEYGGFYPAGDDGDYNMVGEGPGEGFNINVPWDQGRCGDADYLAAWDHILIPVAREFNPDVIFLSAGFDAAINDPLGGCCVTPYGYSVMLKKLMEFAQGKIVLALEGGYNLDSIAKSSLACVQVLLEDKQIQGPPEAYPFESTWRVIQAVRKRLCTYWPSLADELSWKLINQKTPTPIILISSSDSETEDNAQGLLDQMSKLSIENPQGTLLENHQVEPASTSWRADLAKVDVWYASFGSNMWKPRFLCYIQGGQVDGLKKVCVGSMDKSPPKETVWETFPHRLFFGRESSVGWGVGGVAFTNPLANLIDQTHMCLYRITLEQFNDVLSQENGLNVDSDSPVFDLAALQLVDNKGSILEAPLNSWYGNVVCLGKERDIPILTMTCTLSAVEKFKSGEIPIRPPAKAYANTLIRGLVEGGRLSKEEAEAYIDKAVSKPL

SEQ ID NO: 46372 - DNA, 1322 bp, Arabidopsis thaliana; identical to SEQ ID NO: 45469
  misc_feature (1)..(1322): Ceres Seq. ID no. 13646612
  misc_feature: MA Experiment ID: 108434 Result: Up-regulated in Transcription
  misc_feature: MA Experiment 108434 PARAMETER Experiment Name: At_Root_Tips_cDNA_P Parameter: Tissue Value: Root Tips
  misc_feature: MA Experiment ID: 108435 Result: Down-regulated in Transcription
  misc_feature: MA Experiment 108435 PARAMETER Experiment Name: At_stm_Mutants_cDNA_P Parameter: Plant Line Value: wt Landsburg vs stm
  misc_feature: MA Experiment 108435 PARAMETER Experiment Name: At_stm_Mutants_cDNA_P Parameter: Tissue Value: Shoot Apical Meristem Region
  misc_feature: MA Experiment ID: 108463 Result: Down-regulated in Transcription
  misc_feature: MA Experiment 108463 PARAMETER Experiment Name: At_Germinating_Seeds_cDNA_P Parameter: Age (day) Value: 3 vs. 0
  misc_feature: MA Experiment 108463 PARAMETER Experiment Name: At_Germinating_Seeds_cDNA_P Parameter: Tissue Value: Germinating Seeds
  misc_feature: MA Experiment ID: 108595 Result: Down-regulated in Transcription
  misc_feature: MA Experiment 108595 PARAMETER Experiment Name: At_Ler-pi_Ovule_cDNA_P Parameter: Plant Line Value: null
  misc_feature: MA Experiment ID: 20000069 Result: Down-regulated in Transcription
  misc_feature: MA Experiment 20000069 PARAMETER Experiment Name: At_100uM_ABA_Mutants_cDNA_P Parameter: Plant Line Value: CS23
  misc_feature: MA Experiment 20000069 PARAMETER Experiment Name: At_100uM_ABA_Mutants_cDNA_P Parameter: Timepoint (hr) Value: 6
  misc_feature: MA Experiment 20000069 PARAMETER Experiment Name: At_100uM_ABA_Mutants_cDNA_P Parameter: Tissue Value: Aerial
  misc_feature: MA Experiment 20000069 PARAMETER Experiment Name: At_100uM_ABA_Mutants_cDNA_P Parameter: Treatment Value: 100uM ABA vs. No Treatment
  misc_feature: MA Experiment ID: 20000070 Result: Down-regulated in Transcription
  misc_feature: MA Experiment 20000070 PARAMETER Experiment Name: At_100uM_ABA_Mutants_cDNA_P Parameter: Plant Line Value: CS24
  misc_feature: MA Experiment 20000070 PARAMETER Experiment Name: At_100uM_ABA_Mutants_cDNA_P Parameter: Timepoint (hr) Value: 6
  misc_feature: MA Experiment 20000070 PARAMETER Experiment Name: At_100uM_ABA_Mutants_cDNA_P Parameter: Tissue Value: Aerial
  misc_feature: MA Experiment 20000070 PARAMETER Experiment Name: At_100uM_ABA_Mutants_cDNA_P Parameter: Treatment Value: 100uM ABA vs. No Treatment
  misc_feature: MA Experiment ID: 20000071 Result: Down-regulated in Transcription
  misc_feature: MA Experiment 20000071 PARAMETER Experiment Name: At_100uM_ABA_Mutants_cDNA_P Parameter: Plant Line Value: CS8104
  misc_feature: MA Experiment 20000071 PARAMETER Experiment Name: At_100uM_ABA_Mutants_cDNA_P Parameter: Timepoint (hr) Value: 6
  misc_feature: MA Experiment 20000071 PARAMETER Experiment Name: At_100uM_ABA_Mutants_cDNA_P Parameter: Tissue Value: Aerial
  misc_feature: MA Experiment 20000071 PARAMETER Experiment Name: At_100uM_ABA_Mutants_cDNA_P Parameter: Treatment Value: 100uM ABA vs. No Treatment
  misc_feature: MA Experiment ID: 20000072 Result: Down-regulated in Transcription
  misc_feature: MA Experiment 20000072 PARAMETER Experiment Name: At_100uM_ABA_Mutants_cDNA_P Parameter: Plant Line Value: CS8105
  misc_feature: MA Experiment 20000072 PARAMETER Experiment Name: At_100uM_ABA_Mutants_cDNA_P Parameter: Timepoint (hr) Value: 6
  misc_feature: MA Experiment 20000072 PARAMETER Experiment Name: At_100uM_ABA_Mutants_cDNA_P Parameter: Tissue Value: Aerial
  misc_feature: MA Experiment 20000072 PARAMETER Experiment Name: At_100uM_ABA_Mutants_cDNA_P Parameter: Treatment Value: 100uM ABA vs. No Treatment
  misc_feature: MA Experiment ID: 20000086 Result: Down-regulated in Transcription
  misc_feature: MA Experiment 20000086 PARAMETER Experiment Name: At_100uM_ABA_Mutants_cDNA_P Parameter: Plant Line Value: CS22
  misc_feature: MA Experiment 20000086 PARAMETER Experiment Name: At_100uM_ABA_Mutants_cDNA_P Parameter: Timepoint (hr) Value: 6
  misc_feature: MA Experiment 20000086 PARAMETER Experiment Name: At_100uM_ABA_Mutants_cDNA_P Parameter: Tissue Value: Aerial
  misc_feature: MA Experiment 20000086 PARAMETER Experiment Name: At_100uM_ABA_Mutants_cDNA_P Parameter: Treatment Value: 100uM ABA vs. No Treatment
  misc_feature: MA Experiment ID: 20000087 Result: Down-regulated in Transcription
  misc_feature: MA Experiment 20000087 PARAMETER Experiment Name: At_100uM_ABA_Mutants_cDNA_P Parameter: Plant Line Value: WS
  misc_feature: MA Experiment 20000087 PARAMETER Experiment Name: At_100uM_ABA_Mutants_cDNA_P Parameter: Timepoint (hr) Value: 6
  misc_feature: MA Experiment 20000087 PARAMETER Experiment Name: At_100uM_ABA_Mutants_cDNA_P Parameter: Tissue Value: Aerial
  misc_feature: MA Experiment 20000087 PARAMETER Experiment Name: At_100uM_ABA_Mutants_cDNA_P Parameter: Treatment Value: 100uM ABA vs. No Treatment
  misc_feature: MA Experiment ID: 20000088 Result: Down-regulated in Transcription
  misc_feature: MA Experiment 20000088 PARAMETER Experiment Name: At_100uM_ABA_Mutants_cDNA_P Parameter: Plant Line Value: Landsberg
  misc_feature: MA Experiment 20000088 PARAMETER Experiment Name: At_100uM_ABA_Mutants_cDNA_P Parameter: Timepoint (hr) Value: 6
  misc_feature: MA Experiment 20000088 PARAMETER Experiment Name: At_100uM_ABA_Mutants_cDNA_P Parameter: Tissue Value: Aerial
  misc_feature: MA Experiment 20000088 PARAMETER Experiment Name: At_100uM_ABA_Mutants_cDNA_P Parameter: Treatment Value: 100uM ABA vs. No Treatment
  misc_feature: MA Experiment ID: 20000117 Result: Down-regulated in Transcription
  misc_feature: MA Experiment 20000117 PARAMETER Experiment Name: At_100uM_ABA_Mutants_cDNA_P Parameter: Plant Line Value: Columbia
  misc_feature: MA Experiment 20000117 PARAMETER Experiment Name: At_100uM_ABA_Mutants_cDNA_P Parameter: Timepoint (hr) Value: 6
  misc_feature: MA Experiment 20000117 PARAMETER Experiment Name: At_100uM_ABA_Mutants_cDNA_P Parameter: Tissue Value: Aerial
  misc_feature: MA Experiment 20000117 PARAMETER Experiment Name: At_100uM_ABA_Mutants_cDNA_P Parameter: Treatment Value: 100uM ABA vs. No Treatment
  misc_feature: MA Experiment ID: 20000185 Result: Down-regulated in Transcription
  misc_feature: MA Experiment 20000185 PARAMETER Experiment Name: At_Roots__P Parameter: Age (day) Value: 7 vs. 21
  misc_feature: MA Experiment 20000185 PARAMETER Experiment Name: At_Roots__P Parameter: Organism Value: A. thaliana
  misc_feature: MA Experiment 20000185 PARAMETER Experiment Name: At_Roots__P Parameter: Tissue Value: Roots vs. Whole Plant
  misc_feature: MA Experiment ID: 20000439 Result: Down-regulated in Transcription
  misc_feature: MA Experiment 20000439 PARAMETER Experiment Name: At_Roots__P Parameter: Age (day) Value: 14 vs. 21
  misc_feature: MA Experiment 20000439 PARAMETER Experiment Name: At_Roots__P Parameter: Organism Value: A. thaliana
  misc_feature: MA Experiment 20000439 PARAMETER Experiment Name: At_Roots__P Parameter: Tissue Value: Roots vs. Whole Plant
  misc_feature: MA Experiment ID: 20000794 Result: Down-regulated in Transcription
  misc_feature: MA Experiment 20000794 PARAMETER Experiment Name: At_Petals_P Parameter: Age (day) Value: 23-25 days
  misc_feature: MA Experiment 20000794 PARAMETER Experiment Name: At_Petals_P Parameter: Plant Line Value: WS
  misc_feature: MA Experiment 20000794 PARAMETER Experiment Name: At_Petals_P Parameter: Tissue Value: Petals vs. Whole plant
  misc_feature: MA Experiment ID: 20001757 Result: Up-regulated in Transcription
  misc_feature: MA Experiment 20001757 PARAMETER Experiment Name: At_50mM_NH4NO3_L-to-H_P Parameter: Timepoint (hr) Value: 6
  misc_feature: MA Experiment 20001757 PARAMETER Experiment Name: At_50mM_NH4NO3_L-to-H_P Parameter: Tissue Value: Leaf
  misc_feature: MA Experiment 20001757 PARAMETER Experiment Name: At_50mM_NH4NO3_L-to-H_P Parameter: Treatment Value: 50mM NH4NO3 vs 100mM Mannitol
  misc_feature: MA Experiment ID: 20001906 Result: Down-regulated in Transcription
  misc_feature: MA Experiment 20001906 PARAMETER Experiment Name: At_Drought_Reproduction_P Parameter: Age (day) Value: 35
  misc_feature: MA Experiment 20001906 PARAMETER Experiment Name: At_Drought_Reproduction_P Parameter: Organism Value: A. thaliana
  misc_feature: MA Experiment 20001906 PARAMETER Experiment Name: At_Drought_Reproduction_P Parameter: Plant Line Value: WS
  misc_feature: MA Experiment 20001906 PARAMETER Experiment Name: At_Drought_Reproduction_P Parameter: Timepoint (day) Value: 5
  misc_feature: MA Experiment 20001906 PARAMETER Experiment Name: At_Drought_Reproduction_P Parameter: Tissue Value: Siliques
  misc_feature: MA Experiment 20001906 PARAMETER Experiment Name: At_Drought_Reproduction_P Parameter: Treatment Value: Drought vs. No Drought

SEQ ID NO: 46373 - protein, 329 aa, Arabidopsis thaliana; identical to SEQ ID NO: 45470
  peptide (1)..(329): Ceres Seq. ID no. 15219069
  misc_feature (246)..(317): Pfam Name: RNA recognition motif. (a.k.a. RRM, RBD, or RNP domain) Pfam Description: RNA recognition motif. (a.k.a. RRM, RBD, or RNP
  misc_feature (246)..(317): Pfam Name: RNA recognition motif. (a.k.a. RRM, RBD, or RNP domain) Pfam Description: RNA recognition motif. (a.k.a. RRM, RBD, or RNP
  misc_feature (95)..(326): Homolog of NCBI NO: 15240641 NR Description: 31 kDa ribonucleoprotein, chloroplast protein RNP-T / RNA-binding protein 1/2/3 / RNA-binding protein
  misc_feature (168)..(329): Homolog of NCBI NO: 475720 NR Description: RNA-binding protein 3
  misc_feature (53)..(329): Homolog of NCBI NO: 19032260 NR Description: RNA-binding protein precursor [Persea americana]
  misc_feature (86)..(329): Homolog of NCBI NO: 99684 NR Description: DNA-binding protein - Arabidopsis thaliana
  misc_feature (66)..(329): Homolog of NCBI NO: 629557 NR Description: RNA-binding protein RNP-D precursor - Arabidopsis
  misc_feature (95)..(326): Homolog of NCBI NO: 15240641 NR Description: 31 kDa ribonucleoprotein, chloroplast protein RNP-T / RNA-binding protein 1/2/3 / RNA-binding protein
  misc_feature (53)..(329): Homolog of NCBI NO: 19032260 NR Description: RNA-binding protein precursor [Persea americana]
  misc_feature (66)..(329): Homolog of NCBI NO: 629557 NR Description: RNA-binding protein RNP-D precursor - Arabidopsis
  misc_feature (1)..(329): Homolog of NCBI NO: 15233980 NR Description: 31 kDa ribonucleoprotein, chloroplast protein RNP-T / RNA-binding protein 1/2/3 / RNA-binding protein
  misc_feature (1)..(329): Homolog of NCBI NO: 15294254 NR Description: AT4g24770/F22K18_30 [Arabidopsis thaliana]
  misc_feature (15)..(329): Homolog of NCBI NO: 475719 NR Description: RNA-binding protein 2
  misc_feature (1)..(329): Homolog of NCBI NO: 1076305 NR Description: RNA-binding protein cp31 precursor - Arabidopsis
  misc_feature (11)..(329): Homolog of NCBI NO: 681908 NR Description: cp31 [Arabidopsis thaliana]
  misc_feature (86)..(329): Homolog of NCBI NO: 99684 NR Description: DNA-binding protein - Arabidopsis thaliana
  misc_feature (168)..(329): Homolog of NCBI NO: 475720 NR Description: RNA-binding protein 3
  misc_feature (11)..(329): Homolog of NCBI NO: 681908 NR Description: cp31 [Arabidopsis thaliana]
  misc_feature (1)..(329): Homolog of NCBI NO: 1076305 NR Description: RNA-binding protein cp31 precursor - Arabidopsis
  misc_feature (15)..(329): Homolog of NCBI NO: 475719 NR Description: RNA-binding protein 2
  misc_feature (1)..(329): Homolog of NCBI NO: 15294254 NR Description: AT4g24770/F22K18_30 [Arabidopsis thaliana]
  misc_feature (1)..(329): Homolog of NCBI NO: 15233980 NR Description: 31 kDa ribonucleoprotein, chloroplast protein RNP-T / RNA-binding protein 1/2/3 / RNA-binding protein

SEQ ID NO: 46374 - protein, 315 aa, Arabidopsis thaliana; identical to SEQ ID NO: 45471
  peptide (1)..(315): Ceres Seq. ID no. 15219070
  misc_feature (232)..(303): Pfam Name: RNA recognition motif. (a.k.a. RRM, RBD, or RNP domain) Pfam Description: RNA recognition motif. (a.k.a. RRM, RBD, or RNP
  misc_feature (232)..(303): Pfam Name: RNA recognition motif. (a.k.a. RRM, RBD, or RNP domain) Pfam Description: RNA recognition motif. (a.k.a. RRM, RBD, or RNP
  misc_feature (81)..(312): Homolog of NCBI NO: 15240641 NR Description: 31 kDa ribonucleoprotein, chloroplast protein RNP-T / RNA-binding protein 1/2/3 / RNA-binding protein
  misc_feature (154)..(315): Homolog of NCBI NO: 475720 NR Description: RNA-binding protein 3
  misc_feature (39)..(315): Homolog of NCBI NO: 19032260 NR Description: RNA-binding protein precursor [Persea americana]
  misc_feature (72)..(315): Homolog of NCBI NO: 99684 NR Description: DNA-binding protein - Arabidopsis thaliana
  misc_feature (52)..(315): Homolog of NCBI NO: 629557 NR Description: RNA-binding protein RNP-D precursor - Arabidopsis
  misc_feature (81)..(312): Homolog of NCBI NO: 15240641 NR Description: 31 kDa ribonucleoprotein, chloroplast protein RNP-T / RNA-binding protein 1/2/3 / RNA-binding protein
  misc_feature (39)..(315): Homolog of NCBI NO: 19032260 NR Description: RNA-binding protein precursor [Persea americana]
  misc_feature (52)..(315): Homolog of NCBI NO: 629557 NR Description: RNA-binding protein RNP-D precursor - Arabidopsis
  misc_feature (1)..(315): Homolog of NCBI NO: 15233980 NR Description: 31 kDa ribonucleoprotein, chloroplast protein RNP-T / RNA-binding protein 1/2/3 / RNA-binding protein
  misc_feature (1)..(315): Homolog of NCBI NO: 15294254 NR Description: AT4g24770/F22K18_30 [Arabidopsis thaliana]
  misc_feature (1)..(315): Homolog of NCBI NO: 475719 NR Description: RNA-binding protein 2
  misc_feature (1)..(315): Homolog of NCBI NO: 1076305 NR Description: RNA-binding protein cp31 precursor - Arabidopsis
  misc_feature (1)..(315): Homolog of NCBI NO: 681908 NR Description: cp31 [Arabidopsis thaliana]
  misc_feature (72)..(315): Homolog of NCBI NO: 99684 NR Description: DNA-binding protein - Arabidopsis thaliana
  misc_feature (154)..(315): Homolog of NCBI NO: 475720 NR Description: RNA-binding protein 3
  misc_feature (1)..(315): Homolog of NCBI NO: 681908 NR Description: cp31 [Arabidopsis thaliana]
  misc_feature (1)..(315): Homolog of NCBI NO: 1076305 NR Description: RNA-binding protein cp31 precursor - Arabidopsis
  misc_feature (1)..(315): Homolog of NCBI NO: 475719 NR Description: RNA-binding protein 2
  misc_feature (1)..(315): Homolog of NCBI NO: 15294254 NR Description: AT4g24770/F22K18_30 [Arabidopsis thaliana]
  misc_feature (1)..(315): Homolog of NCBI NO: 15233980 NR Description: 31 kDa ribonucleoprotein, chloroplast protein RNP-T / RNA-binding protein 1/2/3 / RNA-binding protein

SEQ ID NO: 46375 - DNA, 1497 bp, Arabidopsis thaliana
  misc_feature (1)..(1497): Ceres Seq. ID no. 13579206
  misc_feature: MA Experiment ID: 20000184 Result: Up-regulated in Transcription
  misc_feature: MA Experiment 20000184 PARAMETER Experiment Name: At_Shoots__P Parameter: Age (day) Value: 7
  misc_feature: MA Experiment 20000184 PARAMETER Experiment Name: At_Shoots__P Parameter: Tissue Value: Shoots vs. Whole Plant
gtggaagtacgagattcactggatttgatggctcgtcggctgtttctcctcctcctcgccgtcacggcagggttgagcttgacgggaacaaccgtcagagcagttggcataaattgggggacagaagcgtcgcaccctcttccgccttcaaaggttgtagagcttctgaaatcaaacggcattgtcaaagtgaagctcttcgatgccgacccaaaagttctccgagctctctctggttctaatattggtgtcactatcggaatccaaaattcgatgctcaagagcttgaatgcatccgtaaaggtagcagagagctgggtacatgacaatgtcactcgttacttcaacggtggaaacagagttcgaatcgagtatgtagcagttggagaagagccatttctccagagctatggcaatcagtataagccttttgtgattggggcagctatgaatatccaaaatgctttagttaaggcgaacttggcaaatgaagtgaaggttgtagtcccctcaagctttgattcctttctttctgaatctggtcgaccttcttcaggacactttagggctgacctcaacaagacgatgattgaactcctctcctttctcacaaagcaccactctcctttttttgtgacaatctctcctttcctaagctttcaccagaacaagaacatctcccttgactttagcctctttaaagaaacagcaaaggctcacaaagacggacgtaaaacctacagaaacagctttgatctaagctatgacacacttgtctctgcattgttcacaattgggttttcggaggtggatatcgttgtgtcaaagatcggttggcctacagatggagcagaaaatgcaacatcactgactgctgaggcgttctttaaaggactgatagttcacttggagaaaaagacggcctctctcccgcgtcctcctgttgaaacctacattgaaagtctcttggacgaagatcagagaaacttatctgctgggaactttgagaggcactggggagtgttcactttcgacggtcaagccaaatacaatttcagtttcaaccataagaatcaggtaaacgcgcagaatgttcagtaccttcctcctaagtggtgtgtggtgaacaataacaaggacttgtcaaacgcgtcagcaagagcattagaagcgtgtgctgttgcggactgtacatcgatacttcctggcgggtcgtgttcaggcatcagatggccaggcaacgtttcatacgcgttcaatagcttgtaccagcaaaatgatcacagtgcagaaagctgcaactttggtggacttggtttgatcactactgttgatccttctgaggataattgccggttctcgattcaacttgacacttctcattcatcttcgcaaactccaaatttctttcagagctggcctctcctcttattgttcctactgtccggactcttttaaagttgtagttatagcaaaattttggtggattttgcctcc

SEQ ID NO: 46376 - protein, 485 aa, Arabidopsis thaliana
  peptide (1)..(485): Ceres Seq. ID no. 13579207
  misc_feature (35)..(354): Pfam Name: Glycosyl hydrolases family 17 Pfam Description: Glycosyl hydrolases family 17
  misc_feature (6)..(484): Homolog of NCBI NO: 18483232 NR Description: 3-glucanase [Sorghum bicolor]
  misc_feature (16)..(478): Homolog of NCBI NO: 16604491 NR Description: AT5g58090/k21l19_70 [Arabidopsis thaliana]
  misc_feature (16)..(478): Homolog of NCBI NO: 22327934 NR Description: glycosyl hydrolase family 17 [Arabidopsis
  misc_feature (17)..(457): Homolog of NCBI NO: 30060382 NR Description: putative glucan endo-1,3-beta-glucosidase
  misc_feature (13)..(467): Homolog of NCBI NO: 15230097 NR Description: glycosyl hydrolase family 17 [Arabidopsis
  misc_feature (14)..(467): Homolog of NCBI NO: 37223500 NR Description: beta-1,3-glucanase, acidic [Coffea arabica]
  misc_feature (34)..(467): Homolog of NCBI NO: 30683955 NR Description: glycosyl hydrolase family 17 [Arabidopsis
  misc_feature (34)..(467): Homolog of NCBI NO: 7488109 NR Description: probable glucanase - Arabidopsis thaliana
  misc_feature (34)..(464): Homolog of NCBI NO: 38423964 NR Description: putative glycosyl hydrolase
  misc_feature (10)..(485): Homolog of NCBI NO: 30697080 NR Description: glycosyl hydrolase family 17 [Arabidopsis
VEVRDSLDLMARRLFLLLLAVTAGLSLTGTTVRAVGINWGTEASHPLPPSKVVELLKSNGIVKVKLFDADPKVLRALSGSNIGVTIGIQNSMLKSLNASVKVAESWVHDNVTRYFNGGNRVRIEYVAVGEEPFLQSYGNQYKPFVIGAAMNIQNALVKANLANEVKVVVPSSFDSFLSESGRPSSGHFRADLNKTMIELLSFLTKHHSPFFVTISPFLSFHQNKNISLDFSLFKETAKAHKDGRKTYRNSFDLSYDTLVSALFTIGFSEVDIVVSKIGWPTDGAENATSLTAEAFFKGLIVHLEKKTASLPRPPVETYIESLLDEDQRNLSAGNFERHWGVFTFDGQAKYNFSFNHKNQVNAQNVQYLPPKWCVVNNNKDLSNASARALEACAVADCTSILPGGSCSGIRWPGNVSYAFNSLYQQNDHSAESCNFGGLGLITTVDPSEDNCRFSIQLDTSHSSSQTPNFFQSWPLLLLFLLSGLF

SEQ ID NO: 46377 - protein, 476 aa, Arabidopsis thaliana
  peptide (1)..(476): Ceres Seq. ID no. 13579208
  misc_feature (26)..(345): Pfam Name: Glycosyl hydrolases family 17 Pfam Description: Glycosyl hydrolases family 17
  misc_feature (1)..(475): Homolog of NCBI NO: 18483232 NR Description: 3-glucanase [Sorghum bicolor]
  misc_feature (7)..(469): Homolog of NCBI NO: 16604491 NR Description: AT5g58090/k21l19_70 [Arabidopsis thaliana]
  misc_feature (7)..(469): Homolog of NCBI NO: 22327934 NR Description: glycosyl hydrolase family 17 [Arabidopsis
  misc_feature (8)..(448): Homolog of NCBI NO: 30060382 NR Description: putative glucan endo-1,3-beta-glucosidase
  misc_feature (4)..(458): Homolog of NCBI NO: 15230097 NR Description: glycosyl hydrolase family 17 [Arabidopsis
  misc_feature (5)..(458): Homolog of NCBI NO: 37223500 NR Description: beta-1,3-glucanase, acidic [Coffea arabica]
  misc_feature (25)..(458): Homolog of NCBI NO: 30683955 NR Description: glycosyl hydrolase family 17 [Arabidopsis
  misc_feature (25)..(458): Homolog of NCBI NO: 7488109 NR Description: probable glucanase - Arabidopsis thaliana
  misc_feature (25)..(455): Homolog of NCBI NO: 38423964 NR Description: putative glycosyl hydrolase
  misc_feature (1)..(476): Homolog of NCBI NO: 30697080 NR Description: glycosyl hydrolase family 17 [Arabidopsis
MARRLFLLLLAVTAGLSLTGTTVRAVGINWGTEASHPLPPSKVVELLKSNGIVKVKLFDADPKVLRALSGSNIGVTIGIQNSMLKSLNASVKVAESWVHDNVTRYFNGGNRVRIEYVAVGEEPFLQSYGNQYKPFVIGAAMNIQNALVKANLANEVKVVVPSSFDSFLSESGRPSSGHFRADLNKTMIELLSFLTKHHSPFFVTISPFLSFHQNKNISLDFSLFKETAKAHKDGRKTYRNSFDLSYDTLVSALFTIGFSEVDIVVSKIGWPTDGAENATSLTAEAFFKGLIVHLEKKTASLPRPPVETYIESLLDEDQRNLSAGNFERHWGVFTFDGQAKYNFSFNHKNQVNAQNVQYLPPKWCVVNNNKDLSNASARALEACAVADCTSILPGGSCSGIRWPGNVSYAFNSLYQQNDHSAESCNFGGLGLITTVDPSEDNCRFSIQLDTSHSSSQTPNFFQSWPLLLLFLLSGLF

SEQ ID NO: 46378 - protein, 394 aa, Arabidopsis thaliana
  peptide (1)..(394): Ceres Seq. ID no. 13579209
  misc_feature (1)..(263): Pfam Name: Glycosyl hydrolases family 17 Pfam Description: Glycosyl hydrolases family 17
  misc_feature (1)..(393): Homolog of NCBI NO: 18483232 NR Description: 3-glucanase [Sorghum bicolor]
  misc_feature (1)..(387): Homolog of NCBI NO: 16604491 NR Description: AT5g58090/k21l19_70 [Arabidopsis thaliana]
  misc_feature (1)..(387): Homolog of NCBI NO: 22327934 NR Description: glycosyl hydrolase family 17 [Arabidopsis
  misc_feature (1)..(366): Homolog of NCBI NO: 30060382 NR Description: putative glucan endo-1,3-beta-glucosidase
  misc_feature (1)..(376): Homolog of NCBI NO: 15230097 NR Description: glycosyl hydrolase family 17 [Arabidopsis
  misc_feature (1)..(376): Homolog of NCBI NO: 37223500 NR Description: beta-1,3-glucanase, acidic [Coffea arabica]
  misc_feature (1)..(376): Homolog of NCBI NO: 30683955 NR Description: glycosyl hydrolase family 17 [Arabidopsis
  misc_feature (1)..(376): Homolog of NCBI NO: 7488109 NR Description: probable glucanase - Arabidopsis thaliana
  misc_feature (1)..(373): Homolog of NCBI NO: 38423964 NR Description: putative glycosyl hydrolase
  misc_feature (1)..(394): Homolog of NCBI NO: 30697080 NR Description: glycosyl hydrolase family 17 [Arabidopsis
MLKSLNASVKVAESWVHDNVTRYFNGGNRVRIEYVAVGEEPFLQSYGNQYKPFVIGAAMNIQNALVKANLANEVKVVVPSSFDSFLSESGRPSSGHFRADLNKTMIELLSFLTKHHSPFFVTISPFLSFHQNKNISLDFSLFKETAKAHKDGRKTYRNSFDLSYDTLVSALFTIGFSEVDIVVSKIGWPTDGAENATSLTAEAFFKGLIVHLEKKTASLPRPPVETYIESLLDEDQRNLSAGNFERHWGVFTFDGQAKYNFSFNHKNQVNAQNVQYLPPKWCVVNNNKDLSNASARALEACAVADCTSILPGGSCSGIRWPGNVSYAFNSLYQQNDHSAESCNFGGLGLITTVDPSEDNCRFSIQLDTSHSSSQTPNFFQSWPLLLLFLLSGLF

SEQ ID NO: 46379 - DNA, 1610 bp, Arabidopsis thaliana; identical to SEQ ID NO: 39634
  misc_feature (1)..(1610): Ceres Seq. ID no. 13580607
  misc_feature: MA Experiment ID: 20000179 Result: Down-regulated in Transcription
  misc_feature: MA Experiment 20000179 PARAMETER Experiment Name: At_Germinating_Seeds_P Parameter: Age (hr) Value: 6 vs. 0
  misc_feature: MA Experiment 20000179 PARAMETER Experiment Name: At_Germinating_Seeds_P Parameter: Tissue Value: Germinating Seeds
  misc_feature: MA Experiment ID: 20000180 Result: Down-regulated in Transcription
  misc_feature: MA Experiment 20000180 PARAMETER Experiment Name: At_Germinating_Seeds_P Parameter: Age (hr) Value: 24 vs. 0
  misc_feature: MA Experiment 20000180 PARAMETER Experiment Name: At_Germinating_Seeds_P Parameter: Tissue Value: Germinating Seeds
  misc_feature: MA Experiment ID: 20000182 Result: Up-regulated in Transcription
  misc_feature: MA Experiment 20000182 PARAMETER Experiment Name: At_2mM_SA_P Parameter: Age (day) Value: 14
  misc_feature: MA Experiment 20000182 PARAMETER Experiment Name: At_2mM_SA_P Parameter: Organism Value: A. thaliana
  misc_feature: MA Experiment 20000182 PARAMETER Experiment Name: At_2mM_SA_P Parameter: Plant Line Value: WS
  misc_feature: MA Experiment 20000182 PARAMETER Experiment Name: At_2mM_SA_P Parameter: Timepoint (hr) Value: 6
  misc_feature: MA Experiment 20000182 PARAMETER Experiment Name: At_2mM_SA_P Parameter: Tissue Value: Aerial
  misc_feature: MA Experiment 20000182 PARAMETER Experiment Name: At_2mM_SA_P Parameter: Treatment Value: 2mM SA vs. No Treatment
  misc_feature: MA Experiment ID: 20000234 Result: Down-regulated in Transcription
  misc_feature: MA Experiment 20000234 PARAMETER Experiment Name: At_Siliques_P Parameter: Age (day) Value: 21
  misc_feature: MA Experiment 20000234 PARAMETER Experiment Name: At_Siliques_P Parameter: Organism Value: A. thaliana
  misc_feature: MA Experiment 20000234 PARAMETER Experiment Name: At_Siliques_P Parameter: Plant Line Value: WS
  misc_feature: MA Experiment 20000234 PARAMETER Experiment Name: At_Siliques_P Parameter: Tissue Value: Less Than 5mm Siliques vs. Whole Plant
  misc_feature: MA Experiment ID: 20000235 Result: Down-regulated in Transcription
  misc_feature: MA Experiment 20000235 PARAMETER Experiment Name: At_Siliques_P Parameter: Age (day) Value: 21
  misc_feature: MA Experiment 20000235 PARAMETER Experiment Name: At_Siliques_P Parameter: Organism Value: A. thaliana
  misc_feature: MA Experiment 20000235 PARAMETER Experiment Name: At_Siliques_P Parameter: Plant Line Value: WS
  misc_feature: MA Experiment 20000235 PARAMETER Experiment Name: At_Siliques_P Parameter: Tissue Value: 5-10mm Siliques vs. Whole Plant
  misc_feature: MA Experiment ID: 20000267 Result: Down-regulated in Transcription
  misc_feature: MA Experiment 20000267 PARAMETER Experiment Name: At_Drought_P Parameter: Age (day) Value: 7
  misc_feature: MA Experiment 20000267 PARAMETER Experiment Name: At_Drought_P Parameter: Organism Value: A. thaliana
  misc_feature: MA Experiment 20000267 PARAMETER Experiment Name: At_Drought_P Parameter: Plant Line Value: WS
  misc_feature: MA Experiment 20000267 PARAMETER Experiment Name: At_Drought_P Parameter: Timepoint (hr) Value: 6
  misc_feature: MA Experiment 20000267 PARAMETER Experiment Name: At_Drought_P Parameter: Tissue Value: Whole Plant
  misc_feature: MA Experiment 20000267 PARAMETER Experiment Name: At_Drought_P Parameter: Treatment Value: Drought vs. No Drought
  misc_feature: MA Experiment ID: 20000308 Result: Down-regulated in Transcription
  misc_feature: MA Experiment 20000308 PARAMETER Experiment Name: At_100mM_NaCl__P Parameter: Age (day) Value: 17
  misc_feature: MA Experiment 20000308 PARAMETER Experiment Name: At_100mM_NaCl__P Parameter: Organism Value: A. thaliana
  misc_feature: MA Experiment 20000308 PARAMETER Experiment Name: At_100mM_NaCl__P Parameter: Plant Line Value: WS
  misc_feature: MA Experiment 20000308 PARAMETER Experiment Name: At_100mM_NaCl__P Parameter: Timepoint (hr) Value: 72
  misc_feature: MA Experiment 20000308 PARAMETER Experiment Name: At_100mM_NaCl__P Parameter: Tissue Value: Whole Plant
  misc_feature: MA Experiment 20000308 PARAMETER Experiment Name: At_100mM_NaCl__P Parameter: Treatment Value: 100mM NaCl vs. No Treatment
  misc_feature: MA Experiment ID: 20000456 Result: Up-regulated in Transcription
  misc_feature: MA Experiment 20000456 PARAMETER Experiment Name: At_100uM_BA_P Parameter: Age (day) Value: 14
  misc_feature: MA Experiment 20000456 PARAMETER Experiment Name: At_100uM_BA_P Parameter: Organism Value: A. thaliana
  misc_feature: MA Experiment 20000456 PARAMETER Experiment Name: At_100uM_BA_P Parameter: Plant Line Value: WS
  misc_feature: MA Experiment 20000456 PARAMETER Experiment Name: At_100uM_BA_P Parameter: Timepoint (hr) Value: 6
  misc_feature: MA Experiment 20000456 PARAMETER Experiment Name: At_100uM_BA_P Parameter: Tissue Value: Aerial
  misc_feature: MA Experiment 20000456 PARAMETER Experiment Name: At_100uM_BA_P Parameter: Treatment Value: 100uM BA vs. No Treatment
  misc_feature: MA Experiment ID: 20000527 Result: Down-regulated in Transcription
  misc_feature: MA Experiment 20000527 PARAMETER Experiment Name: At_10percent_PEG_P Parameter: Age (day) Value: 20
  misc_feature: MA Experiment 20000527 PARAMETER Experiment Name: At_10percent_PEG_P Parameter: Organism Value: A. thaliana
  misc_feature: MA Experiment 20000527 PARAMETER Experiment Name: At_10percent_PEG_P Parameter: Plant Line Value: WS
  misc_feature: MA Experiment 20000527 PARAMETER Experiment Name: At_10percent_PEG_P Parameter: Timepoint (day) Value: 20
  misc_feature: MA Experiment 20000527 PARAMETER Experiment Name: At_10percent_PEG_P Parameter: Tissue Value: Whole Plant
  misc_feature: MA Experiment 20000527 PARAMETER Experiment Name: At_10percent_PEG_P Parameter: Treatment Value: 10percent PEG vs. No Treatment
  misc_feature: MA Experiment ID: 20000709 Result: Up-regulated in Transcription
  misc_feature: MA Experiment 20000709 PARAMETER Experiment Name: At_15mM_NH4NO3_L-to-H_P Parameter: Age (hr) Value: 14
  misc_feature: MA Experiment 20000709 PARAMETER Experiment Name: At_15mM_NH4NO3_L-to-H_P Parameter: Organism Value: A. thaliana
  misc_feature: MA Experiment 20000709 PARAMETER Experiment Name: At_15mM_NH4NO3_L-to-H_P Parameter: Plant Line Value: WS
  misc_feature: MA Experiment 20000709 PARAMETER Experiment Name: At_15mM_NH4NO3_L-to-H_P Parameter: Timepoint (hr) Value: 4
  misc_feature: MA Experiment 20000709 PARAMETER Experiment Name: At_15mM_NH4NO3_L-to-H_P Parameter: Tissue Value: Aerial
  misc_feature: MA Experiment 20000709 PARAMETER Experiment Name: At_15mM_NH4NO3_L-to-H_P Parameter: Treatment Value: 15mM NH4NO3 vs. 30mM Mannitol
  misc_feature: MA Experiment ID: 20000794 Result: Up-regulated in Transcription
  misc_feature: MA Experiment 20000794 PARAMETER Experiment Name: At_Petals_P Parameter: Age (day) Value: 23-25 days
  misc_feature: MA Experiment 20000794 PARAMETER Experiment Name: At_Petals_P Parameter: Plant Line Value: WS
  misc_feature: MA Experiment 20000794 PARAMETER Experiment Name: At_Petals_P Parameter: Tissue Value: Petals vs. Whole plant
  misc_feature: MA Experiment ID: 20001247 Result: Down-regulated in Transcription
  misc_feature: MA Experiment 20001247 PARAMETER Experiment Name: At_Far-red-induction_P Parameter: Age (day) Value: 7
  misc_feature: MA Experiment 20001247 PARAMETER Experiment Name: At_Far-red-induction_P Parameter: Light Value: Far-red vs. White
  misc_feature: MA Experiment 20001247 PARAMETER Experiment Name: At_Far-red-induction_P Parameter: Organism Value: A. thaliana
  misc_feature: MA Experiment 20001247 PARAMETER Experiment Name: At_Far-red-induction_P Parameter: Plant Line Value: Columbia
  misc_feature: MA Experiment 20001247 PARAMETER Experiment Name: At_Far-red-induction_P Parameter: Timepoint (hr) Value: 1
  misc_feature: MA Experiment 20001247 PARAMETER Experiment Name: At_Far-red-induction_P Parameter: Tissue Value: Whole Plant
  misc_feature: MA Experiment ID: 20001248 Result: Down-regulated in Transcription
  misc_feature: MA Experiment 20001248 PARAMETER Experiment Name: At_Far-red-induction_P Parameter: Age (day) Value: 7
  misc_feature: MA Experiment 20001248 PARAMETER Experiment Name: At_Far-red-induction_P Parameter: Light Value: Far-red vs. White
  misc_feature: MA Experiment 20001248 PARAMETER Experiment Name: At_Far-red-induction_P Parameter: Organism Value: A. thaliana
  misc_feature: MA Experiment 20001248 PARAMETER Experiment Name: At_Far-red-induction_P Parameter: Plant Line Value: Columbia
  misc_feature: MA Experiment 20001248 PARAMETER Experiment Name: At_Far-red-induction_P Parameter: Timepoint (hr) Value: 4
  misc_feature: MA Experiment 20001248 PARAMETER Experiment Name: At_Far-red-induction_P Parameter: Tissue Value: Whole Plant
  misc_feature: MA Experiment ID: 20001450 Result: Down-regulated in Transcription
  misc_feature: MA Experiment 20001450 PARAMETER Experiment Name: At_Far-red-induction_P Parameter: Age (day) Value: 7
  misc_feature: MA Experiment 20001450 PARAMETER Experiment Name: At_Far-red-induction_P Parameter: Light Value: Far-red vs. White
  misc_feature: MA Experiment 20001450 PARAMETER Experiment Name: At_Far-red-induction_P Parameter: Organism Value: A. thaliana
  misc_feature: MA Experiment 20001450 PARAMETER Experiment Name: At_Far-red-induction_P Parameter: Plant Line Value: Columbia
  misc_feature: MA Experiment 20001450 PARAMETER Experiment Name: At_Far-red-induction_P Parameter: Timepoint (hr) Value: 8
  misc_feature: MA Experiment 20001450 PARAMETER Experiment Name: At_Far-red-induction_P Parameter: Tissue Value: Whole Plant
  misc_feature: MA Experiment ID: 20001451 Result: Down-regulated in Transcription
  misc_feature: MA Experiment 20001451 PARAMETER Experiment Name: At_Far-red-induction_P Parameter: Age (day) Value: 7
  misc_feature: MA Experiment 20001451 PARAMETER Experiment Name: At_Far-red-induction_P Parameter: Light Value: Far-red vs. White
  misc_feature: MA Experiment 20001451 PARAMETER Experiment Name: At_Far-red-induction_P Parameter: Organism Value: A. thaliana
  misc_feature: MA Experiment 20001451 PARAMETER Experiment Name: At_Far-red-induction_P Parameter: Plant Line Value: Columbia
  misc_feature: MA Experiment 20001451 PARAMETER Experiment Name: At_Far-red-induction_P Parameter: Timepoint (hr) Value: 24
  misc_feature: MA Experiment 20001451 PARAMETER Experiment Name: At_Far-red-induction_P Parameter: Tissue Value: Whole Plant
  misc_feature: MA Experiment ID: 20001557 Result: Up-regulated in Transcription
  misc_feature: MA Experiment 20001557 PARAMETER Experiment Name: At_Drought_Soil_Dry_P Parameter: Age (day) Value: 27
  misc_feature: MA Experiment 20001557 PARAMETER Experiment Name: At_Drought_Soil_Dry_P Parameter: Organism Value: A. thaliana
  misc_feature: MA Experiment 20001557 PARAMETER Experiment Name: At_Drought_Soil_Dry_P Parameter: Plant Line Value: WS
  misc_feature: MA Experiment 20001557 PARAMETER Experiment Name: At_Drought_Soil_Dry_P Parameter: Post Timepoint (hr) Value: 3
  misc_feature: MA Experiment 20001557 PARAMETER Experiment Name: At_Drought_Soil_Dry_P Parameter: Post-Treatment Value: Re-Water vs. No Drought
  misc_feature: MA Experiment 20001557 PARAMETER Experiment Name: At_Drought_Soil_Dry_P Parameter: Timepoint (day) Value: 13
  misc_feature: MA Experiment 20001557 PARAMETER Experiment Name: At_Drought_Soil_Dry_P Parameter: Treatment Value: Drought vs. No Drought
  misc_feature: MA Experiment ID: 20001560 Result: Up-regulated in Transcription
  misc_feature: MA Experiment 20001560 PARAMETER Experiment Name: At_Drought_Soil_Dry_P Parameter: Age (day) Value: 28
  misc_feature: MA Experiment 20001560 PARAMETER Experiment Name: At_Drought_Soil_Dry_P Parameter: Organism Value: A. thaliana
  misc_feature: MA Experiment 20001560 PARAMETER Experiment Name: At_Drought_Soil_Dry_P Parameter: Plant Line Value: WS
  misc_feature: MA Experiment 20001560 PARAMETER Experiment Name: At_Drought_Soil_Dry_P Parameter: Post Timepoint (hr) Value: None
  misc_feature: MA Experiment 20001560 PARAMETER Experiment Name: At_Drought_Soil_Dry_P Parameter: Post-Treatment Value: None
  misc_feature: MA Experiment 20001560 PARAMETER Experiment Name: At_Drought_Soil_Dry_P Parameter: Timepoint (day) Value: 14
  misc_feature: MA Experiment 20001560 PARAMETER Experiment Name: At_Drought_Soil_Dry_P Parameter: Treatment Value: Drought vs. No Drought
  misc_feature: MA Experiment ID: 20001905 Result: Up-regulated in Transcription
  misc_feature: MA Experiment 20001905 PARAMETER Experiment Name: At_Drought_Reproduction_P Parameter: Age (day) Value: 40
  misc_feature: MA Experiment 20001905 PARAMETER Experiment Name: At_Drought_Reproduction_P Parameter: Organism Value: A. thaliana
  misc_feature: MA Experiment 20001905 PARAMETER Experiment Name: At_Drought_Reproduction_P Parameter: Plant Line Value: WS
  misc_feature: MA Experiment 20001905 PARAMETER Experiment Name: At_Drought_Reproduction_P Parameter: Timepoint (day) Value: 10
  misc_feature: MA Experiment 20001905 PARAMETER Experiment Name: At_Drought_Reproduction_P Parameter: Tissue Value: Rosettes
  misc_feature: MA Experiment 20001905 PARAMETER Experiment Name: At_Drought_Reproduction_P Parameter: Treatment Value: Drought vs. No Drought
  misc_feature: MA Experiment ID: 20001908 Result: Up-regulated in Transcription
  misc_feature: MA Experiment 20001908 PARAMETER Experiment Name: At_Drought_Reproduction_P Parameter: Age (day) Value: 40
  misc_feature: MA Experiment 20001908 PARAMETER Experiment Name: At_Drought_Reproduction_P Parameter: Organism Value: A. thaliana
  misc_feature: MA Experiment 20001908 PARAMETER Experiment Name: At_Drought_Reproduction_P Parameter: Plant Line Value: WS
  misc_feature: MA Experiment 20001908 PARAMETER Experiment Name: At_Drought_Reproduction_P Parameter: Timepoint (day) Value: 10
  misc_feature: MA Experiment 20001908 PARAMETER Experiment Name: At_Drought_Reproduction_P Parameter: Tissue Value: Siliques
  misc_feature: MA Experiment 20001908 PARAMETER Experiment Name: At_Drought_Reproduction_P Parameter: Treatment Value: Drought vs. No Drought

SEQ ID NO: 46380 - protein, 287 aa, Arabidopsis thaliana; identical to SEQ ID NO: 39635
  peptide (1)..(287): Ceres Seq. ID no. 13580608
  misc_feature (1)..(273): Pfam Name: UDP-glucoronosyl and UDP-glucosyl transferase Pfam Description: UDP-glucoronosyl and UDP-glucosyl transferase
  misc_feature (1)..(273): Pfam Name: UDP-glucoronosyl and UDP-glucosyl transferase Pfam Description: UDP-glucoronosyl and UDP-glucosyl transferase
  misc_feature (1)..(273): Pfam Name: UDP-glucoronosyl and UDP-glucosyl transferase Pfam Description: UDP-glucoronosyl and UDP-glucosyl transferase
  misc_feature (1)..(269): Homolog of NCBI NO: 4115559 NR Description: UDP-glucose:anthocysnin 5-O-glucosyltransferase
  misc_feature (3)..(268): Homolog of NCBI NO: 16604440 NR Description: AT4g15550/dl3815c [Arabidopsis thaliana]
  misc_feature (3)..(268): Homolog of NCBI NO: 7433892 NR Description: hypothetical protein - Arabidopsis thaliana
  misc_feature (3)..(269): Homolog of NCBI NO: 6683052 NR Description: anthocyanin 5-O-glucosyltransferase [Petunia x
  misc_feature (3)..(273): Homolog of NCBI NO: 14192682 NR Description: cold-induced glucosyl transferase [Solanum
  misc_feature (1)..(269): Homolog of NCBI NO: 4115559 NR Description: UDP-glucose:anthocysnin 5-O-glucosyltransferase
  misc_feature (3)..(268): Homolog of NCBI NO: 7433892 NR Description: hypothetical protein - Arabidopsis thaliana
  misc_feature (3)..(273): Homolog of NCBI NO: 14192682 NR Description: cold-induced glucosyl transferase [Solanum
  misc_feature (3)..(269): Homolog of NCBI NO: 6683052 NR Description: anthocyanin 5-O-glucosyltransferase [Petunia x
  misc_feature (3)..(268): Homolog of NCBI NO: 7433892 NR Description: hypothetical protein - Arabidopsis thaliana
  misc_feature (3)..(268): Homolog of NCBI NO: 16604440 NR Description: AT4g15550/dl3815c [Arabidopsis thaliana]
  misc_feature (1)..(269): Homolog of NCBI NO: 4115559 NR Description: UDP-glucose:anthocysnin 5-O-glucosyltransferase
  misc_feature (1)..(287): Homolog of NCBI NO: 18390540 NR Description: UDP-glucose transferase(UGT1) [Arabidopsis
  misc_feature (1)..(269): Homolog of NCBI NO: 15220556 NR Description: glycosyltransferase family [Arabidopsis thaliana]
  misc_feature (3)..(268): Homolog of NCBI NO: 18414478 NR Description: UDP-glucose:indole-3-acetate
  misc_feature (3)..(268): Homolog of NCBI NO: 2149127 NR Description: UDP-glucose:indole-3-acetate
  misc_feature (3)..(269): Homolog of NCBI NO: 20146093 NR Description: glucosyltransferase NTGT2 [Nicotiana tabacum]
  misc_feature (1)..(287): Homolog of NCBI NO: 18390540 NR Description: UDP-glucose transferase(UGT1) [Arabidopsis
  misc_feature (1)..(269): Homolog of NCBI NO: 15220556 NR Description: glycosyltransferase family [Arabidopsis thaliana]
  misc_feature (3)..(268): Homolog of NCBI NO: 18414478 NR Description: UDP-glucose:indole-3-acetate
  misc_feature (3)..(268): Homolog of NCBI NO: 2149127 NR Description: UDP-glucose:indole-3-acetate
  misc_feature (3)..(269): Homolog of NCBI NO: 20146093 NR Description: glucosyltransferase NTGT2 [Nicotiana tabacum]
  misc_feature (3)..(273): Homolog of NCBI NO: 14192682 NR Description: cold-induced glucosyl transferase [Solanum
  misc_feature (3)..(269): Homolog of NCBI NO: 6683052 NR Description: anthocyanin 5-O-glucosyltransferase [Petunia x
  misc_feature (3)..(268): Homolog of NCBI NO: 16604440 NR Description: AT4g15550/dl3815c [Arabidopsis thaliana]
  misc_feature (3)..(269): Homolog of NCBI NO: 20146093 NR Description: glucosyltransferase NTGT2 [Nicotiana tabacum]
  misc_feature (3)..(268): Homolog of NCBI NO: 2149127 NR Description: UDP-glucose:indole-3-acetate
  misc_feature (3)..(268): Homolog of NCBI NO: 18414478 NR Description: UDP-glucose:indole-3-acetate
  misc_feature (1)..(269): Homolog of NCBI NO: 15220556 NR Description: glycosyltransferase family [Arabidopsis thaliana]
  misc_feature (1)..(287): Homolog of NCBI NO: 18390540 NR Description: UDP-glucose transferase(UGT1) [Arabidopsis

SEQ ID NO: 46381 - protein, 282 aa, Arabidopsis thaliana; identical to SEQ ID NO: 39636
  peptide (1)..(282): Ceres Seq. ID no. 13580609
  misc_feature (1)..(268): Pfam Name: UDP-glucoronosyl and UDP-glucosyl transferase Pfam Description: UDP-glucoronosyl and UDP-glucosyl transferase
  misc_feature (1)..(268): Pfam Name: UDP-glucoronosyl and UDP-glucosyl transferase Pfam Description: UDP-glucoronosyl and UDP-glucosyl transferase
  misc_feature (1)..(268): Pfam Name: UDP-glucoronosyl and UDP-glucosyl transferase Pfam Description: UDP-glucoronosyl and UDP-glucosyl transferase
  misc_feature (1)..(264): Homolog of NCBI NO: 4115559 NR Description: UDP-glucose:anthocysnin 5-O-glucosyltransferase
  misc_feature (1)..(263): Homolog of NCBI NO: 16604440 NR Description: AT4g15550/dl3815c [Arabidopsis thaliana]
  misc_feature (1)..(263): Homolog of NCBI NO: 7433892 NR Description: hypothetical protein - Arabidopsis thaliana
  misc_feature (1)..(264): Homolog of NCBI NO: 6683052 NR Description: anthocyanin 5-O-glucosyltransferase [Petunia x
  misc_feature (1)..(268): Homolog of NCBI NO: 14192682 NR Description: cold-induced glucosyl transferase [Solanum
  misc_feature (1)..(264): Homolog of NCBI NO: 4115559 NR Description: UDP-glucose:anthocysnin 5-O-glucosyltransferase
  misc_feature (1)..(263): Homolog of NCBI NO: 7433892 NR Description: hypothetical protein - Arabidopsis thaliana
  misc_feature (1)..(268): Homolog of NCBI NO: 14192682 NR Description: cold-induced glucosyl transferase [Solanum
  misc_feature (1)..(264): Homolog of NCBI NO: 6683052 NR Description: anthocyanin 5-O-glucosyltransferase [Petunia x
  misc_feature (1)..(263): Homolog of NCBI NO: 7433892 NR Description: hypothetical protein - Arabidopsis thaliana
  misc_feature (1)..(263): Homolog of NCBI NO: 16604440 NR Description: AT4g15550/dl3815c [Arabidopsis thaliana]
  misc_feature (1)..(264): Homolog of NCBI NO: 4115559 NR Description: UDP-glucose:anthocysnin 5-O-glucosyltransferase
  misc_feature (1)..(282): Homolog of NCBI NO: 18390540 NR Description: UDP-glucose transferase(UGT1) [Arabidopsis
  misc_feature (1)..(264): Homolog of NCBI NO: 15220556 NR Description: glycosyltransferase family [Arabidopsis thaliana]
  misc_feature (1)..(263): Homolog of NCBI NO: 18414478 NR Description: UDP-glucose:indole-3-acetate
  misc_feature (1)..(263): Homolog of NCBI NO: 2149127 NR Description: UDP-glucose:indole-3-acetate
  misc_feature (1)..(264): Homolog of NCBI NO: 20146093 NR Description: glucosyltransferase NTGT2 [Nicotiana tabacum]
  misc_feature (1)..(282): Homolog of NCBI NO: 18390540 NR Description: UDP-glucose transferase(UGT1) [Arabidopsis
  misc_feature (1)..(264): Homolog of NCBI NO: 15220556 NR Description: glycosyltransferase family [Arabidopsis thaliana]
  misc_feature (1)..(263): Homolog of NCBI NO: 18414478 NR Description: UDP-glucose:indole-3-acetate
  misc_feature (1)..(263): Homolog of NCBI NO: 2149127 NR Description: UDP-glucose:indole-3-acetate
  misc_feature (1)..(264): Homolog of NCBI NO: 20146093 NR Description: glucosyltransferase NTGT2 [Nicotiana tabacum]
  misc_feature (1)..(268): Homolog of NCBI NO: 14192682 NR Description: cold-induced glucosyl transferase [Solanum
  misc_feature (1)..(264): Homolog of NCBI NO: 6683052 NR Description: anthocyanin 5-O-glucosyltransferase [Petunia x
  misc_feature (1)..(263): Homolog of NCBI NO: 16604440 NR Description: AT4g15550/dl3815c [Arabidopsis thaliana]
  misc_feature (1)..(264): Homolog of NCBI NO: 20146093 NR Description: glucosyltransferase NTGT2 [Nicotiana tabacum]
  misc_feature (1)..(263): Homolog of NCBI NO: 2149127 NR Description: UDP-glucose:indole-3-acetate
  misc_feature (1)..(263): Homolog of NCBI NO: 18414478 NR Description: UDP-glucose:indole-3-acetate
  misc_feature (1)..(264): Homolog of NCBI NO: 15220556 NR Description: glycosyltransferase family [Arabidopsis thaliana]
  misc_feature (1)..(282): Homolog of NCBI NO: 18390540 NR Description: UDP-glucose transferase(UGT1) [Arabidopsis

SEQ ID NO: 46382 - protein, 281 aa, Arabidopsis thaliana; identical to SEQ ID NO: 39637
  peptide (1)..(281): Ceres Seq. ID no. 13580610
  misc_feature (1)..(267): Pfam Name: UDP-glucoronosyl and UDP-glucosyl transferase Pfam Description: UDP-glucoronosyl and UDP-glucosyl transferase
  misc_feature (1)..(267): Pfam Name: UDP-glucoronosyl and UDP-glucosyl transferase Pfam Description: UDP-glucoronosyl and UDP-glucosyl transferase
  misc_feature (1)..(267): Pfam Name: UDP-glucoronosyl and UDP-glucosyl transferase Pfam Description: UDP-glucoronosyl and UDP-glucosyl transferase
  misc_feature (1)..(263): Homolog of NCBI NO: 4115559 NR Description: UDP-glucose:anthocysnin 5-O-glucosyltransferase
  misc_feature (1)..(262): Homolog of NCBI NO: 16604440 NR Description: AT4g15550/dl3815c [Arabidopsis thaliana]
  misc_feature (1)..(262): Homolog of NCBI NO: 7433892 NR Description: hypothetical protein - Arabidopsis thaliana
  misc_feature (1)..(263): Homolog of NCBI NO: 6683052 NR Description: anthocyanin 5-O-glucosyltransferase [Petunia x
  misc_feature (1)..(267): Homolog of NCBI NO: 14192682 NR Description: cold-induced glucosyl transferase [Solanum
  misc_feature (1)..(263): Homolog of NCBI NO: 4115559 NR Description: UDP-glucose:anthocysnin 5-O-glucosyltransferase
  misc_feature (1)..(262): Homolog of NCBI NO: 7433892 NR Description: hypothetical protein - Arabidopsis thaliana
  misc_feature (1)..(267): Homolog of NCBI NO: 14192682 NR Description: cold-induced glucosyl transferase [Solanum
  misc_feature (1)..(263): Homolog of NCBI NO: 6683052 NR Description: anthocyanin 5-O-glucosyltransferase [Petunia x
  misc_feature (1)..(262): Homolog of NCBI NO: 7433892 NR Description: hypothetical protein - Arabidopsis thaliana
  misc_feature (1)..(262): Homolog of NCBI NO: 16604440 NR Description: AT4g15550/dl3815c [Arabidopsis thaliana]
  misc_feature (1)..(263): Homolog of NCBI NO: 4115559 NR Description: UDP-glucose:anthocysnin 5-O-glucosyltransferase
  misc_feature (1)..(281): Homolog of NCBI NO: 18390540 NR Description: UDP-glucose transferase(UGT1) [Arabidopsis
  misc_feature (1)..(263): Homolog of NCBI NO: 15220556 NR Description: glycosyltransferase family [Arabidopsis thaliana]
  misc_feature (1)..(262): Homolog of NCBI NO: 18414478 NR Description: UDP-glucose:indole-3-acetate
  misc_feature (1)..(262): Homolog of NCBI NO: 2149127 NR Description: UDP-glucose:indole-3-acetate
  misc_feature (1)..(263): Homolog of NCBI NO: 20146093 NR Description: glucosyltransferase NTGT2 [Nicotiana tabacum]
  misc_feature (1)..(281): Homolog of NCBI NO: 18390540 NR Description: UDP-glucose transferase(UGT1) [Arabidopsis
  misc_feature (1)..(263): Homolog of NCBI NO: 15220556 NR Description: glycosyltransferase family [Arabidopsis thaliana]
  misc_feature (1)..(262): Homolog of NCBI NO: 18414478 NR Description: UDP-glucose:indole-3-acetate
  misc_feature (1)..(262): Homolog of NCBI NO: 2149127 NR Description: UDP-glucose:indole-3-acetate
  misc_feature (1)..(263): Homolog of NCBI NO: 20146093 NR Description: glucosyltransferase NTGT2 [Nicotiana tabacum]
  misc_feature (1)..(267): Homolog of NCBI NO: 14192682 NR Description: cold-induced glucosyl transferase [Solanum
  misc_feature (1)..(263): Homolog of NCBI NO: 6683052 NR Description: anthocyanin 5-O-glucosyltransferase [Petunia x
  misc_feature (1)..(262): Homolog of NCBI NO: 16604440 NR Description: AT4g15550/dl3815c [Arabidopsis thaliana]
  misc_feature (1)..(263): Homolog of NCBI NO: 20146093 NR Description: glucosyltransferase NTGT2 [Nicotiana tabacum]
  misc_feature (1)..(262): Homolog of NCBI NO: 2149127 NR Description: UDP-glucose:indole-3-acetate
  misc_feature (1)..(262): Homolog of NCBI NO: 18414478 NR Description: UDP-glucose:indole-3-acetate
  misc_feature (1)..(263): Homolog of NCBI NO: 15220556 NR Description: glycosyltransferase family [Arabidopsis thaliana]
  misc_feature (1)..(281): Homolog of NCBI NO: 18390540 NR Description: UDP-glucose transferase(UGT1) [Arabidopsis

SEQ ID NO: 46383 - DNA, 3093 bp, Arabidopsis thaliana; identical to SEQ ID NO: 45040
  misc_feature (1)..(3093): Ceres Seq. ID no. 12600157
  misc_feature: MA Experiment ID: 20000179 Result: Up-regulated in Transcription
  misc_feature: MA Experiment 20000179 PARAMETER Experiment Name: At_Germinating_Seeds_P Parameter: Age (hr) Value: 6 vs. 0
  misc_feature: MA Experiment 20000179 PARAMETER Experiment Name: At_Germinating_Seeds_P Parameter: Tissue Value: Germinating Seeds
  misc_feature: MA Experiment ID: 20000180 Result: Up-regulated in Transcription
  misc_feature: MA Experiment 20000180 PARAMETER Experiment Name: At_Germinating_Seeds_P Parameter: Age (hr) Value: 24 vs. 0
  misc_feature: MA Experiment 20000180 PARAMETER Experiment Name: At_Germinating_Seeds_P Parameter: Tissue Value: Germinating Seeds
  misc_feature: MA Experiment ID: 20000184 Result: Up-regulated in Transcription
  misc_feature: MA Experiment 20000184 PARAMETER Experiment Name: At_Shoots__P Parameter: Age (day) Value: 7
  misc_feature: MA Experiment 20000184 PARAMETER Experiment Name: At_Shoots__P Parameter: Tissue Value: Shoots vs. Whole Plant
  misc_feature: MA Experiment ID: 20000234 Result: Up-regulated in Transcription
  misc_feature: MA Experiment 20000234 PARAMETER Experiment Name: At_Siliques_P Parameter: Age (day) Value: 21
  misc_feature: MA Experiment 20000234 PARAMETER Experiment Name: At_Siliques_P Parameter: Organism Value: A. thaliana
  misc_feature: MA Experiment 20000234 PARAMETER Experiment Name: At_Siliques_P Parameter: Plant Line Value: WS
  misc_feature: MA Experiment 20000234 PARAMETER Experiment Name: At_Siliques_P Parameter: Tissue Value: Less Than 5mm Siliques vs. Whole Plant
  misc_feature: MA Experiment ID: 20000235 Result: Up-regulated in Transcription
  misc_feature: MA Experiment 20000235 PARAMETER Experiment Name: At_Siliques_P Parameter: Age (day) Value: 21
  misc_feature: MA Experiment 20000235 PARAMETER Experiment Name: At_Siliques_P Parameter: Organism Value: A. thaliana
  misc_feature: MA Experiment 20000235 PARAMETER Experiment Name: At_Siliques_P Parameter: Plant Line Value: WS
  misc_feature: MA Experiment 20000235 PARAMETER Experiment Name: At_Siliques_P Parameter: Tissue Value: 5-10mm Siliques vs. Whole Plant
  misc_feature: MA Experiment ID: 20000264 Result: Up-regulated in Transcription
  misc_feature: MA Experiment 20000264 PARAMETER Experiment Name: At_Open_Flower_P Parameter: Age (day) Value: 21
  misc_feature: MA Experiment 20000264 PARAMETER Experiment Name: At_Open_Flower_P Parameter: Plant Line Value: WS
  misc_feature: MA Experiment 20000264 PARAMETER Experiment Name: At_Open_Flower_P Parameter: Tissue Value: Open Flower vs. Whole Plant
  misc_feature: MA Experiment ID: 20000265 Result: Up-regulated in Transcription
  misc_feature: MA Experiment 20000265 PARAMETER Experiment Name: At_Open_Flower_P Parameter: Age (day) Value: 21
  misc_feature: MA Experiment 20000265 PARAMETER Experiment Name: At_Open_Flower_P Parameter: Plant Line Value: WS
  misc_feature: MA Experiment 20000265 PARAMETER Experiment Name: At_Open_Flower_P Parameter: Tissue Value: Closed Flower vs. Whole Plant
  misc_feature: MA Experiment ID: 20000286 Result: Up-regulated in Transcription
  misc_feature: MA Experiment 20000286 PARAMETER Experiment Name: At_Open_Flower_P Parameter: Age (day) Value: 21
  misc_feature: MA Experiment 20000286 PARAMETER Experiment Name: At_Open_Flower_P Parameter: Plant Line Value: WS
  misc_feature: MA Experiment 20000286 PARAMETER Experiment Name: At_Open_Flower_P Parameter: Tissue Value: Half Open vs. Whole Plant
  misc_feature: MA Experiment ID: 20000438 Result: Up-regulated in Transcription
  misc_feature: MA Experiment 20000438 PARAMETER Experiment Name: At_Shoots__P Parameter: Age (day) Value: 14
  misc_feature: MA Experiment 20000438 PARAMETER Experiment Name: At_Shoots__P Parameter: Tissue Value: Shoots vs. Whole Plant
  misc_feature: MA Experiment ID: 20000439 Result: Up-regulated in Transcription
  misc_feature: MA Experiment 20000439 PARAMETER Experiment Name: At_Roots__P Parameter: Age (day) Value: 14 vs. 21
  misc_feature: MA Experiment 20000439 PARAMETER Experiment Name: At_Roots__P Parameter: Organism Value: A. thaliana
  misc_feature: MA Experiment 20000439 PARAMETER Experiment Name: At_Roots__P Parameter: Tissue Value: Roots vs. Whole Plant
  misc_feature: MA Experiment ID: 20000495 Result: Up-regulated in Transcription
  misc_feature: MA Experiment 20000495 PARAMETER Experiment Name: At_Guard_Cells_P Parameter: Harvest Date Value: 8/2/2002
  misc_feature: MA Experiment 20000495 PARAMETER Experiment Name: At_Guard_Cells_P Parameter: Organism Value: A. thaliana
  misc_feature: MA Experiment 20000495 PARAMETER Experiment Name: At_Guard_Cells_P Parameter: Tissue Value: Guard Cells vs. Leaves
  misc_feature: MA Experiment ID: 20000573 Result: Down-regulated in Transcription
  misc_feature: MA Experiment 20000573 PARAMETER Experiment Name: At_100uM_ABA_Mutants__P Parameter: Organism Value: A. thaliana
  misc_feature: MA Experiment 20000573 PARAMETER Experiment Name: At_100uM_ABA_Mutants__P Parameter: Plant Line Value: CS22 vs. Ler wt
  misc_feature: MA Experiment 20000573 PARAMETER Experiment Name: At_100uM_ABA_Mutants__P Parameter: Timepoint (hr) Value: N/A
  misc_feature: MA Experiment 20000573 PARAMETER Experiment Name: At_100uM_ABA_Mutants__P Parameter: Tissue Value: Whole Plant
  misc_feature: MA Experiment 20000573 PARAMETER Experiment Name: At_100uM_ABA_Mutants__P Parameter: Treatment Value: None
  misc_feature: MA Experiment ID: 20001248 Result: Down-regulated in Transcription
  misc_feature: MA Experiment 20001248 PARAMETER Experiment Name: At_Far-red-induction_P Parameter: Age (day) Value: 7
  misc_feature: MA Experiment 20001248 PARAMETER Experiment Name: At_Far-red-induction_P Parameter: Light Value: Far-red vs. White
  misc_feature: MA Experiment 20001248 PARAMETER Experiment Name: At_Far-red-induction_P Parameter: Organism Value: A. thaliana
  misc_feature: MA Experiment 20001248 PARAMETER Experiment Name: At_Far-red-induction_P Parameter: Plant Line Value: Columbia
  misc_feature: MA Experiment 20001248 PARAMETER Experiment Name: At_Far-red-induction_P Parameter: Timepoint (hr) Value: 4
  misc_feature: MA Experiment 20001248 PARAMETER Experiment Name: At_Far-red-induction_P Parameter: Tissue Value: Whole Plant
  misc_feature: MA Experiment ID: 20001450 Result: Down-regulated in Transcription
  misc_feature: MA Experiment 20001450 PARAMETER Experiment Name: At_Far-red-induction_P Parameter: Age (day) Value: 7
  misc_feature: MA Experiment 20001450 PARAMETER Experiment Name: At_Far-red-induction_P Parameter: Light Value: Far-red vs. White
  misc_feature: MA Experiment 20001450 PARAMETER Experiment Name: At_Far-red-induction_P Parameter: Organism Value: A. thaliana
  misc_feature: MA Experiment 20001450 PARAMETER Experiment Name: At_Far-red-induction_P Parameter: Plant Line Value: Columbia
  misc_feature: MA Experiment 20001450 PARAMETER Experiment Name: At_Far-red-induction_P Parameter: Timepoint (hr) Value: 8
  misc_feature: MA Experiment 20001450 PARAMETER Experiment Name: At_Far-red-induction_P Parameter: Tissue Value: Whole Plant
  misc_feature: MA Experiment ID: 20001557 Result: Up-regulated in Transcription
  misc_feature: MA Experiment 20001557 PARAMETER Experiment Name: At_Drought_Soil_Dry_P Parameter: Age (day) Value: 27
  misc_feature: MA Experiment 20001557 PARAMETER Experiment Name: At_Drought_Soil_Dry_P Parameter: Organism Value: A. thaliana
  misc_feature: MA Experiment 20001557 PARAMETER Experiment Name: At_Drought_Soil_Dry_P Parameter: Plant Line Value: WS
  misc_feature: MA Experiment 20001557 PARAMETER Experiment Name: At_Drought_Soil_Dry_P Parameter: Post Timepoint (hr) Value: 3
  misc_feature: MA Experiment 20001557 PARAMETER Experiment Name: At_Drought_Soil_Dry_P Parameter: Post-Treatment Value: Re-Water vs. No Drought
  misc_feature: MA Experiment 20001557 PARAMETER Experiment Name: At_Drought_Soil_Dry_P Parameter: Timepoint (day) Value: 13
  misc_feature: MA Experiment 20001557 PARAMETER Experiment Name: At_Drought_Soil_Dry_P Parameter: Treatment Value: Drought vs. No Drought
  misc_feature: MA Experiment ID: 20001558 Result: Up-regulated in Transcription
  misc_feature: MA Experiment 20001558 PARAMETER Experiment Name: At_Drought_Soil_Dry_P Parameter: Age (day) Value: 27
  misc_feature: MA Experiment 20001558 PARAMETER Experiment Name: At_Drought_Soil_Dry_P Parameter: Organism Value: A. thaliana
  misc_feature: MA Experiment 20001558 PARAMETER Experiment Name: At_Drought_Soil_Dry_P Parameter: Plant Line Value: WS
  misc_feature: MA Experiment 20001558 PARAMETER Experiment Name: At_Drought_Soil_Dry_P Parameter: Post Timepoint (hr) Value: 6
  misc_feature: MA Experiment 20001558 PARAMETER Experiment Name: At_Drought_Soil_Dry_P Parameter: Post-Treatment Value: Re-Water vs. No Drought
  misc_feature: MA Experiment 20001558 PARAMETER Experiment Name: At_Drought_Soil_Dry_P Parameter: Timepoint (day) Value: 13
  misc_feature: MA Experiment 20001558 PARAMETER Experiment Name: At_Drought_Soil_Dry_P Parameter: Treatment Value: Drought vs. No Drought
  misc_feature: MA Experiment ID: 20001560 Result: Up-regulated in Transcription
  misc_feature: MA Experiment 20001560 PARAMETER Experiment Name: At_Drought_Soil_Dry_P Parameter: Age (day) Value: 28
  misc_feature: MA Experiment 20001560 PARAMETER Experiment Name: At_Drought_Soil_Dry_P Parameter: Organism Value: A. thaliana
  misc_feature: MA Experiment 20001560 PARAMETER Experiment Name: At_Drought_Soil_Dry_P Parameter: Plant Line Value: WS
  misc_feature: MA Experiment 20001560 PARAMETER Experiment Name: At_Drought_Soil_Dry_P Parameter: Post Timepoint (hr) Value: None
  misc_feature: MA Experiment 20001560 PARAMETER Experiment Name: At_Drought_Soil_Dry_P Parameter: Post-Treatment Value: None
  misc_feature: MA Experiment 20001560 PARAMETER Experiment Name: At_Drought_Soil_Dry_P Parameter: Timepoint (day) Value: 14
  misc_feature: MA Experiment 20001560 PARAMETER Experiment Name: At_Drought_Soil_Dry_P Parameter: Treatment Value: Drought vs. No Drought
  misc_feature: MA Experiment ID: 20001911 Result: Down-regulated in Transcription
  misc_feature: MA Experiment 20001911 PARAMETER Experiment Name: At_Drought_Reproduction_P Parameter: Age (day) Value: 40
  misc_feature: MA Experiment 20001911 PARAMETER Experiment Name: At_Drought_Reproduction_P Parameter: Organism Value: A. thaliana
  misc_feature: MA Experiment 20001911 PARAMETER Experiment Name: At_Drought_Reproduction_P Parameter: Plant Line Value: WS
  misc_feature: MA Experiment 20001911 PARAMETER Experiment Name: At_Drought_Reproduction_P Parameter: Timepoint (day) Value: 10
  misc_feature: MA Experiment 20001911 PARAMETER Experiment Name: At_Drought_Reproduction_P Parameter: Tissue Value: Flowers
  misc_feature: MA Experiment 20001911 PARAMETER Experiment Name: At_Drought_Reproduction_P Parameter: Treatment Value: Drought vs. No Drought

SEQ ID NO: 46384 - protein, 856 aa, Arabidopsis thaliana; identical to SEQ ID NO: 45041
  peptide (1)..(856): Ceres Seq. ID no. 12600158
  misc_feature (768)..(845): Pfam Name: Galactose binding lectin domain Pfam Description: Galactose binding lectin domain
  misc_feature (768)..(845): Pfam Name: Galactose binding lectin domain Pfam Description: Galactose binding lectin domain
  misc_feature (768)..(845): Pfam Name: Galactose binding lectin domain Pfam Description: Galactose binding lectin domain
  misc_feature (622)..(849): Homolog of NCBI NO: 30679742 NR Description: glycosyl hydrolase family 35 (beta-galactosidase)
  misc_feature (33)..(668): Homolog of NCBI NO: 30679742 NR Description: glycosyl hydrolase family 35 (beta-galactosidase)
  misc_feature (622)..(849): Homolog of NCBI NO: 25326168 NR Description: probable beta-galactosidase [imported] -
  misc_feature (16)..(668): Homolog of NCBI NO: 25326168 NR Description: probable beta-galactosidase [imported] -
  misc_feature (22)..(846): Homolog of NCBI NO: 30683905 NR Description: glycosyl hydrolase family 35 (beta-galactosidase)
  misc_feature (622)..(849): Homolog of NCBI NO: 30679742 NR Description: glycosyl hydrolase family 35 (beta-galactosidase)
  misc_feature (622)..(849): Homolog of NCBI NO: 25326168 NR Description: probable beta-galactosidase [imported] -
  misc_feature (22)..(846): Homolog of NCBI NO: 30683905 NR Description: glycosyl hydrolase family 35 (beta-galactosidase)
  misc_feature (16)..(668): Homolog of NCBI NO: 25326168 NR Description: probable beta-galactosidase [imported] -
  misc_feature (622)..(849): Homolog of NCBI NO: 25326168 NR Description: probable beta-galactosidase [imported] -
  misc_feature (33)..(668): Homolog of NCBI NO: 30679742 NR Description: glycosyl hydrolase family 35 (beta-galactosidase)
  misc_feature (622)..(849): Homolog of NCBI NO: 30679742 NR Description: glycosyl hydrolase family 35 (beta-galactosidase)
  misc_feature (16)..(846): Homolog of NCBI NO: 1352077 NR Description: Beta-galactosidase precursor (Lactase) (Acid
  misc_feature (17)..(846): Homolog of NCBI NO: 15231354 NR Description: glycosyl hydrolase family 35 (beta-galactosidase)
  misc_feature (17)..(846): Homolog of NCBI NO: 20260596 NR Description: galactosidase, putative [Arabidopsis thaliana]
  misc_feature (13)..(846): Homolog of NCBI NO: 4138137 NR Description: ss-galactosidase [Lycopersicon esculentum]
  misc_feature (16)..(732): Homolog of NCBI NO: 30687121 NR Description: glycosyl hydrolase family 35 (beta-galactosidase)
  misc_feature (16)..(846): Homolog of NCBI NO: 1352077 NR Description: Beta-galactosidase precursor (Lactase) (Acid
  misc_feature (17)..(846): Homolog of NCBI NO: 15231354 NR Description: glycosyl hydrolase family 35 (beta-galactosidase)
  misc_feature (17)..(846): Homolog of NCBI NO: 20260596 NR Description: galactosidase, putative [Arabidopsis thaliana]
  misc_feature (13)..(846): Homolog of NCBI NO: 4138137 NR Description: ss-galactosidase [Lycopersicon esculentum]
  misc_feature (16)..(732): Homolog of NCBI NO: 30687121 NR Description: glycosyl hydrolase family 35 (beta-galactosidase)
  misc_feature (22)..(846): Homolog of NCBI NO: 30683905 NR Description: glycosyl hydrolase family 35 (beta-galactosidase)
  misc_feature (16)..(668): Homolog of NCBI NO: 25326168 NR Description: probable beta-galactosidase [imported] -
  misc_feature (33)..(668): Homolog of NCBI NO: 30679742 NR Description: glycosyl hydrolase family 35 (beta-galactosidase)
  misc_feature (16)..(732): Homolog of NCBI NO: 30687121 NR Description: glycosyl hydrolase family 35 (beta-galactosidase)
  misc_feature (13)..(846): Homolog of NCBI NO: 4138137 NR Description: ss-galactosidase [Lycopersicon esculentum]
  misc_feature (17)..(846): Homolog of NCBI NO: 20260596 NR Description: galactosidase, putative [Arabidopsis thaliana]
  misc_feature (17)..(846): Homolog of NCBI NO: 15231354 NR Description: glycosyl hydrolase family 35 (beta-galactosidase)
  misc_feature (16)..(846): Homolog of NCBI NO: 1352077 NR Description: Beta-galactosidase precursor (Lactase) (Acid

SEQ ID NO: 46385 - protein, 853 aa, Arabidopsis thaliana; identical to SEQ ID NO: 45042
  peptide (1)..(853): Ceres Seq. ID no. 12600159
  misc_feature (765)..(842): Pfam Name: Galactose binding lectin domain Pfam Description: Galactose binding lectin domain
  misc_feature (765)..(842): Pfam Name: Galactose binding lectin domain Pfam Description: Galactose binding lectin domain
  misc_feature (765)..(842): Pfam Name: Galactose binding lectin domain Pfam Description: Galactose binding lectin domain
  misc_feature (619)..(846): Homolog of NCBI NO: 30679742 NR Description: glycosyl hydrolase family 35 (beta-galactosidase)
  misc_feature (30)..(665): Homolog of NCBI NO: 30679742 NR Description: glycosyl hydrolase family 35 (beta-galactosidase)
  misc_feature (619)..(846): Homolog of NCBI NO: 25326168 NR Description: probable beta-galactosidase [imported] -
  misc_feature (13)..(665): Homolog of NCBI NO: 25326168 NR Description: probable beta-galactosidase [imported] -
  misc_feature (19)..(843): Homolog of NCBI NO: 30683905 NR Description: glycosyl hydrolase family 35 (beta-galactosidase)
  misc_feature (619)..(846): Homolog of NCBI NO: 30679742 NR Description: glycosyl hydrolase family 35 (beta-galactosidase)
  misc_feature (619)..(846): Homolog of NCBI NO: 25326168 NR Description: probable beta-galactosidase [imported] -
  misc_feature (19)..(843): Homolog of NCBI NO: 30683905 NR Description: glycosyl hydrolase family 35 (beta-galactosidase)
  misc_feature (13)..(665): Homolog of NCBI NO: 25326168 NR Description: probable beta-galactosidase [imported] -
  misc_feature (619)..(846): Homolog of NCBI NO: 25326168 NR Description: probable beta-galactosidase [imported] -
  misc_feature (30)..(665): Homolog of NCBI NO: 30679742 NR Description: glycosyl hydrolase family 35 (beta-galactosidase)
  misc_feature (619)..(846): Homolog of NCBI NO: 30679742 NR Description: glycosyl hydrolase family 35 (beta-galactosidase)
  misc_feature (13)..(843): Homolog of NCBI NO: 1352077 NR Description: Beta-galactosidase precursor (Lactase) (Acid
  misc_feature (14)..(843): Homolog of NCBI NO: 15231354 NR Description: glycosyl hydrolase family 35 (beta-galactosidase)
  misc_feature (14)..(843): Homolog of NCBI NO: 20260596 NR Description: galactosidase, putative [Arabidopsis thaliana]
  misc_feature (10)..(843): Homolog of NCBI NO: 4138137 NR Description: ss-galactosidase [Lycopersicon esculentum]
  misc_feature (13)..(729): Homolog of NCBI NO: 30687121 NR Description: glycosyl hydrolase family 35 (beta-galactosidase)
  misc_feature (13)..(843): Homolog of NCBI NO: 1352077 NR Description: Beta-galactosidase precursor (Lactase) (Acid
  misc_feature (14)..(843): Homolog of NCBI NO: 15231354 NR Description: glycosyl hydrolase family 35 (beta-galactosidase)
  misc_feature (14)..(843): Homolog of NCBI NO: 20260596 NR Description: galactosidase, putative [Arabidopsis thaliana]
  misc_feature (10)..(843): Homolog of NCBI NO: 4138137 NR Description: ss-galactosidase [Lycopersicon esculentum]
  misc_feature (13)..(729): Homolog of NCBI NO: 30687121 NR Description: glycosyl hydrolase family 35 (beta-galactosidase)
  misc_feature (19)..(843): Homolog of NCBI NO: 30683905 NR Description: glycosyl hydrolase family 35 (beta-galactosidase)
  misc_feature (13)..(665): Homolog of NCBI NO: 25326168 NR Description: probable beta-galactosidase [imported] -
  misc_feature (30)..(665): Homolog of NCBI NO: 30679742 NR Description: glycosyl hydrolase family 35 (beta-galactosidase)
  misc_feature (13)..(729): Homolog of NCBI NO: 30687121 NR Description: glycosyl hydrolase family 35 (beta-galactosidase)
  misc_feature (10)..(843): Homolog of NCBI NO: 4138137 NR Description: ss-galactosidase [Lycopersicon esculentum]
  misc_feature (14)..(843): Homolog of NCBI NO: 20260596 NR Description: galactosidase, putative [Arabidopsis thaliana]
  misc_feature (14)..(843): Homolog of NCBI NO: 15231354 NR Description: glycosyl hydrolase family 35 (beta-galactosidase)
  misc_feature (13)..(843): Homolog of NCBI NO: 1352077 NR Description: Beta-galactosidase precursor (Lactase) (Acid

SEQ ID NO: 46386 - protein, 794 aa, Arabidopsis thaliana; identical to SEQ ID NO: 45043
  peptide (1)..(794): Ceres Seq. ID no. 12600160
  misc_feature (706)..(783): Pfam Name: Galactose binding lectin domain Pfam Description: Galactose binding lectin domain
  misc_feature (706)..(783): Pfam Name: Galactose binding lectin domain Pfam Description: Galactose binding lectin domain
  misc_feature (706)..(783): Pfam Name: Galactose binding lectin domain Pfam Description: Galactose binding lectin domain
  misc_feature (560)..(787): Homolog of NCBI NO: 30679742 NR Description: glycosyl hydrolase family 35 (beta-galactosidase)
  misc_feature (1)..(606): Homolog of NCBI NO: 30679742 NR Description: glycosyl hydrolase family 35 (beta-galactosidase)
  misc_feature (560)..(787): Homolog of NCBI NO: 25326168 NR Description: probable beta-galactosidase [imported] -
  misc_feature (1)..(606): Homolog of NCBI NO: 25326168 NR Description: probable beta-galactosidase [imported] -
  misc_feature (1)..(784): Homolog of NCBI NO: 30683905 NR Description: glycosyl hydrolase family 35 (beta-galactosidase)
  misc_feature (560)..(787): Homolog of NCBI NO: 30679742 NR Description: glycosyl hydrolase family 35 (beta-galactosidase)
  misc_feature (560)..(787): Homolog of NCBI NO: 25326168 NR Description: probable beta-galactosidase [imported] -
  misc_feature (1)..(784): Homolog of NCBI NO: 30683905 NR Description: glycosyl hydrolase family 35 (beta-galactosidase)
  misc_feature (1)..(606): Homolog of NCBI NO: 25326168 NR Description: probable beta-galactosidase [imported] -
  misc_feature (560)..(787): Homolog of NCBI NO: 25326168 NR Description: probable beta-galactosidase [imported] -
  misc_feature (1)..(606): Homolog of NCBI NO: 30679742 NR Description: glycosyl hydrolase family 35 (beta-galactosidase)
  misc_feature (560)..(787): Homolog of NCBI NO: 30679742 NR Description: glycosyl hydrolase family 35 (beta-galactosidase)
  misc_feature (1)..(784): Homolog of NCBI NO: 1352077 NR Description: Beta-galactosidase precursor (Lactase) (Acid
  misc_feature (1)..(784): Homolog of NCBI NO: 15231354 NR Description: glycosyl hydrolase family 35 (beta-galactosidase)
  misc_feature (1)..(784): Homolog of NCBI NO: 20260596 NR Description: galactosidase, putative [Arabidopsis thaliana]
  misc_feature (1)..(784): Homolog of NCBI NO: 4138137 NR Description: ss-galactosidase [Lycopersicon esculentum]
  misc_feature (1)..(670): Homolog of NCBI NO: 30687121 NR Description: glycosyl hydrolase family 35 (beta-galactosidase)
  misc_feature (1)..(784): Homolog of NCBI NO: 1352077 NR Description: Beta-galactosidase precursor (Lactase) (Acid
  misc_feature (1)..(784): Homolog of NCBI NO: 15231354 NR Description: glycosyl hydrolase family 35 (beta-galactosidase)
  misc_feature (1)..(784): Homolog of NCBI NO: 20260596 NR Description: galactosidase, putative [Arabidopsis thaliana]
  misc_feature (1)..(784): Homolog of NCBI NO: 4138137 NR Description: ss-galactosidase [Lycopersicon esculentum]
  misc_feature (1)..(670): Homolog of NCBI NO: 30687121 NR Description: glycosyl hydrolase family 35 (beta-galactosidase)
  misc_feature (1)..(784): Homolog of NCBI NO: 30683905 NR Description: glycosyl hydrolase family 35 (beta-galactosidase)
  misc_feature (1)..(606): Homolog of NCBI NO: 25326168 NR Description: probable beta-galactosidase [imported] -
  misc_feature (1)..(606): Homolog of NCBI NO: 30679742 NR Description: glycosyl hydrolase family 35 (beta-galactosidase)
  misc_feature (1)..(670): Homolog of NCBI NO: 30687121 NR Description: glycosyl hydrolase family 35 (beta-galactosidase)
  misc_feature (1)..(784): Homolog of NCBI NO: 4138137 NR Description: ss-galactosidase [Lycopersicon esculentum]
  misc_feature (1)..(784): Homolog of NCBI NO: 20260596 NR Description: galactosidase, putative [Arabidopsis thaliana]
  misc_feature (1)..(784): Homolog of NCBI NO: 15231354 NR Description: glycosyl hydrolase family 35 (beta-galactosidase)
  misc_feature (1)..(784): Homolog of NCBI NO: 1352077 NR Description: Beta-galactosidase precursor (Lactase) (Acid

SEQ ID NO: 46387 - DNA, 2998 bp, Arabidopsis thaliana
  misc_feature (1)..(2998): Ceres Seq. ID no. 14309893
  misc_feature: MA Experiment ID: 108434 Result: Down-regulated in Transcription
  misc_feature: MA Experiment 108434 PARAMETER Experiment Name: At_Root_Tips_cDNA_P Parameter: Tissue Value: Root Tips
  misc_feature: MA Experiment ID: 108464 Result: Up-regulated in Transcription
  misc_feature: MA Experiment 108464 PARAMETER Experiment Name: At_Germinating_Seeds_cDNA_P Parameter: Age (day) Value: 4 vs. 0
  misc_feature: MA Experiment 108464 PARAMETER Experiment Name: At_Germinating_Seeds_cDNA_P Parameter: Tissue Value: Germinating Seeds
  misc_feature: MA Experiment ID: 108469 Result: Up-regulated in Transcription
  misc_feature: MA Experiment ID: 108488 Result: Down-regulated in Transcription
  misc_feature: MA Experiment ID: 108489 Result: Up-regulated in Transcription
  misc_feature: MA Experiment ID: 108573 Result: Up-regulated in Transcription
  misc_feature: MA Experiment 108573 PARAMETER Experiment Name: At_Drought_cDNA_P Parameter: Timepoint (hr) Value: 6
  misc_feature: MA Experiment 108573 PARAMETER Experiment Name: At_Drought_cDNA_P Parameter: Tissue Value: Aerial
  misc_feature: MA Experiment 108573 PARAMETER Experiment Name: At_Drought_cDNA_P Parameter: Treatment Value: Drought vs. No Drought
  misc_feature: MA Experiment ID: 108574 Result: Up-regulated in Transcription
  misc_feature: MA Experiment 108574 PARAMETER Experiment Name: At_Wounding__cDNA_P Parameter: Timepoint (hr) Value: 1
  misc_feature: MA Experiment 108574 PARAMETER Experiment Name: At_Wounding__cDNA_P Parameter: Tissue Value: Aerial
  misc_feature: MA Experiment 108574 PARAMETER Experiment Name: At_Wounding__cDNA_P Parameter: Treatment Value: Wounding vs. No Wounding
  misc_feature: MA Experiment ID: 108595 Result: Up-regulated in Transcription
  misc_feature: MA Experiment 108595 PARAMETER Experiment Name: At_Ler-pi_Ovule_cDNA_P Parameter: Plant Line Value: null
  misc_feature: MA Experiment ID: 108667 Result: Up-regulated in Transcription
  misc_feature: MA Experiment 108667 PARAMETER Experiment Name: At_2mM_SA_cDNA_P Parameter: Plant Line Value: WS
  misc_feature: MA Experiment 108667 PARAMETER Experiment Name: At_2mM_SA_cDNA_P Parameter: Timepoint (hr) Value: 1
  misc_feature: MA Experiment 108667 PARAMETER Experiment Name: At_2mM_SA_cDNA_P Parameter: Treatment Value: 2mM SA vs. No Treatment
  misc_feature: MA Experiment ID: 20000314 Result: Down-regulated in Transcription
  misc_feature: MA Experiment 20000314 PARAMETER Experiment Name: At_14day_Shoots-Roots_Sub_P Parameter: Age (day) Value: 14
  misc_feature: MA Experiment 20000314 PARAMETER Experiment Name: At_14day_Shoots-Roots_Sub_P Parameter: Organism Value: A. thaliana
  misc_feature: MA Experiment 20000314 PARAMETER Experiment Name: At_14day_Shoots-Roots_Sub_P Parameter: Plant Line Value: WS
  misc_feature: MA Experiment 20000314 PARAMETER Experiment Name: At_14day_Shoots-Roots_Sub_P Parameter: Tissue Value: Roots vs. Whole Plant
  misc_feature: MA Experiment ID: 20000329 Result: Up-regulated in Transcription
  misc_feature: MA Experiment 20000329 PARAMETER Experiment Name: At_4deg_Cold_Sub_P Parameter: Age (day) Value: 14
  misc_feature: MA Experiment 20000329 PARAMETER Experiment Name: At_4deg_Cold_Sub_P Parameter: Organism Value: A. thaliana
  misc_feature: MA Experiment 20000329 PARAMETER Experiment Name: At_4deg_Cold_Sub_P Parameter: Plant Line Value: WS
  misc_feature: MA Experiment 20000329 PARAMETER Experiment Name: At_4deg_Cold_Sub_P Parameter: Temperature (deg C) Value: 4 vs. 22
  misc_feature: MA Experiment 20000329 PARAMETER Experiment Name: At_4deg_Cold_Sub_P Parameter: Timepoint (hr) Value: 6
  misc_feature: MA Experiment 20000329 PARAMETER Experiment Name: At_4deg_Cold_Sub_P Parameter: Tissue Value: Aerial
gagtcagaacgcaaccaaataaagaaagctctcaaactcagtcttgaagcatcaactttatatctaccatctcatcaactaactaattctttttaaaatggctttagctaatgagataatgggttctcgtctaatcttcgagagatcatcatcacttgcgtctccgtttcaatcgcgtttctccatcaagaagaggacacagagaacacagttctccatcaacccttttgatccgagacctatgagagccgttaactcaagcggcgttgtagcggccatcagcgaggatttggttaaaacgctgcgtattagcactgtcggtagaaaacaagagaagcaggaagaagaggagaagtcggtgaagtttaaggtgagagcagttgcgacggtgaggaacaaaaacaaagaggattttaaagaaactttggttaagcatttggatgcttttactgataaaatcggtagaaacgttgtcttggagcttattagtacccaagttgatccaaaaacgaatgagccaaagaagagtaaagcggcagttttgaaagattggtcaaagaaatcaaattcaaaggcggaaagagtccattacacggccgagttcacggtggattcagcctttggttccccaggagccatcaccgtgaccaacaaacaccaaaaagagttctttcttgagagcatcaccatcgagggtttcgcatgtggccctgttcacttcccctgcaactcttgggtccaatctcaaaaagaccatccatccaaacgaattctcttcactaatcagccttacttgccgagcgagacaccgtccggtctaagaacattaagggagaaagaattggagaatctaagaggaaatggtaaaggagaaagaaaattatcagacagaatctacgattatgatgtgtacaacgacataggaaatccggacatatcacgtgaactagcccgtcccacacttggtggccgtgaatttccttaccctagacgctgtcgaaccggccggtcttcaaccgacaccgatatgatgtctgagaggcgggtggagaaaccattaccgatgtatgtaccaagagatgagcagttcgaggagtctaagcagaacacttttgctgcatgtagacttaaggcggttttacataaccttataccttcactaaaagctagcattttggctgaggacttagctaactttggtgagatcgatagtctttacaaagaaggcttgcttctcaagttagggtttcaagatgatatgttcaagaaattccctttaccgaagatcgtcactaccctccaaaaatcaagcgagggcttgcttagatacgacactcctaaaatagtttcaaaggataaatacgcatggcttcgcgatgacgagttcgcacgccaagctatagctgggatcaacccggtcaacatagaacgagtcacgtcttatccaccggtcagcaatcttgaccctgaaatctacggaccaggtcttcactccgctctcacggaagaccacatcatcggtcaacttgatggcttaaccgtacaacaagcgttagagatgaaccgtttgtttatggtggactaccatgacatatacttaccgtttctagatagaatcaacgcgcttgatggacgcaaggcttacgcgactcgaaccatattgttcttgacccgactcggtacactcaagcctatcgccatcgagctaagcctcccttctcaatcaagctcaaaccaaaagtccaagcgcgtggtcacacctccagtagacgcaacctccaactggatgtggcagctagccaaggcccacgttgggtccaatgacgctggtgtccaccagcttgtgaatcattggttacgtactcatgcgtgtttggaaccgtttatattagctgctcatagacaattaagcgcaatgcatccgatattcaaattattagaccctcacatgaggtacactttggagatcaatgccgtggcacgacagactttgattagtgcggacggtgtgatcgagtcgtgcttcactgctggtcaatacggtctagagattagttccgctgcgtataagaacaaatggcggtttgatatggaaggtctccctgctgatctcatccgaagggggatggctgttccagacccaacacaaccacatgggcttaaattacttgttgaagactacccatacgccaacgacggtctcttattatggtccgcaatccaaacttgggtccgaacctacgtggaacgttattacgcaaactcgaacctaatccaaaccgatactgagctccaagcctggtactctgagtcaatcaacgtaggtcacgctgatcaccgcgacgccgagtggtggccgaagctttccaccgtcgaagatctcgtctccgtcatcaccaccatcatctggctcgcctccgcacaacacgcggcactcaacttcggacaatatccttacggtggctacgtcccgaaccgaccaccgctaatgcgtcggttgattcccgacgagtcagatcccgagttcacgagttttatcgaagatcctcaaaagtattttttctcgtcgatgccgagtttattgcaaacgacgaagtttatggcggtggttgatacattgtcgacacattcgccggatgaggagtatatcggagagagacaacaaccgtcgatatggactggagatgctgagatcgtagatgcgttttatggattctcggcggaaatcggacggatagagaaggagattgacaagaggaatcgtgatcctagctgtaggaatcgctgtggcgcgggagtgttaccgtatgagttgatggctccgagttctgaaccgggtgttacgtgtagaggagtgcctaatagtgtatctatttagaattattcaatttttcaaagtatagagaattttataagtatataattagattttgacgcagtatggtttatttgccgatattgtaaaattcttacaaggattttattatgttgatttttt

SEQ ID NO: 46388 - protein, 926 aa, Arabidopsis thaliana
  peptide (1)..(926): Ceres Seq. ID no. 14309894
  misc_feature (125)..(226): Pfam Name: PLAT/LH2 domain Pfam Description: PLAT/LH2 domain
  misc_feature (121)..(926): Homolog of NCBI NO: 9909849 NR Description: lipoxygenase [Pisum sativum]
  misc_feature (84)..(926): Homolog of NCBI NO: 27372775 NR Description: lipoxygenase 2 [Brassica napus]
  misc_feature (72)..(926): Homolog of NCBI NO: 626032 NR Description: lipoxygenase (EC 1.13.11.12) L-2 - rice
  misc_feature (72)..(926): Homolog of NCBI NO: 585422 NR Description: Lipoxygenase, chloroplast precursor
  misc_feature (110)..(926): Homolog of NCBI NO: 34922538 NR Description: Lipoxygenase 2.3, chloroplast precursor
  misc_feature (72)..(926): Homolog of NCBI NO: 28411860 NR Description: putative lipoxygenase [Oryza sativa (japonica
  misc_feature (114)..(926): Homolog of NCBI NO: 18461098 NR Description: lipoxygenase [Citrus jambhiri]
  misc_feature (85)..(926): Homolog of NCBI NO: 7433168 NR Description: lipoxygenase (EC 1.13.11.12) loxC, chloroplast -
  misc_feature (92)..(926): Homolog of NCBI NO: 7433169 NR Description: probable lipoxygenase (EC 1.13.11.12) (clone H1)
  misc_feature (85)..(926): Homolog of NCBI NO: 7433160 NR Description: probable lipoxygenase (EC 1.13.11.12) CPRD46,
MALANEIMGSRLIFERSSSLASPFQSRFSIKKRTQRTQFSINPFDPRPMRAVNSSGVVAAISEDLVKTLRISTVGRKQEKQEEEEKSVKFKVRAVATVRNKNKEDFKETLVKHLDAFTDKIGRNVVLELISTQVDPKTNEPKKSKAAVLKDWSKKSNSKAERVHYTAEFTVDSAFGSPGAITVTNKHQKEFFLESITIEGFACGPVHFPCNSWVQSQKDHPSKRILFTNQPYLPSETPSGLRTLREKELENLRGNGKGERKLSDRIYDYDVYNDIGNPDISRELARPTLGGREFPYPRRCRTGRSSTDTDMMSERRVEKPLPMYVPRDEQFEESKQNTFAACRLKAVLHNLIPSLKASILAEDLANFGEIDSLYKEGLLLKLGFQDDMFKKFPLPKIVTTLQKSSEGLLRYDTPKIVSKDKYAWLRDDEFARQAIAGINPVNIERVTSYPPVSNLDPEIYGPGLHSALTEDHIIGQLDGLTVQQALEMNRLFMVDYHDIYLPFLDRINALDGRKAYATRTILFLTRLGTLKPIAIELSLPSQSSSNQKSKRVVTPPVDATSNWMWQLAKAHVGSNDAGVHQLVNHWLRTHACLEPFILAAHRQLSAMHPIFKLLDPHMRYTLEINAVARQTLISADGVIESCFTAGQYGLEISSAAYKNKWRFDMEGLPADLIRRGMAVPDPTQPHGLKLLVEDYPYANDGLLLWSAIQTWVRTYVERYYANSNLIQTDTELQAWYSESINVGHADHRDAEWWPKLSTVEDLVSVITTIIWLASAQHAALNFGQYPYGGYVPNRPPLMRRLIPDESDPEFTSFIEDPQKYFFSSMPSLLQTTKFMAVVDTLSTHSPDEEYIGERQQPSIWTGDAEIVDAFYGFSAEIGRIEKEIDKRNRDPSCRNRCGAGVLPYELMAPSSEPGVTCRGVPNSVSI

SEQ ID NO: 46389 - protein, 919 aa, Arabidopsis thaliana
  peptide (1)..(919): Ceres Seq. ID no. 14309895
  misc_feature (118)..(219): Pfam Name: PLAT/LH2 domain Pfam Description: PLAT/LH2 domain
  misc_feature (114)..(919): Homolog of NCBI NO: 9909849 NR Description: lipoxygenase [Pisum sativum]
  misc_feature (77)..(919): Homolog of NCBI NO: 27372775 NR Description: lipoxygenase 2 [Brassica napus]
  misc_feature (65)..(919): Homolog of NCBI NO: 626032 NR Description: lipoxygenase (EC 1.13.11.12) L-2 - rice
  misc_feature (65)..(919): Homolog of NCBI NO: 585422 NR Description: Lipoxygenase, chloroplast precursor
  misc_feature (103)..(919): Homolog of NCBI NO: 34922538 NR Description: Lipoxygenase 2.3, chloroplast precursor
  misc_feature (65)..(919): Homolog of NCBI NO: 28411860 NR Description: putative lipoxygenase [Oryza sativa (japonica
  misc_feature (107)..(919): Homolog of NCBI NO: 18461098 NR Description: lipoxygenase [Citrus jambhiri]
  misc_feature (78)..(919): Homolog of NCBI NO: 7433168 NR Description: lipoxygenase (EC 1.13.11.12) loxC, chloroplast -
  misc_feature (85)..(919): Homolog of NCBI NO: 7433169 NR Description: probable lipoxygenase (EC 1.13.11.12) (clone H1)
  misc_feature (78)..(919): Homolog of NCBI NO: 7433160 NR Description: probable lipoxygenase (EC 1.13.11.12) CPRD46,
MGSRLIFERSSSLASPFQSRFSIKKRTQRTQFSINPFDPRPMRAVNSSGVVAAISEDLVKTLRISTVGRKQEKQEEEEKSVKFKVRAVATVRNKNKEDFKETLVKHLDAFTDKIGRNVVLELISTQVDPKTNEPKKSKAAVLKDWSKKSNSKAERVHYTAEFTVDSAFGSPGAITVTNKHQKEFFLESITIEGFACGPVHFPCNSWVQSQKDHPSKRILFTNQPYLPSETPSGLRTLREKELENLRGNGKGERKLSDRIYDYDVYNDIGNPDISRELARPTLGGREFPYPRRCRTGRSSTDTDMMSERRVEKPLPMYVPRDEQFEESKQNTFAACRLKAVLHNLIPSLKASILAEDLANFGEIDSLYKEGLLLKLGFQDDMFKKFPLPKIVTTLQKSSEGLLRYDTPKIVSKDKYAWLRDDEFARQAIAGINPVNIERVTSYPPVSNLDPEIYGPGLHSALTEDHIIGQLDGLTVQQALEMNRLFMVDYHDIYLPFLDRINALDGRKAYATRTILFLTRLGTLKPIAIELSLPSQSSSNQKSKRVVTPPVDATSNWMWQLAKAHVGSNDAGVHQLVNHWLRTHACLEPFILAAHRQLSAMHPIFKLLDPHMRYTLEINAVARQTLISADGVIESCFTAGQYGLEISSAAYKNKWRFDMEGLPADLIRRGMAVPDPTQPHGLKLLVEDYPYANDGLLLWSAIQTWVRTYVERYYANSNLIQTDTELQAWYSESINVGHADHRDAEWWPKLSTVEDLVSVITTIIWLASAQHAALNFGQYPYGGYVPNRPPLMRRLIPDESDPEFTSFIEDPQKYFFSSMPSLLQTTKFMAVVDTLSTHSPDEEYIGERQQPSIWTGDAEIVDAFYGFSAEIGRIEKEIDKRNRDPSCRNRCGAGVLPYELMAPSSEPGVTCRGVPNSVSI

SEQ ID NO: 46390 - protein, 878 aa, Arabidopsis thaliana
  peptide (1)..(878): Ceres Seq. ID no. 14309896
  misc_feature (77)..(178): Pfam Name: PLAT/LH2 domain Pfam Description: PLAT/LH2 domain
  misc_feature (73)..(878): Homolog of NCBI NO: 9909849 NR Description: lipoxygenase [Pisum sativum]
  misc_feature (36)..(878): Homolog of NCBI NO: 27372775 NR Description: lipoxygenase 2 [Brassica napus]
  misc_feature (24)..(878): Homolog of NCBI NO: 626032 NR Description: lipoxygenase (EC 1.13.11.12) L-2 - rice
  misc_feature (24)..(878): Homolog of NCBI NO: 585422 NR Description: Lipoxygenase, chloroplast precursor
  misc_feature (62)..(878): Homolog of NCBI NO: 34922538 NR Description: Lipoxygenase 2.3, chloroplast precursor
  misc_feature (24)..(878): Homolog of NCBI NO: 28411860 NR Description: putative lipoxygenase [Oryza sativa (japonica
  misc_feature (66)..(878): Homolog of NCBI NO: 18461098 NR Description: lipoxygenase [Citrus jambhiri]
  misc_feature (37)..(878): Homolog of NCBI NO: 7433168 NR Description: lipoxygenase (EC 1.13.11.12) loxC, chloroplast -
  misc_feature (44)..(878): Homolog of NCBI NO: 7433169 NR Description: probable lipoxygenase (EC 1.13.11.12) (clone H1)
  misc_feature (37)..(878): Homolog of NCBI NO: 7433160 NR Description: probable lipoxygenase (EC 1.13.11.12) CPRD46,
MRAVNSSGVVAAISEDLVKTLRISTVGRKQEKQEEEEKSVKFKVRAVATVRNKNKEDFKETLVKHLDAFTDKIGRNVVLELISTQVDPKTNEPKKSKAAVLKDWSKKSNSKAERVHYTAEFTVDSAFGSPGAITVTNKHQKEFFLESITIEGFACGPVHFPCNSWVQSQKDHPSKRILFTNQPYLPSETPSGLRTLREKELENLRGNGKGERKLSDRIYDYDVYNDIGNPDISRELARPTLGGREFPYPRRCRTGRSSTDTDMMSERRVEKPLPMYVPRDEQFEESKQNTFAACRLKAVLHNLIPSLKASILAEDLANFGEIDSLYKEGLLLKLGFQDDMFKKFPLPKIVTTLQKSSEGLLRYDTPKIVSKDKYAWLRDDEFARQAIAGINPVNIERVTSYPPVSNLDPEIYGPGLHSALTEDHIIGQLDGLTVQQALEMNRLFMVDYHDIYLPFLDRINALDGRKAYATRTILFLTRLGTLKPIAIELSLPSQSSSNQKSKRVVTPPVDATSNWMWQLAKAHVGSNDAGVHQLVNHWLRTHACLEPFILAAHRQLSAMHPIFKLLDPHMRYTLEINAVARQTLISADGVIESCFTAGQYGLEISSAAYKNKWRFDMEGLPADLIRRGMAVPDPTQPHGLKLLVEDYPYANDGLLLWSAIQTWVRTYVERYYANSNLIQTDTELQAWYSESINVGHADHRDAEWWPKLSTVEDLVSVITTIIWLASAQHAALNFGQYPYGGYVPNRPPLMRRLIPDESDPEFTSFIEDPQKYFFSSMPSLLQTTKFMAVVDTLSTHSPDEEYIGERQQPSIWTGDAEIVDAFYGFSAEIGRIEKEIDKRNRDPSCRNRCGAGVLPYELMAPSSEPGVTCRGVPNSVSI

SEQ ID NO: 46391 - DNA, 1157 bp, Arabidopsis thaliana
  misc_feature (1)..(1157): Ceres Seq. ID no. 14309885
  misc_feature: MA Experiment ID: 20000307 Result: Up-regulated in Transcription
  misc_feature: MA Experiment 20000307 PARAMETER Experiment Name: At_Germinating_Seeds_Sub_P Parameter: Age (hr) Value: 24 vs. 0
  misc_feature: MA Experiment 20000307 PARAMETER Experiment Name: At_Germinating_Seeds_Sub_P Parameter: Organism Value: A. thaliana
  misc_feature: MA Experiment 20000307 PARAMETER Experiment Name: At_Germinating_Seeds_Sub_P Parameter: Plant Line Value: WS
  misc_feature: MA Experiment 20000307 PARAMETER Experiment Name: At_Germinating_Seeds_Sub_P Parameter: Tissue Value: Germinating Seeds
  misc_feature: MA Experiment ID: 20000314 Result: Down-regulated in Transcription
  misc_feature: MA Experiment 20000314 PARAMETER Experiment Name: At_14day_Shoots-Roots_Sub_P Parameter: Age (day) Value: 14
  misc_feature: MA Experiment 20000314 PARAMETER Experiment Name: At_14day_Shoots-Roots_Sub_P Parameter: Organism Value: A. thaliana
  misc_feature: MA Experiment 20000314 PARAMETER Experiment Name: At_14day_Shoots-Roots_Sub_P Parameter: Plant Line Value: WS
  misc_feature: MA Experiment 20000314 PARAMETER Experiment Name: At_14day_Shoots-Roots_Sub_P Parameter: Tissue Value: Roots vs. Whole Plant
  misc_feature: MA Experiment ID: 20000315 Result: Down-regulated in Transcription
  misc_feature: MA Experiment 20000315 PARAMETER Experiment Name: At_14day_Shoots-Roots_Sub_P Parameter: Age (day) Value: 14
  misc_feature: MA Experiment 20000315 PARAMETER Experiment Name: At_14day_Shoots-Roots_Sub_P Parameter: Organism Value: A. thaliana
  misc_feature: MA Experiment 20000315 PARAMETER Experiment Name: At_14day_Shoots-Roots_Sub_P Parameter: Plant Line Value: WS
  misc_feature: MA Experiment 20000315 PARAMETER Experiment Name: At_14day_Shoots-Roots_Sub_P Parameter: Tissue Value: Shoots vs. Whole Plant
  misc_feature: MA Experiment ID: 20000328 Result: Down-regulated in Transcription
  misc_feature: MA Experiment 20000328 PARAMETER Experiment Name: At_42deg_Heat_Sub_P Parameter: Age (day) Value: 14
  misc_feature: MA Experiment 20000328 PARAMETER Experiment Name: At_42deg_Heat_Sub_P Parameter: Organism Value: A. thaliana
  misc_feature: MA Experiment 20000328 PARAMETER Experiment Name: At_42deg_Heat_Sub_P Parameter: Plant Line Value: WS
  misc_feature: MA Experiment 20000328 PARAMETER Experiment Name: At_42deg_Heat_Sub_P Parameter: Temperature (deg C) Value: 42 vs. 22
  misc_feature: MA Experiment 20000328 PARAMETER Experiment Name: At_42deg_Heat_Sub_P Parameter: Timepoint (hr) Value: 6
  misc_feature: MA Experiment 20000328 PARAMETER Experiment Name: At_42deg_Heat_Sub_P Parameter: Tissue Value: Aerial
  misc_feature: MA Experiment ID: 20000329 Result: Up-regulated in Transcription
  misc_feature: MA Experiment 20000329 PARAMETER Experiment Name: At_4deg_Cold_Sub_P Parameter: Age (day) Value: 14
  misc_feature: MA Experiment 20000329 PARAMETER Experiment Name: At_4deg_Cold_Sub_P Parameter: Organism Value: A. thaliana
  misc_feature: MA Experiment 20000329 PARAMETER Experiment Name: At_4deg_Cold_Sub_P Parameter: Plant Line Value: WS
  misc_feature: MA Experiment 20000329 PARAMETER Experiment Name: At_4deg_Cold_Sub_P Parameter: Temperature (deg C) Value: 4 vs. 22
  misc_feature: MA Experiment 20000329 PARAMETER Experiment Name: At_4deg_Cold_Sub_P Parameter: Timepoint (hr) Value: 6
  misc_feature: MA Experiment 20000329 PARAMETER Experiment Name: At_4deg_Cold_Sub_P Parameter: Tissue Value: Aerial
  misc_feature: MA Experiment ID: 20000348 Result: Down-regulated in Transcription
  misc_feature: MA Experiment 20000348 PARAMETER Experiment Name: At_100uM_ABA_Sub_P Parameter: Age (day) Value: 14
  misc_feature: MA Experiment 20000348 PARAMETER Experiment Name: At_100uM_ABA_Sub_P Parameter: Organism Value: A. thaliana
  misc_feature: MA Experiment 20000348 PARAMETER Experiment Name: At_100uM_ABA_Sub_P Parameter: Plant Line Value: WS
  misc_feature: MA Experiment 20000348 PARAMETER Experiment Name: At_100uM_ABA_Sub_P Parameter: Timepoint (hr) Value: 1
  misc_feature: MA Experiment 20000348 PARAMETER Experiment Name: At_100uM_ABA_Sub_P Parameter: Tissue Value: Aerial
  misc_feature: MA Experiment 20000348 PARAMETER Experiment Name: At_100uM_ABA_Sub_P Parameter: Treatment Value: 100uM ABA vs. No Treatment
  misc_feature: MA Experiment ID: 20000349 Result: Down-regulated in Transcription
  misc_feature: MA Experiment 20000349 PARAMETER Experiment Name: At_100uM_ABA_Sub_P Parameter: Age (day) Value: 14
  misc_feature: MA Experiment 20000349 PARAMETER Experiment Name: At_100uM_ABA_Sub_P Parameter: Organism Value: A. thaliana
  misc_feature: MA Experiment 20000349 PARAMETER Experiment Name: At_100uM_ABA_Sub_P Parameter: Plant Line Value: WS
  misc_feature: MA Experiment 20000349 PARAMETER Experiment Name: At_100uM_ABA_Sub_P Parameter: Timepoint (hr) Value: 6
  misc_feature: MA Experiment 20000349 PARAMETER Experiment Name: At_100uM_ABA_Sub_P Parameter: Tissue Value: Aerial
  misc_feature: MA Experiment 20000349 PARAMETER Experiment Name: At_100uM_ABA_Sub_P Parameter: Treatment Value: 100uM ABA vs. No Treatment
  misc_feature: MA Experiment ID: 20000352 Result: Down-regulated in Transcription
  misc_feature: MA Experiment 20000352 PARAMETER Experiment Name: At_Drought_Sub_P Parameter: Age (day) Value: 7
  misc_feature: MA Experiment 20000352 PARAMETER Experiment Name: At_Drought_Sub_P Parameter: Organism Value: A. thaliana
  misc_feature: MA Experiment 20000352 PARAMETER Experiment Name: At_Drought_Sub_P Parameter: Plant Line Value: WS
  misc_feature: MA Experiment 20000352 PARAMETER Experiment Name: At_Drought_Sub_P Parameter: Timepoint (hr) Value: 6
  misc_feature: MA Experiment 20000352 PARAMETER Experiment Name: At_Drought_Sub_P Parameter: Tissue Value: Whole Plant
  misc_feature: MA Experiment 20000352 PARAMETER Experiment Name: At_Drought_Sub_P Parameter: Treatment Value: Drought vs. No Drought
  misc_feature: MA Experiment ID: 20000355 Result: Down-regulated in Transcription
  misc_feature: MA Experiment 20000355 PARAMETER Experiment Name: At_Siliques_Sub_P Parameter: Age (day) Value: 21
  misc_feature: MA Experiment 20000355 PARAMETER Experiment Name: At_Siliques_Sub_P Parameter: Organism Value: A. thaliana
  misc_feature: MA Experiment 20000355 PARAMETER Experiment Name: At_Siliques_Sub_P Parameter: Plant Line Value: WS
  misc_feature: MA Experiment 20000355 PARAMETER Experiment Name: At_Siliques_Sub_P Parameter: Tissue Value: Less Than 5mm Siliques vs. Whole Plant
  misc_feature: MA Experiment ID: 20000440 Result: Down-regulated in Transcription
  misc_feature: MA Experiment 20000440 PARAMETER Experiment Name: At_Closed-Flower__Sub_P Parameter: Tissue Value: Closed Flower vs. Whole Plant
gaacaaagcaaacggctcatttctcagaaacaactcaaacatgggttccttcgacttgcctcacagttcatcgttcaagggagaaagtgaaatatttcttcggaatgtgttcgagaatatattgaaaacgtacctaaggaagaacccgacggcgaagacaatatgggaactggttcagtcgttggacaacgaaaagatctgctacgaccacttcactttcaggacactaaaggtcgatggttatggaatagactccttgtcgagttttttcatggcttatggatataaaattggtggtggacttgattttcccaagaagaaactacgagttctttggttttctccacctgatgttcacgttcctaatgatggtcacggtctaggcaacggccctttgccgcgacttgttatagctgaggttcttgtggacgaactaagccctgaatcacaggggataataaggaagtatttgaaacaagaaggtggcaagcaagcggttctttctagtactttggggtctttaatatgggagaagcctacatggaccgacttcaagcagcttgccaaagaaagcgaatttgcggcatggacgcttatccacggctacacaatgaatcatcttgcttttgcggttcatcgattcaaacatcgtttcagtgacatcaaattcgtcaaacagcatcttgaggaaaagggattcaaactcaacagtgacggagaaatcctcaaagtgagtcaagatggtctactatttcaagtttcatcgatctcggaaaggcttccggtaacatttgcagatggagtaactgaaacaatcccagcttcatacattgaattcactcagcgtcaagttcttccagagttcaaagatgtgccgcttgatgagatcaaagaatttcatagacgtgaagcttttgaactcgataacgccaaccacgtaatggaaagcacccgtttcacaactaaattctagaaccagacttgtcttgctcgacttagtatatgccaaatttgtgtaactatatatacttgtgtgtgtttgtgtgcaatcttttcatatatatgcatgtgtgtatttgcgatatctttatgttgttattttactgtgaagggacaatgtaagcatatgttatctctcatgatggtttttgttgatt

SEQ ID NO: 46392 - protein, 323 aa, Arabidopsis thaliana
  peptide (1)..(323): Ceres Seq. ID no. 14309886
  misc_feature (51)..(318): Homolog of NCBI NO: 37523419 NR Description: hypothetical protein glr3850 [Gloeobacter
  misc_feature (36)..(282): Homolog of NCBI NO: 24372211 NR Description: conserved hypothetical protein [Shewanella
  misc_feature (36)..(298): Homolog of NCBI NO: 27364716 NR Description: Conserved hypothetical protein [Vibrio vulnificus
  misc_feature (36)..(302): Homolog of NCBI NO: 15642610 NR Description: conserved hypothetical protein [Vibrio cholerae]
  misc_feature (36)..(298): Homolog of NCBI NO: 28899568 NR Description: conserved hypothetical protein
  misc_feature (103)..(320): Homolog of NCBI NO: 22973852 NR Description: hypothetical protein [Chloroflexus aurantiacus]
  misc_feature (26)..(317): Homolog of NCBI NO: 37535166 NR Description: unknown protein [Oryza sativa (japonica
  misc_feature (11)..(317): Homolog of NCBI NO: 18390717 NR Description: expressed protein [Arabidopsis thaliana]
  misc_feature (14)..(320): Homolog of NCBI NO: 15223410 NR Description: expressed protein [Arabidopsis thaliana]
  misc_feature (14)..(323): Homolog of NCBI NO: 18396149 NR Description: expressed protein [Arabidopsis thaliana]
NKANGSFLRNNSNMGSFDLPHSSSFKGESEIFLRNVFENILKTYLRKNPTAKTIWELVQSLDNEKICYDHFTFRTLKVDGYGIDSLSSFFMAYGYKIGGGLDFPKKKLRVLWFSPPDVHVPNDGHGLGNGPLPRLVIAEVLVDELSPESQGIIRKYLKQEGGKQAVLSSTLGSLIWEKPTWTDFKQLAKESEFAAWTLIHGYTMNHLAFAVHRFKHRFSDIKFVKQHLEEKGFKLNSDGEILKVSQDGLLFQVSSISERLPVTFADGVTETIPASYIEFTQRQVLPEFKDVPLDEIKEFHRREAFELDNANHVMESTRFTTKF

SEQ ID NO: 46393 - protein, 310 aa, Arabidopsis thaliana
  peptide (1)..(310): Ceres Seq. ID no. 14309887
  misc_feature (38)..(305): Homolog of NCBI NO: 37523419 NR Description: hypothetical protein glr3850 [Gloeobacter
  misc_feature (23)..(269): Homolog of NCBI NO: 24372211 NR Description: conserved hypothetical protein [Shewanella
  misc_feature (23)..(285): Homolog of NCBI NO: 27364716 NR Description: Conserved hypothetical protein [Vibrio vulnificus
  misc_feature (23)..(289): Homolog of NCBI NO: 15642610 NR Description: conserved hypothetical protein [Vibrio cholerae]
  misc_feature (23)..(285): Homolog of NCBI NO: 28899568 NR Description: conserved hypothetical protein
  misc_feature (90)..(307): Homolog of NCBI NO: 22973852 NR Description: hypothetical protein [Chloroflexus aurantiacus]
  misc_feature (13)..(304): Homolog of NCBI NO: 37535166 NR Description: unknown protein [Oryza sativa (japonica
  misc_feature (1)..(304): Homolog of NCBI NO: 18390717 NR Description: expressed protein [Arabidopsis thaliana]
  misc_feature (1)..(307): Homolog of NCBI NO: 15223410 NR Description: expressed protein [Arabidopsis thaliana]
  misc_feature (1)..(310): Homolog of NCBI NO: 18396149 NR Description: expressed protein [Arabidopsis thaliana]
MGSFDLPHSSSFKGESEIFLRNVFENILKTYLRKNPTAKTIWELVQSLDNEKICYDHFTFRTLKVDGYGIDSLSSFFMAYGYKIGGGLDFPKKKLRVLWFSPPDVHVPNDGHGLGNGPLPRLVIAEVLVDELSPESQGIIRKYLKQEGGKQAVLSSTLGSLIWEKPTWTDFKQLAKESEFAAWTLIHGYTMNHLAFAVHRFKHRFSDIKFVKQHLEEKGFKLNSDGEILKVSQDGLLFQVSSISERLPVTFADGVTETIPASYIEFTQRQVLPEFKDVPLDEIKEFHRREAFELDNANHVMESTRFTTKF

SEQ ID NO: 46394 - protein, 233 aa, Arabidopsis thaliana
  peptide (1)..(233): Ceres Seq. ID no. 14309888
  misc_feature (1)..(228): Homolog of NCBI NO: 37523419 NR Description: hypothetical protein glr3850 [Gloeobacter
  misc_feature (1)..(192): Homolog of NCBI NO: 24372211 NR Description: conserved hypothetical protein [Shewanella
  misc_feature (1)..(208): Homolog of NCBI NO: 27364716 NR Description: Conserved hypothetical protein [Vibrio vulnificus
  misc_feature (1)..(212): Homolog of NCBI NO: 15642610 NR Description: conserved hypothetical protein [Vibrio cholerae]
  misc_feature (1)..(208): Homolog of NCBI NO: 28899568 NR Description: conserved hypothetical protein
  misc_feature (13)..(230): Homolog of NCBI NO: 22973852 NR Description: hypothetical protein [Chloroflexus aurantiacus]
  misc_feature (1)..(227): Homolog of NCBI NO: 37535166 NR Description: unknown protein [Oryza sativa (japonica
  misc_feature (1)..(227): Homolog of NCBI NO: 18390717 NR Description: expressed protein [Arabidopsis thaliana]
  misc_feature (1)..(230): Homolog of NCBI NO: 15223410 NR Description: expressed protein [Arabidopsis thaliana]
  misc_feature (1)..(233): Homolog of NCBI NO: 18396149 NR Description: expressed protein [Arabidopsis thaliana]
MAYGYKIGGGLDFPKKKLRVLWFSPPDVHVPNDGHGLGNGPLPRLVIAEVLVDELSPESQGIIRKYLKQEGGKQAVLSSTLGSLIWEKPTWTDFKQLAKESEFAAWTLIHGYTMNHLAFAVHRFKHRFSDIKFVKQHLEEKGFKLNSDGEILKVSQDGLLFQVSSISERLPVTFADGVTETIPASYIEFTQRQVLPEFKDVPLDEIKEFHRREAFELDNANHVMESTRFTTKF

SEQ ID NO: 46395 - DNA, 3606 bp, Arabidopsis thaliana
  misc_feature (1)..(3606): Ceres Seq. ID no. 13509371
  misc_feature: MA Experiment ID: 20000184 Result: Up-regulated in Transcription
  misc_feature: MA Experiment 20000184 PARAMETER Experiment Name: At_Shoots__P Parameter: Age (day) Value: 7
  misc_feature: MA Experiment 20000184 PARAMETER Experiment Name: At_Shoots__P Parameter: Tissue Value: Shoots vs. Whole Plant
  misc_feature: MA Experiment ID: 20000185 Result: Up-regulated in Transcription
  misc_feature: MA Experiment 20000185 PARAMETER Experiment Name: At_Roots__P Parameter: Age (day) Value: 7 vs. 21
  misc_feature: MA Experiment 20000185 PARAMETER Experiment Name: At_Roots__P Parameter: Organism Value: A. thaliana
  misc_feature: MA Experiment 20000185 PARAMETER Experiment Name: At_Roots__P Parameter: Tissue Value: Roots vs. Whole Plant
  misc_feature: MA Experiment ID: 20000234 Result: Up-regulated in Transcription
  misc_feature: MA Experiment 20000234 PARAMETER Experiment Name: At_Siliques_P Parameter: Age (day) Value: 21
  misc_feature: MA Experiment 20000234 PARAMETER Experiment Name: At_Siliques_P Parameter: Organism Value: A. thaliana
  misc_feature: MA Experiment 20000234 PARAMETER Experiment Name: At_Siliques_P Parameter: Plant Line Value: WS
  misc_feature: MA Experiment 20000234 PARAMETER Experiment Name: At_Siliques_P Parameter: Tissue Value: Less Than 5mm Siliques vs. Whole Plant
  misc_feature: MA Experiment ID: 20000264 Result: Up-regulated in Transcription
  misc_feature: MA Experiment 20000264 PARAMETER Experiment Name: At_Open_Flower_P Parameter: Age (day) Value: 21
  misc_feature: MA Experiment 20000264 PARAMETER Experiment Name: At_Open_Flower_P Parameter: Plant Line Value: WS
  misc_feature: MA Experiment 20000264 PARAMETER Experiment Name: At_Open_Flower_P Parameter: Tissue Value: Open Flower vs. Whole Plant
  misc_feature: MA Experiment ID: 20000265 Result: Up-regulated in Transcription
  misc_feature: MA Experiment 20000265 PARAMETER Experiment Name: At_Open_Flower_P Parameter: Age (day) Value: 21
  misc_feature: MA Experiment 20000265 PARAMETER Experiment Name: At_Open_Flower_P Parameter: Plant Line Value: WS
  misc_feature: MA Experiment 20000265 PARAMETER Experiment Name: At_Open_Flower_P Parameter: Tissue Value: Closed Flower vs. Whole Plant
  misc_feature: MA Experiment ID: 20000286 Result: Up-regulated in Transcription
  misc_feature: MA Experiment 20000286 PARAMETER Experiment Name: At_Open_Flower_P Parameter: Age (day) Value: 21
  misc_feature: MA Experiment 20000286 PARAMETER Experiment Name: At_Open_Flower_P Parameter: Plant Line Value: WS
  misc_feature: MA Experiment 20000286 PARAMETER Experiment Name: At_Open_Flower_P Parameter: Tissue Value: Half Open vs. Whole Plant
  misc_feature: MA Experiment ID: 20000438 Result: Up-regulated in Transcription
  misc_feature: MA Experiment 20000438 PARAMETER Experiment Name: At_Shoots__P Parameter: Age (day) Value: 14
  misc_feature: MA Experiment 20000438 PARAMETER Experiment Name: At_Shoots__P Parameter: Tissue Value: Shoots vs. Whole Plant
  misc_feature: MA Experiment ID: 20000439 Result: Up-regulated in Transcription
  misc_feature: MA Experiment 20000439 PARAMETER Experiment Name: At_Roots__P Parameter: Age (day) Value: 14 vs. 21
  misc_feature: MA Experiment 20000439 PARAMETER Experiment Name: At_Roots__P Parameter: Organism Value: A. thaliana
  misc_feature: MA Experiment 20000439 PARAMETER Experiment Name: At_Roots__P Parameter: Tissue Value: Roots vs. Whole Plant
  misc_feature: MA Experiment ID: 20000794 Result: Up-regulated in Transcription
  misc_feature: MA Experiment 20000794 PARAMETER Experiment Name: At_Petals_P Parameter: Age (day) Value: 23-25 days
  misc_feature: MA Experiment 20000794 PARAMETER Experiment Name: At_Petals_P Parameter: Plant Line Value: WS
  misc_feature: MA Experiment 20000794 PARAMETER Experiment Name: At_Petals_P Parameter: Tissue Value: Petals vs. Whole plant
  misc_feature: MA Experiment ID: 20001451 Result: Down-regulated in Transcription
  misc_feature: MA Experiment 20001451 PARAMETER Experiment Name: At_Far-red-induction_P Parameter: Age (day) Value: 7
  misc_feature: MA Experiment 20001451 PARAMETER Experiment Name: At_Far-red-induction_P Parameter: Light Value: Far-red vs. White
  misc_feature: MA Experiment 20001451 PARAMETER Experiment Name: At_Far-red-induction_P Parameter: Organism Value: A. thaliana
  misc_feature: MA Experiment 20001451 PARAMETER Experiment Name: At_Far-red-induction_P Parameter: Plant Line Value: Columbia
  misc_feature: MA Experiment 20001451 PARAMETER Experiment Name: At_Far-red-induction_P Parameter: Timepoint (hr) Value: 24
  misc_feature: MA Experiment 20001451 PARAMETER Experiment Name: At_Far-red-induction_P Parameter: Tissue Value: Whole Plant
atggattacttgaatttgctgatagagtttatggtgttggctgatagcttgtatcagatcttcttgcatgaagttatcaatgatttacacgaagaattcccggaatcgtcgtttttagcgtttaatttccgagaaggggagaaaaaaagcgtgtttgctgaaactctctgtgaatatgatgttactgttcttgagtatccgaggcagtatgaaggctgtcctatgcttcctttatcattgattcaacattttctccgtgtttgtgagagttggcttgctcgtgggaaccgtcaggatgttattcttcttcactgtgaaagaggaggatggccacttttggcttttattctagctagttttctgattttcaggaaagttcatagtggtgagcgtagaactcttgagattgtgcatcgagaggctcccaagggtctcttgcagctgctttcaccgttaaatccgtttccttctcaacttcgttatcttcagtatgtagcgaggaggaacattaattctgagtggccacctcctgaaagagctctttctttggattgtgtgataattcgaggtatcccaaactttgactctcaacatggctgcagaccgattatacgtatttttggaagaaactatagtagtaaatctggtctttcaacggagatggtgtattctatgtctgataagaaaaaaccccttcgccattacagacaggcagaatgtgacgtaatcaaaattgatatccagtgctgggttcaaggagatgttgtactggagtgtgtgcatatggatttggatccagaacgagaggttatgatgtttcgtgtgatgtttaatactgcatttatcaggtccaacatactaatgttgaactctgacaacttggatattctttgggaggccaaggatcattacccaaaagggtttcgagcagaggtcttgtttggagaagttgagaatgcatcgcctcagaaagttccaaccccaatagtaaatggtgatgagactggtggattgcccattgaagccttttctagagttcaagaactttttagcggtgtggatttggctgagaatggagatgatgctgctttgtggttgctgaaacaacttgctgccattaatgatgcaaaagagtttacaagatttcggcacaaagggagtttttattttaattctcctgactctgaagaggagacaaacacatctagtgccgctgatagttcagatgaaggctttgaagccattcagagacctcgtattcatataccttttgataatgatgatacagacgacattactttgtctgtcgctcacgaatcgtcagaggagcctcatgaattctctcatcaccatcatcatgaaattccagcgaaagacagtgtcgacaaccctttgaatcttccatcagatccaccatcttctggtgatcatgtcacacttctgcctccaccgccaccgccacctcctccccctctttttacgagcacaacttcattctcaccctcacagccacccccaccgccacctcctccccctctttttatgagcacaacttcattctcaccctcacagccacccccaccgccacctcctccccctctttttacgagcacaacttcattctcaccctcacagccacccccaccaccacctctccctagtttcagcaatagagatcctttgacaacattgcatcaacctatcaataaaactcctccaccaccacctcctcctcccccgccactgccatctagaagcatccctccgccattagctcaaccaccaccaccacgtcctcctcctcctcctcctccgcctccttcttcaagaagcattccttcgccctcagcaccaccgccaccgccaccaccgcctccgtcgtttgggagcacaggaaataagcgtcaggcgcaaccacctccacctccacctcctcctcctcccacaagaattcctgctgctaaatgtgcaccaccaccacccccgcctccacctacatctcattctggttctattcgtgttggcccaccttcgacaccaccaccacctccacctcctcctcctaaagctaatatttcaaatgcccccaagccaccagcccctccgccacttcctccttcatctacaaggttgggtgctccccctcctcctccaccaccaccactatccaagacccctgctccgcctccaccacctctatccaagacccctgttcctcctcctccaccagggctgggtcgtggtacaagtagtggcccaccaccactgggagcaaaaggttcaaatgcaccaccaccacctcctcctgcaggaagggggagagcttccttgggacttggaagaggccgaggtgtgagtgttcctactgctgcacctaagaaaaccgcgttaaaacctttgcattggtctaaagttactcgggcagcaaaaggtagtttgtgggctgatactcagaaacaggaaaatcaaccacgggccccagaaatagatatatcagagctcgagagtcttttttctgcagtttcagataccacagctaagaagagcacaggtcgccggggttctagtatcagcaaacctgagaaagttcaattggttgacctgcgaagagcaaataactgtgaaataatgctcacgaaaataaagattcctttgccagatatgcttagtgcagtgctagccttggattcattagctctggacattgaccaggttgaaaatctcatcaaattttgtccgaccaaggaagagatggaactgttgaggaattatactggtgacaaggaaatgcttggaaagtgtgaacaggttccacgtatagaagcaaagttacgagtgtttggctttaagattacctttgcttctcaggtggaggagttaaaaagctgcctaaatacaataaacgctgctactaaagaggtgaaggagtctgcaaagttgcgtcaaattatgcaaacaattttaacgttgggaaatgctctaaatcagggaactgcgagagggtctgctgttgggttcaaactagacagtctccttaaattatctgatactcgtgctagaaataacaaaatgactttgatgcattacttatgcaagcttgttggtgaaaaaatgccagaattgctggattttgctaatgaccttgttcacttagaagctgcttcaaagattgaattgaaaacgttggctgaagaaatgcaagcggcgactaaaggccttgaaaaggttgagcaagaactcatggcttcagaaaatgatggtgcaatttctttgggcttcagaaaggtcttgaaggagtttcttgatatggctgatgaggaagtgaagacgcttgcttcgctatattcagaagtgggaagaaatgcagattctttatctcactacttcggtgaggatccagctcgatgtccttttgagcaagtgaccaagattctgactctttttatgaaaacattcatcaaatcccgagaggagaatgaaaaacaagccgaggctgagaagaagaaactggagaaagaagcaattaaagagaagtcagcgacaaagaaagatggcgtcgataacgacaacgatcttatccagcagatccatagacatagaacatga

SEQ ID NO: 46396 - protein, 1201 aa, Arabidopsis thaliana
  peptide (1)..(1201): Ceres Seq. ID no. 13509372
  misc_feature (468)..(774): Pfam Name: Formin Homology 2 Domain Pfam Description: Formin Homology 2 Domain
  misc_feature (738)..(1175): Homolog of NCBI NO: 30682092 NR Description: formin homology 2 (FH2) domain-containing protein
  misc_feature (405)..(772): Homolog of NCBI NO: 27817931 NR Description: P0453E05.6 [Oryza sativa (japonica
  misc_feature (520)..(1190): Homolog of NCBI NO: 30682634 NR Description: formin homology 2 (FH2) domain-containing protein
  misc_feature (18)..(364): Homolog of NCBI NO: 38346845 NR Description: OSJNBa0091C12.5 [Oryza sativa (japonica
  misc_feature (546)..(1056): Homolog of NCBI NO: 38346845 NR Description: OSJNBa0091C12.5 [Oryza sativa (japonica
  misc_feature (825)..(1201): Homolog of NCBI NO: 15242969 NR Description: formin homology 2 (FH2) domain-containing protein
  misc_feature (18)..(769): Homolog of NCBI NO: 15242969 NR Description: formin homology 2 (FH2) domain-containing protein
  misc_feature (369)..(980): Homolog of NCBI NO: 37530618 NR Description: unknown protein [Oryza sativa (japonica
  misc_feature (13)..(335): Homolog of NCBI NO: 27817931 NR Description: P0453E05.6 [Oryza sativa (japonica
  misc_feature (464)..(1179): Homolog of NCBI NO: 27817931 NR Description: P0453E05.6 [Oryza sativa (japonica
MDYLNLLIEFMVLADSLYQIFLHEVINDLHEEFPESSFLAFNFREGEKKSVFAETLCEYDVTVLEYPRQYEGCPMLPLSLIQHFLRVCESWLARGNRQDVILLHCERGGWPLLAFILASFLIFRKVHSGERRTLEIVHREAPKGLLQLLSPLNPFPSQLRYLQYVARRNINSEWPPPERALSLDCVIIRGIPNFDSQHGCRPIIRIFGRNYSSKSGLSTEMVYSMSDKKKPLRHYRQAECDVIKIDIQCWVQGDVVLECVHMDLDPEREVMMFRVMFNTAFIRSNILMLNSDNLDILWEAKDHYPKGFRAEVLFGEVENASPQKVPTPIVNGDETGGLPIEAFSRVQELFSGVDLAENGDDAALWLLKQLAAINDAKEFTRFRHKGSFYFNSPDSEEETNTSSAADSSDEGFEAIQRPRIHIPFDNDDTDDITLSVAHESSEEPHEFSHHHHHEIPAKDSVDNPLNLPSDPPSSGDHVTLLPPPPPPPPPPLFTSTTSFSPSQPPPPPPPPPLFMSTTSFSPSQPPPPPPPPPLFTSTTSFSPSQPPPPPPLPSFSNRDPLTTLHQPINKTPPPPPPPPPPLPSRSIPPPLAQPPPPRPPPPPPPPPSSRSIPSPSAPPPPPPPPPSFGSTGNKRQAQPPPPPPPPPPTRIPAAKCAPPPPPPPPTSHSGSIRVGPPSTPPPPPPPPPKANISNAPKPPAPPPLPPSSTRLGAPPPPPPPPLSKTPAPPPPPLSKTPVPPPPPGLGRGTSSGPPPLGAKGSNAPPPPPPAGRGRASLGLGRGRGVSVPTAAPKKTALKPLHWSKVTRAAKGSLWADTQKQENQPRAPEIDISELESLFSAVSDTTAKKSTGRRGSSISKPEKVQLVDLRRANNCEIMLTKIKIPLPDMLSAVLALDSLALDIDQVENLIKFCPTKEEMELLRNYTGDKEMLGKCEQVPRIEAKLRVFGFKITFASQVEELKSCLNTINAATKEVKESAKLRQIMQTILTLGNALNQGTARGSAVGFKLDSLLKLSDTRARNNKMTLMHYLCKLVGEKMPELLDFANDLVHLEAASKIELKTLAEEMQAATKGLEKVEQELMASENDGAISLGFRKVLKEFLDMADEEVKTLASLYSEVGRNADSLSHYFGEDPARCPFEQVTKILTLFMKTFIKSREENEKQAEAEKKKLEKEAIKEKSATKKDGVDNDNDLIQQIHRHRT

SEQ ID NO: 46397 - protein, 1191 aa, Arabidopsis thaliana
  peptide (1)..(1191): Ceres Seq. ID no. 13509373
  misc_feature (458)..(764): Pfam Name: Formin Homology 2 Domain Pfam Description: Formin Homology 2 Domain
  misc_feature (728)..(1165): Homolog of NCBI NO: 30682092 NR Description: formin homology 2 (FH2) domain-containing protein
  misc_feature (395)..(762): Homolog of NCBI NO: 27817931 NR Description: P0453E05.6 [Oryza sativa (japonica
  misc_feature (510)..(1180): Homolog of NCBI NO: 30682634 NR Description: formin homology 2 (FH2) domain-containing protein
  misc_feature (8)..(354): Homolog of NCBI NO: 38346845 NR Description: OSJNBa0091C12.5 [Oryza sativa (japonica
  misc_feature (536)..(1046): Homolog of NCBI NO: 38346845 NR Description: OSJNBa0091C12.5 [Oryza sativa (japonica
  misc_feature (815)..(1191): Homolog of NCBI NO: 15242969 NR Description: formin homology 2 (FH2) domain-containing protein
  misc_feature (8)..(759): Homolog of NCBI NO: 15242969 NR Description: formin homology 2 (FH2) domain-containing protein
  misc_feature (359)..(970): Homolog of NCBI NO: 37530618 NR Description: unknown protein [Oryza sativa (japonica
  misc_feature (3)..(325): Homolog of NCBI NO: 27817931 NR Description: P0453E05.6 [Oryza sativa (japonica
  misc_feature (454)..(1169): Homolog of NCBI NO: 27817931 NR Description: P0453E05.6 [Oryza sativa (japonica
MVLADSLYQIFLHEVINDLHEEFPESSFLAFNFREGEKKSVFAETLCEYDVTVLEYPRQYEGCPMLPLSLIQHFLRVCESWLARGNRQDVILLHCERGGWPLLAFILASFLIFRKVHSGERRTLEIVHREAPKGLLQLLSPLNPFPSQLRYLQYVARRNINSEWPPPERALSLDCVIIRGIPNFDSQHGCRPIIRIFGRNYSSKSGLSTEMVYSMSDKKKPLRHYRQAECDVIKIDIQCWVQGDVVLECVHMDLDPEREVMMFRVMFNTAFIRSNILMLNSDNLDILWEAKDHYPKGFRAEVLFGEVENASPQKVPTPIVNGDETGGLPIEAFSRVQELFSGVDLAENGDDAALWLLKQLAAINDAKEFTRFRHKGSFYFNSPDSEEETNTSSAADSSDEGFEAIQRPRIHIPFDNDDTDDITLSVAHESSEEPHEFSHHHHHEIPAKDSVDNPLNLPSDPPSSGDHVTLLPPPPPPPPPPLFTSTTSFSPSQPPPPPPPPPLFMSTTSFSPSQPPPPPPPPPLFTSTTSFSPSQPPPPPPLPSFSNRDPLTTLHQPINKTPPPPPPPPPPLPSRSIPPPLAQPPPPRPPPPPPPPPSSRSIPSPSAPPPPPPPPPSFGSTGNKRQAQPPPPPPPPPPTRIPAAKCAPPPPPPPPTSHSGSIRVGPPSTPPPPPPPPPKANISNAPKPPAPPPLPPSSTRLGAPPPPPPPPLSKTPAPPPPPLSKTPVPPPPPGLGRGTSSGPPPLGAKGSNAPPPPPPAGRGRASLGLGRGRGVSVPTAAPKKTALKPLHWSKVTRAAKGSLWADTQKQENQPRAPEIDISELESLFSAVSDTTAKKSTGRRGSSISKPEKVQLVDLRRANNCEIMLTKIKIPLPDMLSAVLALDSLALDIDQVENLIKFCPTKEEMELLRNYTGDKEMLGKCEQVPRIEAKLRVFGFKITFASQVEELKSCLNTINAATKEVKESAKLRQIMQTILTLGNALNQGTARGSAVGFKLDSLLKLSDTRARNNKMTLMHYLCKLVGEKMPELLDFANDLVHLEAASKIELKTLAEEMQAATKGLEKVEQELMASENDGAISLGFRKVLKEFLDMADEEVKTLASLYSEVGRNADSLSHYFGEDPARCPFEQVTKILTLFMKTFIKSREENEKQAEAEKKKLEKEAIKEKSATKKDGVDNDNDLIQQIHRHRT

SEQ ID NO: 46398 - protein, 1127 aa, Arabidopsis thaliana
  peptide (1)..(1127): Ceres Seq. ID no. 13509374
  misc_feature (394)..(700): Pfam Name: Formin Homology 2 Domain Pfam Description: Formin Homology 2 Domain
  misc_feature (664)..(1101): Homolog of NCBI NO: 30682092 NR Description: formin homology 2 (FH2) domain-containing protein
  misc_feature (331)..(698): Homolog of NCBI NO: 27817931 NR Description: P0453E05.6 [Oryza sativa (japonica
  misc_feature (446)..(1116): Homolog of NCBI NO: 30682634 NR Description: formin homology 2 (FH2) domain-containing protein
  misc_feature (1)..(290): Homolog of NCBI NO: 38346845 NR Description: OSJNBa0091C12.5 [Oryza sativa (japonica
  misc_feature (472)..(982): Homolog of NCBI NO: 38346845 NR Description: OSJNBa0091C12.5 [Oryza sativa (japonica
  misc_feature (751)..(1127): Homolog of NCBI NO: 15242969 NR Description: formin homology 2 (FH2) domain-containing protein
  misc_feature (1)..(695): Homolog of NCBI NO: 15242969 NR Description: formin homology 2 (FH2) domain-containing protein
  misc_feature (295)..(906): Homolog of NCBI NO: 37530618 NR Description: unknown protein [Oryza sativa (japonica
  misc_feature (1)..(261): Homolog of NCBI NO: 27817931 NR Description: P0453E05.6 [Oryza sativa (japonica
  misc_feature (390)..(1105): Homolog of NCBI NO: 27817931 NR Description: P0453E05.6 [Oryza sativa (japonica
MLPLSLIQHFLRVCESWLARGNRQDVILLHCERGGWPLLAFILASFLIFRKVHSGERRTLEIVHREAPKGLLQLLSPLNPFPSQLRYLQYVARRNINSEWPPPERALSLDCVIIRGIPNFDSQHGCRPIIRIFGRNYSSKSGLSTEMVYSMSDKKKPLRHYRQAECDVIKIDIQCWVQGDVVLECVHMDLDPEREVMMFRVMFNTAFIRSNILMLNSDNLDILWEAKDHYPKGFRAEVLFGEVENASPQKVPTPIVNGDETGGLPIEAFSRVQELFSGVDLAENGDDAALWLLKQLAAINDAKEFTRFRHKGSFYFNSPDSEEETNTSSAADSSDEGFEAIQRPRIHIPFDNDDTDDITLSVAHESSEEPHEFSHHHHHEIPAKDSVDNPLNLPSDPPSSGDHVTLLPPPPPPPPPPLFTSTTSFSPSQPPPPPPPPPLFMSTTSFSPSQPPPPPPPPPLFTSTTSFSPSQPPPPPPLPSFSNRDPLTTLHQPINKTPPPPPPPPPPLPSRSIPPPLAQPPPPRPPPPPPPPPSSRSIPSPSAPPPPPPPPPSFGSTGNKRQAQPPPPPPPPPPTRIPAAKCAPPPPPPPPTSHSGSIRVGPPSTPPPPPPPPPKANISNAPKPPAPPPLPPSSTRLGAPPPPPPPPLSKTPAPPPPPLSKTPVPPPPPGLGRGTSSGPPPLGAKGSNAPPPPPPAGRGRASLGLGRGRGVSVPTAAPKKTALKPLHWSKVTRAAKGSLWADTQKQENQPRAPEIDISELESLFSAVSDTTAKKSTGRRGSSISKPEKVQLVDLRRANNCEIMLTKIKIPLPDMLSAVLALDSLALDIDQVENLIKFCPTKEEMELLRNYTGDKEMLGKCEQVPRIEAKLRVFGFKITFASQVEELKSCLNTINAATKEVKESAKLRQIMQTILTLGNALNQGTARGSAVGFKLDSLLKLSDTRARNNKMTLMHYLCKLVGEKMPELLDFANDLVHLEAASKIELKTLAEEMQAATKGLEKVEQELMASENDGAISLGFRKVLKEFLDMADEEVKTLASLYSEVGRNADSLSHYFGEDPARCPFEQVTKILTLFMKTFIKSREENEKQAEAEKKKLEKEAIKEKSATKKDGVDNDNDLIQQIHRHRT

SEQ ID NO: 46399 - DNA, 1760 bp, Arabidopsis thaliana
  misc_feature (1)..(1760): Ceres Seq. ID no. 14309923
  misc_feature: MA Experiment ID: 20001451 Result: Down-regulated in Transcription
  misc_feature: MA Experiment 20001451 PARAMETER Experiment Name: At_Far-red-induction_P Parameter: Age (day) Value: 7
  misc_feature: MA Experiment 20001451 PARAMETER Experiment Name: At_Far-red-induction_P Parameter: Light Value: Far-red vs. White
  misc_feature: MA Experiment 20001451 PARAMETER Experiment Name: At_Far-red-induction_P Parameter: Organism Value: A. thaliana
  misc_feature: MA Experiment 20001451 PARAMETER Experiment Name: At_Far-red-induction_P Parameter: Plant Line Value: Columbia
  misc_feature: MA Experiment 20001451 PARAMETER Experiment Name: At_Far-red-induction_P Parameter: Timepoint (hr) Value: 24
  misc_feature: MA Experiment 20001451 PARAMETER Experiment Name: At_Far-red-induction_P Parameter: Tissue Value: Whole Plant
tccttgcgttctttgctttgtgctcagacaaaaccaatggctttgtctcaaggaatgcaaattcactcttacattatcaagtggggtttcctggcagatcttacggtttgcaactctctgcttaccatgtacaccttctgctcagacttgtattgttgttttaatttatttgaagatttcagaaacaacgcagattctgtttcttggaatactattctgacggcttgtttgcaacacgaacagccagtagagatgttgagattgtttaagctgatgcttgtgtctgaatgtgagccagatcacataactatgggtaatctgttgcggggttgtgtggaaatctcatctctaaagttgggaagccaagtccattgctatagtttgaaaaccgggttggcgcctgagcaatttataaaaaatggactgattgatatgtatgccaagtgtggatcactggggcaagcgagaaggatttttgattcaatggataacagagatgtagtttcgtggagcaccttgatagttggatatgcacagtctggatttggagaggaagctctcatattgttcaaggaaatgaaaagtgcgggcatagagccaaatcatgtaacttttgtcggtgttcttactgcctgtagtcatgttgggctggtggaagaaggcttgaaactgtatgcgaccatgcaaactgaacacgggatttcaccaacaaaagagcactgctcttgcgtggtggacttactggctcgtgctggccgtttaaatgaagctgagagttttatcgatgaaatgaagttggaacctgatgttgtcgtgtggaagactctactgtctgcatgtaaaacccaaggaaatgttcatctcgcccaaaaggctgctgaaaatattctgaaaatcgatcctttcaactctacagctcatgtattgctctgcagcatgcatgcttcttctggaaattgggaaaatgctgcattgttgaggagctcaatgaaaaagcatgatgttaaaaaaattccaggacagagctggatcgaagttgaggacaaaattcatatattctttgctgaggatatttttcatccagagagggacgatatatatacagtcctgcacaacatctggtcgcagatgctagatgagtgtaatccgcaacacaagaaaagactccagtttatccatgaaaccggataaacaagcatttaagttccatctgagagaagcacagaaaaatgccattgtggctactctatatcttgccttttccttttctgcagtctgttgtcatgagattgacgcagcgtacatagttgccagcgtgtctattaaataaggcatttgatgaggatgaacaggttaccacattgggttgctacagacaagcgggatgggcaacaaatgcagtgctatacaaactacgaaaagaggatacatctcaacttatctgatgagtacaacaaatttgagttaagatgatttgaagaaggccatgaagcaaaactatctgctgggtatgaacatgtaaaagctccagactccttgagtctcgtagaagtgacgacgcaacttctttcttcttatatgtctagaaatggatcaaacactggactaagaatccggaaatcgtatcgcaaaacgaatcaaaatgatgaaagttttagtctcttatacatctgtgattattgagctaataaaacaacttgatacgaaacaatcatgggacgtcaatgatagtttagttgatggatctgtttgtaaaaatc

SEQ ID NO: 46400 - protein, 396 aa, Arabidopsis thaliana
  peptide (1)..(396): Ceres Seq. ID no. 14309924
  misc_feature (67)..(101): Pfam Name: PPR repeat Pfam Description: PPR repeat
  misc_feature (18)..(366): Homolog of NCBI NO: 15229561 NR Description: pentatricopeptide (PPR) repeat-containing protein
  misc_feature (13)..(384): Homolog of NCBI NO: 15233590 NR Description: pentatricopeptide (PPR) repeat-containing protein
  misc_feature (14)..(393): Homolog of NCBI NO: 15221566 NR Description: pentatricopeptide (PPR) repeat-containing protein
  misc_feature (5)..(380): Homolog of NCBI NO: 7486979 NR Description: hypothetical protein T13K14.230 - Arabidopsis
  misc_feature (14)..(367): Homolog of NCBI NO: 15234095 NR Description: pentatricopeptide (PPR) repeat-containing protein
  misc_feature (4)..(377): Homolog of NCBI NO: 15235115 NR Description: pentatricopeptide (PPR) repeat-containing protein
  misc_feature (14)..(373): Homolog of NCBI NO: 15236324 NR Description: pentatricopeptide (PPR) repeat-containing protein
  misc_feature (1)..(393): Homolog of NCBI NO: 15229426 NR Description: pentatricopeptide (PPR) repeat-containing protein
  misc_feature (15)..(394): Homolog of NCBI NO: 22093801 NR Description: hypothetical protein~predicted by
  misc_feature (1)..(396): Homolog of NCBI NO: 15231798 NR Description: pentatricopeptide (PPR) repeat-containing protein
SLRSLLCAQTKPMALSQGMQIHSYIIKWGFLADLTVCNSLLTMYTFCSDLYCCFNLFEDFRNNADSVSWNTILTACLQHEQPVEMLRLFKLMLVSECEPDHITMGNLLRGCVEISSLKLGSQVHCYSLKTGLAPEQFIKNGLIDMYAKCGSLGQARRIFDSMDNRDVVSWSTLIVGYAQSGFGEEALILFKEMKSAGIEPNHVTFVGVLTACSHVGLVEEGLKLYATMQTEHGISPTKEHCSCVVDLLARAGRLNEAESFIDEMKLEPDVVVWKTLLSACKTQGNVHLAQKAAENILKIDPFNSTAHVLLCSMHASSGNWENAALLRSSMKKHDVKKIPGQSWIEVEDKIHIFFAEDIFHPERDDIYTVLHNIWSQMLDECNPQHKKRLQFIHETG

SEQ ID NO: 46401 - protein, 384 aa, Arabidopsis thaliana
  peptide (1)..(384): Ceres Seq. ID no. 14309925
  misc_feature (55)..(89): Pfam Name: PPR repeat Pfam Description: PPR repeat
  misc_feature (6)..(354): Homolog of NCBI NO: 15229561 NR Description: pentatricopeptide (PPR) repeat-containing protein
  misc_feature (1)..(372): Homolog of NCBI NO: 15233590 NR Description: pentatricopeptide (PPR) repeat-containing protein
  misc_feature (2)..(381): Homolog of NCBI NO: 15221566 NR Description: pentatricopeptide (PPR) repeat-containing protein
  misc_feature (1)..(368): Homolog of NCBI NO: 7486979 NR Description: hypothetical protein T13K14.230 - Arabidopsis
  misc_feature (2)..(355): Homolog of NCBI NO: 15234095 NR Description: pentatricopeptide (PPR) repeat-containing protein
  misc_feature (1)..(365): Homolog of NCBI NO: 15235115 NR Description: pentatricopeptide (PPR) repeat-containing protein
  misc_feature (2)..(361): Homolog of NCBI NO: 15236324 NR Description: pentatricopeptide (PPR) repeat-containing protein
  misc_feature (1)..(381): Homolog of NCBI NO: 15229426 NR Description: pentatricopeptide (PPR) repeat-containing protein
  misc_feature (3)..(382): Homolog of NCBI NO: 22093801 NR Description: hypothetical protein~predicted by
  misc_feature (1)..(384): Homolog of NCBI NO: 15231798 NR Description: pentatricopeptide (PPR) repeat-containing protein
MALSQGMQIHSYIIKWGFLADLTVCNSLLTMYTFCSDLYCCFNLFEDFRNNADSVSWNTILTACLQHEQPVEMLRLFKLMLVSECEPDHITMGNLLRGCVEISSLKLGSQVHCYSLKTGLAPEQFIKNGLIDMYAKCGSLGQARRIFDSMDNRDVVSWSTLIVGYAQSGFGEEALILFKEMKSAGIEPNHVTFVGVLTACSHVGLVEEGLKLYATMQTEHGISPTKEHCSCVVDLLARAGRLNEAESFIDEMKLEPDVVVWKTLLSACKTQGNVHLAQKAAENILKIDPFNSTAHVLLCSMHASSGNWENAALLRSSMKKHDVKKIPGQSWIEVEDKIHIFFAEDIFHPERDDIYTVLHNIWSQMLDECNPQHKKRLQFIHETG

SEQ ID NO: 46402 - protein, 378 aa, Arabidopsis thaliana
  peptide (1)..(378): Ceres Seq. ID no. 14309926
  misc_feature (49)..(83): Pfam Name: PPR repeat Pfam Description: PPR repeat
  misc_feature (1)..(348): Homolog of NCBI NO: 15229561 NR Description: pentatricopeptide (PPR) repeat-containing protein
  misc_feature (1)..(366): Homolog of NCBI NO: 15233590 NR Description: pentatricopeptide (PPR) repeat-containing protein
  misc_feature (1)..(375): Homolog of NCBI NO: 15221566 NR Description: pentatricopeptide (PPR) repeat-containing protein
  misc_feature (1)..(362): Homolog of NCBI NO: 7486979 NR Description: hypothetical protein T13K14.230 - Arabidopsis
  misc_feature (1)..(349): Homolog of NCBI NO: 15234095 NR Description: pentatricopeptide (PPR) repeat-containing protein
  misc_feature (1)..(359): Homolog of NCBI NO: 15235115 NR Description: pentatricopeptide (PPR) repeat-containing protein
  misc_feature (1)..(355): Homolog of NCBI NO: 15236324 NR Description: pentatricopeptide (PPR) repeat-containing protein
  misc_feature (1)..(375): Homolog of NCBI NO: 15229426 NR Description: pentatricopeptide (PPR) repeat-containing protein
  misc_feature (1)..(376): Homolog of NCBI NO: 22093801 NR Description: hypothetical protein~predicted by
  misc_feature (1)..(378): Homolog of NCBI NO: 15231798 NR Description: pentatricopeptide (PPR) repeat-containing protein
MQIHSYIIKWGFLADLTVCNSLLTMYTFCSDLYCCFNLFEDFRNNADSVSWNTILTACLQHEQPVEMLRLFKLMLVSECEPDHITMGNLLRGCVEISSLKLGSQVHCYSLKTGLAPEQFIKNGLIDMYAKCGSLGQARRIFDSMDNRDVVSWSTLIVGYAQSGFGEEALILFKEMKSAGIEPNHVTFVGVLTACSHVGLVEEGLKLYATMQTEHGISPTKEHCSCVVDLLARAGRLNEAESFIDEMKLEPDVVVWKTLLSACKTQGNVHLAQKAAENILKIDPFNSTAHVLLCSMHASSGNWENAALLRSSMKKHDVKKIPGQSWIEVEDKIHIFFAEDIFHPERDDIYTVLHNIWSQMLDECNPQHKKRLQFIHETG

SEQ ID NO: 46403 - DNA, 1395 bp, Arabidopsis thaliana
  misc_feature (1)..(1395): Ceres Seq. ID no. 12601784
  misc_feature: MA Experiment ID: 108595 Result: Down-regulated in Transcription
  misc_feature: MA Experiment 108595 PARAMETER Experiment Name: At_Ler-pi_Ovule_cDNA_P Parameter: Plant Line Value: null
  misc_feature: MA Experiment ID: 20000314 Result: Down-regulated in Transcription
  misc_feature: MA Experiment 20000314 PARAMETER Experiment Name: At_14day_Shoots-Roots_Sub_P Parameter: Age (day) Value: 14
  misc_feature: MA Experiment 20000314 PARAMETER Experiment Name: At_14day_Shoots-Roots_Sub_P Parameter: Organism Value: A. thaliana
  misc_feature: MA Experiment 20000314 PARAMETER Experiment Name: At_14day_Shoots-Roots_Sub_P Parameter: Plant Line Value: WS
  misc_feature: MA Experiment 20000314 PARAMETER Experiment Name: At_14day_Shoots-Roots_Sub_P Parameter: Tissue Value: Roots vs. Whole Plant
agagctctattcccatcaagaaacacacttcggaagatggagatcactaacgttaccgagtatgatgcaatcgcaaagcagaagctgcctaagatggtgtacgactactatgcatctggtgcagaagaccaatggactcttcaagagaacagaaacgcttttgcaaggatcctctttcggcctcggattctgattgatgtgagcaagattgacatgacaaccacccgtcttggggttcaagatctcgatgcccatcatggttgctccaactgccatgcaaaagatggctcaccctgatggggaatatgctactgctagagctgcatctgcagctggaactatcatgacactatcttcatgggctacttcaagtgttgaagaagttgcttccacagggccaggaatccgattcttccagctctatgtatacaagaacaggaaggtggttgagcagctcgtgagaagagccgagaaagctgggttcaaagccattgctctcactgtagacaccccaaggctaggtcgcagagagtctgatatcaagaacagattcactttgcctccaaacctgacattgaagaactttgaaggtcttgaccttggaaagatggacgaggccaatgactctggcttggcttcgtatgttgctggtcaaattgaccgtaccttgagctggaaggatatccagtggctccaaacaatcaccaacatgccaattcttgtcaagggtgttcttacaggagaggatgcaaggatagcgattcaagctggagcagcagggatcattgtgtcaaatcatggagctcgccagcttgattatgtcccagcaacaatctcagcccttgaagaggttgtcaaagcaacacaaggacgagttcctgtcttcttggatggtggtgttcgacgtggcactgatgtcttcaaggcacttgcacttggagcctctggaatatttattggaagaccagtggtttttgcactagctgctgaaggagaagccggagtcaaaaaggtgcttcaaatgttgcgtgatgagttcgagctaaccatggcactaagtgggtgccggtcactcagtgaaatcacccgtaaccacattgtcacggaatgggacactccacgccatttgcccaggttatagagaagaaaaaaaaaacagagaacagaaacaacacggcaccaaaacgtattcatattctgattgatcactttgcttctactctgctatatttatatctcgaaaaacttgtttctccctatatcggatcacaaaaacgtgcgtagagattctctgtaatgctatttggctacattttacctttccgtttattcttattgcttgtacaatagatgttgattcctacaataccaatgaatactaaaatctgttcccgg

SEQ ID NO: 46404 - protein, 297 aa, Arabidopsis thaliana
  peptide (1)..(297): Ceres Seq. ID no. 12601785
  misc_feature (1)..(286): Pfam Name: FMN-dependent dehydrogenase Pfam Description: FMN-dependent dehydrogenase
  misc_feature (1)..(289): Homolog of NCBI NO: 2554675 NR Description: Three-Dimensional Structure Of Glycolate Oxidase
  misc_feature (1)..(297): Homolog of NCBI NO: 999542 NR Description: Chain A, Glycolate Oxidase (E.C.1.1.3.15) Mutant
  misc_feature (1)..(297): Homolog of NCBI NO: 121530 NR Description: (S)-2-hydroxy-acid oxidase, peroxisomal
  misc_feature (1)..(297): Homolog of NCBI NO: 27549566 NR Description: glycolate oxidase [Zantedeschia aethiopica]
  misc_feature (1)..(296): Homolog of NCBI NO: 228403 NR Description: glycolate oxidase
  misc_feature (1)..(297): Homolog of NCBI NO: 1773330 NR Description: glycolate oxidase [Mesembryanthemum crystallinum]
  misc_feature (1)..(297): Homolog of NCBI NO: 7431428 NR Description: (S)-2-hydroxy-acid oxidase (EC 1.1.3.15) -
  misc_feature (1)..(297): Homolog of NCBI NO: 16226772 NR Description: AT3g14420/MOA2_2 [Arabidopsis thaliana]
  misc_feature (1)..(297): Homolog of NCBI NO: 15231850 NR Description: glycolate oxidase, putative
  misc_feature (1)..(297): Homolog of NCBI NO: 15229497 NR Description: glycolate oxidase; protein id: At3g14415.1
MPIMVAPTAMQKMAHPDGEYATARAASAAGTIMTLSSWATSSVEEVASTGPGIRFFQLYVYKNRKVVEQLVRRAEKAGFKAIALTVDTPRLGRRESDIKNRFTLPPNLTLKNFEGLDLGKMDEANDSGLASYVAGQIDRTLSWKDIQWLQTITNMPILVKGVLTGEDARIAIQAGAAGIIVSNHGARQLDYVPATISALEEVVKATQGRVPVFLDGGVRRGTDVFKALALGASGIFIGRPVVFALAAEGEAGVKKVLQMLRDEFELTMALSGCRSLSEITRNHIVTEWDTPRHLPRL

SEQ ID NO: 46405 - protein, 294 aa, Arabidopsis thaliana
  peptide (1)..(294): Ceres Seq. ID no. 12601786
  misc_feature (1)..(283): Pfam Name: FMN-dependent dehydrogenase Pfam Description: FMN-dependent dehydrogenase
  misc_feature (1)..(286): Homolog of NCBI NO: 2554675 NR Description: Three-Dimensional Structure Of Glycolate Oxidase
  misc_feature (1)..(294): Homolog of NCBI NO: 999542 NR Description: Chain A, Glycolate Oxidase (E.C.1.1.3.15) Mutant
  misc_feature (1)..(294): Homolog of NCBI NO: 121530 NR Description: (S)-2-hydroxy-acid oxidase, peroxisomal
  misc_feature (1)..(294): Homolog of NCBI NO: 27549566 NR Description: glycolate oxidase [Zantedeschia aethiopica]
  misc_feature (1)..(293): Homolog of NCBI NO: 228403 NR Description: glycolate oxidase
  misc_feature (1)..(294): Homolog of NCBI NO: 1773330 NR Description: glycolate oxidase [Mesembryanthemum crystallinum]
  misc_feature (1)..(294): Homolog of NCBI NO: 7431428 NR Description: (S)-2-hydroxy-acid oxidase (EC 1.1.3.15) -
  misc_feature (1)..(294): Homolog of NCBI NO: 16226772 NR Description: AT3g14420/MOA2_2 [Arabidopsis thaliana]
  misc_feature (1)..(294): Homolog of NCBI NO: 15231850 NR Description: glycolate oxidase, putative
  misc_feature (1)..(294): Homolog of NCBI NO: 15229497 NR Description: glycolate oxidase; protein id: At3g14415.1
MVAPTAMQKMAHPDGEYATARAASAAGTIMTLSSWATSSVEEVASTGPGIRFFQLYVYKNRKVVEQLVRRAEKAGFKAIALTVDTPRLGRRESDIKNRFTLPPNLTLKNFEGLDLGKMDEANDSGLASYVAGQIDRTLSWKDIQWLQTITNMPILVKGVLTGEDARIAIQAGAAGIIVSNHGARQLDYVPATISALEEVVKATQGRVPVFLDGGVRRGTDVFKALALGASGIFIGRPVVFALAAEGEAGVKKVLQMLRDEFELTMALSGCRSLSEITRNHIVTEWDTPRHLPRL

SEQ ID NO: 46406 - protein, 288 aa, Arabidopsis thaliana
  peptide (1)..(288): Ceres Seq. ID no. 12601787
  misc_feature (1)..(277): Pfam Name: FMN-dependent dehydrogenase Pfam Description: FMN-dependent dehydrogenase
  misc_feature (1)..(280): Homolog of NCBI NO: 2554675 NR Description: Three-Dimensional Structure Of Glycolate Oxidase
  misc_feature (1)..(288): Homolog of NCBI NO: 999542 NR Description: Chain A, Glycolate Oxidase (E.C.1.1.3.15) Mutant
  misc_feature (1)..(288): Homolog of NCBI NO: 121530 NR Description: (S)-2-hydroxy-acid oxidase, peroxisomal
  misc_feature (1)..(288): Homolog of NCBI NO: 27549566 NR Description: glycolate oxidase [Zantedeschia aethiopica]
  misc_feature (1)..(287): Homolog of NCBI NO: 228403 NR Description: glycolate oxidase
  misc_feature (1)..(288): Homolog of NCBI NO: 1773330 NR Description: glycolate oxidase [Mesembryanthemum crystallinum]
  misc_feature (1)..(288): Homolog of NCBI NO: 7431428 NR Description: (S)-2-hydroxy-acid oxidase (EC 1.1.3.15) -
  misc_feature (1)..(288): Homolog of NCBI NO: 16226772 NR Description: AT3g14420/MOA2_2 [Arabidopsis thaliana]
  misc_feature (1)..(288): Homolog of NCBI NO: 15231850 NR Description: glycolate oxidase, putative
  misc_feature (1)..(288): Homolog of NCBI NO: 15229497 NR Description: glycolate oxidase; protein id: At3g14415.1
MQKMAHPDGEYATARAASAAGTIMTLSSWATSSVEEVASTGPGIRFFQLYVYKNRKVVEQLVRRAEKAGFKAIALTVDTPRLGRRESDIKNRFTLPPNLTLKNFEGLDLGKMDEANDSGLASYVAGQIDRTLSWKDIQWLQTITNMPILVKGVLTGEDARIAIQAGAAGIIVSNHGARQLDYVPATISALEEVVKATQGRVPVFLDGGVRRGTDVFKALALGASGIFIGRPVVFALAAEGEAGVKKVLQMLRDEFELTMALSGCRSLSEITRNHIVTEWDTPRHLPRL

SEQ ID NO: 46407 - DNA, 1197 bp, Arabidopsis thaliana
  misc_feature (1)..(1197): Ceres Seq. ID no. 12574522
  misc_feature: MA Experiment ID: 108461 Result: Up-regulated in Transcription
  misc_feature: MA Experiment 108461 PARAMETER Experiment Name: At_Germinating_Seeds_cDNA_P Parameter: Age (day) Value: 1 vs. 0
  misc_feature: MA Experiment 108461 PARAMETER Experiment Name: At_Germinating_Seeds_cDNA_P Parameter: Tissue Value: Germinating Seeds
  misc_feature: MA Experiment ID: 108462 Result: Up-regulated in Transcription
  misc_feature: MA Experiment 108462 PARAMETER Experiment Name: At_Germinating_Seeds_cDNA_P Parameter: Age (day) Value: 2 vs. 0
  misc_feature: MA Experiment 108462 PARAMETER Experiment Name: At_Germinating_Seeds_cDNA_P Parameter: Tissue Value: Germinating Seeds
  misc_feature: MA Experiment ID: 108569 Result: Up-regulated in Transcription
  misc_feature: MA Experiment 108569 PARAMETER Experiment Name: At_0.001%_MeJA__cDNA_P Parameter: Timepoint (hr) Value: 6
  misc_feature: MA Experiment 108569 PARAMETER Experiment Name: At_0.001%_MeJA__cDNA_P Parameter: Tissue Value: Aerial
  misc_feature: MA Experiment 108569 PARAMETER Experiment Name: At_0.001%_MeJA__cDNA_P Parameter: Treatment Value: 0.001% MeJA vs. No Treatment
  misc_feature: MA Experiment ID: 108573 Result: Up-regulated in Transcription
  misc_feature: MA Experiment 108573 PARAMETER Experiment Name: At_Drought_cDNA_P Parameter: Timepoint (hr) Value: 6
  misc_feature: MA Experiment 108573 PARAMETER Experiment Name: At_Drought_cDNA_P Parameter: Tissue Value: Aerial
  misc_feature: MA Experiment 108573 PARAMETER Experiment Name: At_Drought_cDNA_P Parameter: Treatment Value: Drought vs. No Drought
  misc_feature: MA Experiment ID: 108585 Result: Up-regulated in Transcription
  misc_feature: MA Experiment 108585 PARAMETER Experiment Name: At_5mM_NaNP_cDNA_P Parameter: Timepoint (hr) Value: 6
  misc_feature: MA Experiment 108585 PARAMETER Experiment Name: At_5mM_NaNP_cDNA_P Parameter: Tissue Value: Aerial
  misc_feature: MA Experiment 108585 PARAMETER Experiment Name: At_5mM_NaNP_cDNA_P Parameter: Treatment Value: null
  misc_feature: MA Experiment ID: 108594 Result: Down-regulated in Transcription
  misc_feature: MA Experiment 108594 PARAMETER Experiment Name: At_Ler-rhl_Root_cDNA_P Parameter: Plant Line Value: null
  misc_feature: MA Experiment ID: 20000173 Result: Down-regulated in Transcription
  misc_feature: MA Experiment 20000173 PARAMETER Experiment Name: At_42deg_Heat_P Parameter: Age (day) Value: 14
  misc_feature: MA Experiment 20000173 PARAMETER Experiment Name: At_42deg_Heat_P Parameter: Organism Value: A. thaliana
  misc_feature: MA Experiment 20000173 PARAMETER Experiment Name: At_42deg_Heat_P Parameter: Plant Line Value: WS
  misc_feature: MA Experiment 20000173 PARAMETER Experiment Name: At_42deg_Heat_P Parameter: Temperature (deg C) Value: 42 vs. 22
  misc_feature: MA Experiment 20000173 PARAMETER Experiment Name: At_42deg_Heat_P Parameter: Timepoint (hr) Value: 6
  misc_feature: MA Experiment 20000173 PARAMETER Experiment Name: At_42deg_Heat_P Parameter: Tissue Value: Aerial
  misc_feature: MA Experiment ID: 20000495 Result: Down-regulated in Transcription
  misc_feature: MA Experiment 20000495 PARAMETER Experiment Name: At_Guard_Cells_P Parameter: Harvest Date Value: 8/2/2002
  misc_feature: MA Experiment 20000495 PARAMETER Experiment Name: At_Guard_Cells_P Parameter: Organism Value: A. thaliana
  misc_feature: MA Experiment 20000495 PARAMETER Experiment Name: At_Guard_Cells_P Parameter: Tissue Value: Guard Cells vs. Leaves
  misc_feature: MA Experiment ID: 20001451 Result: Down-regulated in Transcription
  misc_feature: MA Experiment 20001451 PARAMETER Experiment Name: At_Far-red-induction_P Parameter: Age (day) Value: 7
  misc_feature: MA Experiment 20001451 PARAMETER Experiment Name: At_Far-red-induction_P Parameter: Light Value: Far-red vs. White
  misc_feature: MA Experiment 20001451 PARAMETER Experiment Name: At_Far-red-induction_P Parameter: Organism Value: A. thaliana
  misc_feature: MA Experiment 20001451 PARAMETER Experiment Name: At_Far-red-induction_P Parameter: Plant Line Value: Columbia
  misc_feature: MA Experiment 20001451 PARAMETER Experiment Name: At_Far-red-induction_P Parameter: Timepoint (hr) Value: 24
  misc_feature: MA Experiment 20001451 PARAMETER Experiment Name: At_Far-red-induction_P Parameter: Tissue Value: Whole Plant
ggagtttttttttttccatttcttctcattctcaaattctctttcttagtttggttgttttgatgcagaaatcgactgagttcgtaacttgttgttgtctgatcttttaaagattcaaccttttttggtccgatcatggctgttgctgagaatgctggtgtcaaagtggactcttctggtcagaatttagacaacaacaacactgctgcttcagctaccgagacgacaaagccgccatgtcctgatgatgatcaaagccctaaatctgactcatccactcctcttaccatcgattcgactcctgaaactgacgatcggatcaatgagactgctcaaaaggttcagactttaaatgggtttagtggaaatggtgagagagataacaatggagagatcaaagatttggctgatgcgttttctaagcttaatccgatggctcaggagtttgttcctccttctcttgctcgaagtcaatctggggttttgagaaatggattagggtttactaacaattttgcagccccacctaaacttgctgatgggaatgatcattttcctagaaggagaaggagttttggccaagggaagcgaagaatgaacaaaaggacaagcttggctcagaaggatgatgtaatcaggagaactgtatatgtctctgacatcgaccaacaggttacagaggagaacctcgcaggtgtctttattaactgtggacaggttgttgattgtcgtgtatgcggtgatccaaattctgtccttcgtttcgctttcattgaatttaccaatgaagagggagctagagctgctttgagcatgtcgggtactgtgctaggtttttaccctcttaaggttcttccttccaaaacagctattgctcctgttaacccgacttttcttccacgatctgaggatgagcgtgagatgtgcgttaggactgtttactgtaccaacattgacaagcggatcactcaaattgacttgaaaggcttctttgaaatgctttgcggggaggttcatcgtctgaggcttggagactatcaccaccaaacccgtattgcttttgttgagtttgcgatggcggaaagcgcaattgctgcgcttcactgcagcggtattgtcttgggggcactcccaataagggtaagtccatcgaagacaccagtaaggccgcattttccccgcgctgagttcaagtga

SEQ ID NO: 46408 - protein, 353 aa, Arabidopsis thaliana
  peptide (1)..(353): Ceres Seq. ID no. 12574523
  misc_feature (268)..(336): Pfam Name: RNA recognition motif. (a.k.a. RRM, RBD, or RNP domain) Pfam Description: RNA recognition motif. (a.k.a. RRM, RBD, or RNP
  misc_feature (87)..(296): Homolog of NCBI NO: 34903832 NR Description: ATT4F9_7(AL049523|pid:g4539439) Arabidopsis
  misc_feature (94)..(336): Homolog of NCBI NO: 8671859 NR Description: Contains similarity to RNA-binding protein from thaliana gi|2129727 and contains RNA recognition PF|00076 domain.
  misc_feature (86)..(350): Homolog of NCBI NO: 15220902 NR Description: RNA-binding protein, putative; protein id:
  misc_feature (37)..(346): Homolog of NCBI NO: 15238531 NR Description: RNA-binding protein, putative; protein id:
  misc_feature (80)..(349): Homolog of NCBI NO: 15231858 NR Description: RNA-binding protein, putative; protein id:
  misc_feature (154)..(349): Homolog of NCBI NO: 14030687 NR Description: At1g32790 [Arabidopsis thaliana]
  misc_feature (76)..(349): Homolog of NCBI NO: 1174153 NR Description: RNA-binding protein
  misc_feature (76)..(349): Homolog of NCBI NO: 15235177 NR Description: RNA-binding protein RBP37
  misc_feature (1)..(349): Homolog of NCBI NO: 15223304 NR Description: RNA-binding protein, putative
  misc_feature (1)..(353): Homolog of NCBI NO: 15229132 NR Description: RNA-binding protein, putative; protein id:
MAVAENAGVKVDSSGQNLDNNNTAASATETTKPPCPDDDQSPKSDSSTPLTIDSTPETDDRINETAQKVQTLNGFSGNGERDNNGEIKDLADAFSKLNPMAQEFVPPSLARSQSGVLRNGLGFTNNFAAPPKLADGNDHFPRRRRSFGQGKRRMNKRTSLAQKDDVIRRTVYVSDIDQQVTEENLAGVFINCGQVVDCRVCGDPNSVLRFAFIEFTNEEGARAALSMSGTVLGFYPLKVLPSKTAIAPVNPTFLPRSEDEREMCVRTVYCTNIDKRITQIDLKGFFEMLCGEVHRLRLGDYHHQTRIAFVEFAMAESAIAALHCSGIVLGALPIRVSPSKTPVRPHFPRAEFK

SEQ ID NO: 46409 - protein, 254 aa, Arabidopsis thaliana
  peptide (1)..(254): Ceres Seq. ID no. 12574524
  misc_feature (169)..(237): Pfam Name: RNA recognition motif. (a.k.a. RRM, RBD, or RNP domain) Pfam Description: RNA recognition motif. (a.k.a. RRM, RBD, or RNP
  misc_feature (1)..(197): Homolog of NCBI NO: 34903832 NR Description: ATT4F9_7(AL049523|pid:g4539439) Arabidopsis
  misc_feature (1)..(237): Homolog of NCBI NO: 8671859 NR Description: Contains similarity to RNA-binding protein from thaliana gi|2129727 and contains RNA recognition PF|00076 domain.
  misc_feature (1)..(251): Homolog of NCBI NO: 15220902 NR Description: RNA-binding protein, putative; protein id:
  misc_feature (1)..(247): Homolog of NCBI NO: 15238531 NR Description: RNA-binding protein, putative; protein id:
  misc_feature (1)..(250): Homolog of NCBI NO: 15231858 NR Description: RNA-binding protein, putative; protein id:
  misc_feature (55)..(250): Homolog of NCBI NO: 14030687 NR Description: At1g32790 [Arabidopsis thaliana]
  misc_feature (1)..(250): Homolog of NCBI NO: 1174153 NR Description: RNA-binding protein
  misc_feature (1)..(250): Homolog of NCBI NO: 15235177 NR Description: RNA-binding protein RBP37
  misc_feature (1)..(250): Homolog of NCBI NO: 15223304 NR Description: RNA-binding protein, putative
  misc_feature (1)..(254): Homolog of NCBI NO: 15229132 NR Description: RNA-binding protein, putative; protein id:
MAQEFVPPSLARSQSGVLRNGLGFTNNFAAPPKLADGNDHFPRRRRSFGQGKRRMNKRTSLAQKDDVIRRTVYVSDIDQQVTEENLAGVFINCGQVVDCRVCGDPNSVLRFAFIEFTNEEGARAALSMSGTVLGFYPLKVLPSKTAIAPVNPTFLPRSEDEREMCVRTVYCTNIDKRITQIDLKGFFEMLCGEVHRLRLGDYHHQTRIAFVEFAMAESAIAALHCSGIVLGALPIRVSPSKTPVRPHFPRAEFK

SEQ ID NO: 46410 - protein, 200 aa, Arabidopsis thaliana
  peptide (1)..(200): Ceres Seq. ID no. 12574525
  misc_feature (115)..(183): Pfam Name: RNA recognition motif. (a.k.a. RRM, RBD, or RNP domain) Pfam Description: RNA recognition motif. (a.k.a. RRM, RBD, or RNP
  misc_feature (1)..(143): Homolog of NCBI NO: 34903832 NR Description: ATT4F9_7(AL049523|pid:g4539439) Arabidopsis
  misc_feature (1)..(183): Homolog of NCBI NO: 8671859 NR Description: Contains similarity to RNA-binding protein from thaliana gi|2129727 and contains RNA recognition PF|00076 domain.
  misc_feature (1)..(197): Homolog of NCBI NO: 15220902 NR Description: RNA-binding protein, putative; protein id:
  misc_feature (1)..(193): Homolog of NCBI NO: 15238531 NR Description: RNA-binding protein, putative; protein id:
  misc_feature (1)..(196): Homolog of NCBI NO: 15231858 NR Description: RNA-binding protein, putative; protein id:
  misc_feature (1)..(196): Homolog of NCBI NO: 14030687 NR Description: At1g32790 [Arabidopsis thaliana]
  misc_feature (1)..(196): Homolog of NCBI NO: 1174153 NR Description: RNA-binding protein
  misc_feature (1)..(196): Homolog of NCBI NO: 15235177 NR Description: RNA-binding protein RBP37
  misc_feature (1)..(196): Homolog of NCBI NO: 15223304 NR Description: RNA-binding protein, putative
  misc_feature (1)..(200): Homolog of NCBI NO: 15229132 NR Description: RNA-binding protein, putative; protein id:
MNKRTSLAQKDDVIRRTVYVSDIDQQVTEENLAGVFINCGQVVDCRVCGDPNSVLRFAFIEFTNEEGARAALSMSGTVLGFYPLKVLPSKTAIAPVNPTFLPRSEDEREMCVRTVYCTNIDKRITQIDLKGFFEMLCGEVHRLRLGDYHHQTRIAFVEFAMAESAIAALHCSGIVLGALPIRVSPSKTPVRPHFPRAEFK

SEQ ID NO: 46411 - DNA, 1706 bp, Arabidopsis thaliana; identical to SEQ ID NO: 46320
  misc_feature (1)..(1706): Ceres Seq. ID no. 13591923
  misc_feature: MA Experiment ID: 108576 Result: Down-regulated in Transcription
  misc_feature: MA Experiment 108576 PARAMETER Experiment Name: At_42deg_Heat_cDNA_P Parameter: Temperature (deg C) Value: 42 vs. 22
  misc_feature: MA Experiment 108576 PARAMETER Experiment Name: At_42deg_Heat_cDNA_P Parameter: Timepoint (hr) Value: 1
  misc_feature: MA Experiment 108576 PARAMETER Experiment Name: At_42deg_Heat_cDNA_P Parameter: Tissue Value: Aerial
  misc_feature: MA Experiment ID: 20000306 Result: Up-regulated in Transcription
  misc_feature: MA Experiment 20000306 PARAMETER Experiment Name: At_Germinating_Seeds_Sub_P Parameter: Age (hr) Value: 6 vs. 0
  misc_feature: MA Experiment 20000306 PARAMETER Experiment Name: At_Germinating_Seeds_Sub_P Parameter: Organism Value: A. thaliana
  misc_feature: MA Experiment 20000306 PARAMETER Experiment Name: At_Germinating_Seeds_Sub_P Parameter: Plant Line Value: WS
  misc_feature: MA Experiment 20000306 PARAMETER Experiment Name: At_Germinating_Seeds_Sub_P Parameter: Tissue Value: Germinating Seeds
  misc_feature: MA Experiment ID: 20000307 Result: Up-regulated in Transcription
  misc_feature: MA Experiment 20000307 PARAMETER Experiment Name: At_Germinating_Seeds_Sub_P Parameter: Age (hr) Value: 24 vs. 0
  misc_feature: MA Experiment 20000307 PARAMETER Experiment Name: At_Germinating_Seeds_Sub_P Parameter: Organism Value: A. thaliana
  misc_feature: MA Experiment 20000307 PARAMETER Experiment Name: At_Germinating_Seeds_Sub_P Parameter: Plant Line Value: WS
  misc_feature: MA Experiment 20000307 PARAMETER Experiment Name: At_Germinating_Seeds_Sub_P Parameter: Tissue Value: Germinating Seeds

SEQ ID NO: 46412 - protein, 495 aa, Arabidopsis thaliana; identical to SEQ ID NO: 46321
  peptide (1)..(495): Ceres Seq. ID no. 13591924
  misc_feature (94)..(291): Pfam Name: Tubulin/FtsZ family, GTPase domain Pfam Description: Tubulin/FtsZ family, GTPase domain
  misc_feature (94)..(291): Pfam Name: Tubulin/FtsZ family, GTPase domain Pfam Description: Tubulin/FtsZ family, GTPase domain
  misc_feature (94)..(291): Pfam Name: Tubulin/FtsZ family, GTPase domain Pfam Description: Tubulin/FtsZ family, GTPase domain
  misc_feature (46)..(495): Homolog of NCBI NO: 8928422 NR Description: Tubulin alpha-2 chain
  misc_feature (46)..(495): Homolog of NCBI NO: 17402469 NR Description: alpha-tubulin [Nicotiana tabacum]
  misc_feature (46)..(495): Homolog of NCBI NO: 8928432 NR Description: Tubulin alpha-3 chain
  misc_feature (46)..(495): Homolog of NCBI NO: 15029368 NR Description: alpha tubulin subunit [Rosa hybrid cultivar]
  misc_feature (46)..(495): Homolog of NCBI NO: 29124983 NR Description: alpha-tubulin 1 [Populus tremuloides]
  misc_feature (46)..(495): Homolog of NCBI NO: 8928422 NR Description: Tubulin alpha-2 chain
  misc_feature (46)..(495): Homolog of NCBI NO: 8928432 NR Description: Tubulin alpha-3 chain
  misc_feature (46)..(495): Homolog of NCBI NO: 29124983 NR Description: alpha-tubulin 1 [Populus tremuloides]
  misc_feature (46)..(495): Homolog of NCBI NO: 15029368 NR Description: alpha tubulin subunit [Rosa hybrid cultivar]
  misc_feature (46)..(495): Homolog of NCBI NO: 8928432 NR Description: Tubulin alpha-3 chain
  misc_feature (46)..(495): Homolog of NCBI NO: 17402469 NR Description: alpha-tubulin [Nicotiana tabacum]
  misc_feature (46)..(495): Homolog of NCBI NO: 8928422 NR Description: Tubulin alpha-2 chain
  misc_feature (46)..(495): Homolog of NCBI NO: 15233627 NR Description: tubulin alpha-6 chain (TUA6) [Arabidopsis
  misc_feature (46)..(495): Homolog of NCBI NO: 15220329 NR Description: tubulin alpha-2/alpha-4 chain (TUA4) [Arabidopsis
  misc_feature (46)..(495): Homolog of NCBI NO: 16226462 NR Description: AT4g14960/dl3520c [Arabidopsis thaliana]
  misc_feature (46)..(495): Homolog of NCBI NO: 464849 NR Description: TUBULIN ALPHA CHAIN
  misc_feature (46)..(494): Homolog of NCBI NO: 1174592 NR Description: TUBULIN ALPHA-1 CHAIN
  misc_feature (46)..(495): Homolog of NCBI NO: 15233627 NR Description: tubulin alpha-6 chain (TUA6) [Arabidopsis
  misc_feature (46)..(495): Homolog of NCBI NO: 15220329 NR Description: tubulin alpha-2/alpha-4 chain (TUA4) [Arabidopsis
  misc_feature (46)..(495): Homolog of NCBI NO: 16226462 NR Description: AT4g14960/dl3520c [Arabidopsis thaliana]
  misc_feature (46)..(495): Homolog of NCBI NO: 464849 NR Description: TUBULIN ALPHA CHAIN
  misc_feature (46)..(494): Homolog of NCBI NO: 1174592 NR Description: TUBULIN ALPHA-1 CHAIN
  misc_feature (46)..(495): Homolog of NCBI NO: 29124983 NR Description: alpha-tubulin 1 [Populus tremuloides]
  misc_feature (46)..(495): Homolog of NCBI NO: 15029368 NR Description: alpha tubulin subunit [Rosa hybrid cultivar]
  misc_feature (46)..(495): Homolog of NCBI NO: 17402469 NR Description: alpha-tubulin [Nicotiana tabacum]
  misc_feature (46)..(494): Homolog of NCBI NO: 1174592 NR Description: TUBULIN ALPHA-1 CHAIN
  misc_feature (46)..(495): Homolog of NCBI NO: 464849 NR Description: TUBULIN ALPHA CHAIN
  misc_feature (46)..(495): Homolog of NCBI NO: 16226462 NR Description: AT4g14960/dl3520c [Arabidopsis thaliana]
  misc_feature (46)..(495): Homolog of NCBI NO: 15220329 NR Description: tubulin alpha-2/alpha-4 chain (TUA4) [Arabidopsis
  misc_feature (46)..(495): Homolog of NCBI NO: 15233627 NR Description: tubulin alpha-6 chain (TUA6) [Arabidopsis

SEQ ID NO: 46413 - protein, 450 aa, Arabidopsis thaliana; identical to SEQ ID NO: 46322
  peptide (1)..(450): Ceres Seq. ID no. 13591925
  misc_feature (49)..(246): Pfam Name: Tubulin/FtsZ family, GTPase domain Pfam Description: Tubulin/FtsZ family, GTPase domain
  misc_feature (49)..(246): Pfam Name: Tubulin/FtsZ family, GTPase domain Pfam Description: Tubulin/FtsZ family, GTPase domain
  misc_feature (49)..(246): Pfam Name: Tubulin/FtsZ family, GTPase domain Pfam Description: Tubulin/FtsZ family, GTPase domain
  misc_feature (1)..(450): Homolog of NCBI NO: 8928422 NR Description: Tubulin alpha-2 chain
  misc_feature (1)..(450): Homolog of NCBI NO: 17402469 NR Description: alpha-tubulin [Nicotiana tabacum]
  misc_feature (1)..(450): Homolog of NCBI NO: 8928432 NR Description: Tubulin alpha-3 chain
  misc_feature (1)..(450): Homolog of NCBI NO: 15029368 NR Description: alpha tubulin subunit [Rosa hybrid cultivar]
  misc_feature (1)..(450): Homolog of NCBI NO: 29124983 NR Description: alpha-tubulin 1 [Populus tremuloides]
  misc_feature (1)..(450): Homolog of NCBI NO: 8928422 NR Description: Tubulin alpha-2 chain
  misc_feature (1)..(450): Homolog of NCBI NO: 8928432 NR Description: Tubulin alpha-3 chain
  misc_feature (1)..(450): Homolog of NCBI NO: 29124983 NR Description: alpha-tubulin 1 [Populus tremuloides]
  misc_feature (1)..(450): Homolog of NCBI NO: 15029368 NR Description: alpha tubulin subunit [Rosa hybrid cultivar]
  misc_feature (1)..(450): Homolog of NCBI NO: 8928432 NR Description: Tubulin alpha-3 chain
  misc_feature (1)..(450): Homolog of NCBI NO: 17402469 NR Description: alpha-tubulin [Nicotiana tabacum]
  misc_feature (1)..(450): Homolog of NCBI NO: 8928422 NR Description: Tubulin alpha-2 chain
  misc_feature (1)..(450): Homolog of NCBI NO: 15233627 NR Description: tubulin alpha-6 chain (TUA6) [Arabidopsis
  misc_feature (1)..(450): Homolog of NCBI NO: 15220329 NR Description: tubulin alpha-2/alpha-4 chain (TUA4) [Arabidopsis
  misc_feature (1)..(450): Homolog of NCBI NO: 16226462 NR Description: AT4g14960/dl3520c [Arabidopsis thaliana]
  misc_feature (1)..(450): Homolog of NCBI NO: 464849 NR Description: TUBULIN ALPHA CHAIN
  misc_feature (1)..(449): Homolog of NCBI NO: 1174592 NR Description: TUBULIN ALPHA-1 CHAIN
  misc_feature (1)..(450): Homolog of NCBI NO: 15233627 NR Description: tubulin alpha-6 chain (TUA6) [Arabidopsis
  misc_feature (1)..(450): Homolog of NCBI NO: 15220329 NR Description: tubulin alpha-2/alpha-4 chain (TUA4) [Arabidopsis
  misc_feature (1)..(450): Homolog of NCBI NO: 16226462 NR Description: AT4g14960/dl3520c [Arabidopsis thaliana]
  misc_feature (1)..(450): Homolog of NCBI NO: 464849 NR Description: TUBULIN ALPHA CHAIN
  misc_feature (1)..(449): Homolog of NCBI NO: 1174592 NR Description: TUBULIN ALPHA-1 CHAIN
  misc_feature (1)..(450): Homolog of NCBI NO: 29124983 NR Description: alpha-tubulin 1 [Populus tremuloides]
  misc_feature (1)..(450): Homolog of NCBI NO: 15029368 NR Description: alpha tubulin subunit [Rosa hybrid cultivar]
  misc_feature (1)..(450): Homolog of NCBI NO: 17402469 NR Description: alpha-tubulin [Nicotiana tabacum]
  misc_feature (1)..(449): Homolog of NCBI NO: 1174592 NR Description: TUBULIN ALPHA-1 CHAIN
  misc_feature (1)..(450): Homolog of NCBI NO: 464849 NR Description: TUBULIN ALPHA CHAIN
  misc_feature (1)..(450): Homolog of NCBI NO: 16226462 NR Description: AT4g14960/dl3520c [Arabidopsis thaliana]
  misc_feature (1)..(450): Homolog of NCBI NO: 15220329 NR Description: tubulin alpha-2/alpha-4 chain (TUA4) [Arabidopsis
  misc_feature (1)..(450): Homolog of NCBI NO: 15233627 NR Description: tubulin alpha-6 chain (TUA6) [Arabidopsis

SEQ ID NO: 46414 - protein, 415 aa, Arabidopsis thaliana; identical to SEQ ID NO: 46323
  peptide (1)..(415): Ceres Seq. ID no. 13591926
  misc_feature (14)..(211): Pfam Name: Tubulin/FtsZ family, GTPase domain Pfam Description: Tubulin/FtsZ family, GTPase domain
  misc_feature (14)..(211): Pfam Name: Tubulin/FtsZ family, GTPase domain Pfam Description: Tubulin/FtsZ family, GTPase domain
  misc_feature (14)..(211): Pfam Name: Tubulin/FtsZ family, GTPase domain Pfam Description: Tubulin/FtsZ family, GTPase domain
  misc_feature (1)..(415): Homolog of NCBI NO: 8928422 NR Description: Tubulin alpha-2 chain
  misc_feature (1)..(415): Homolog of NCBI NO: 17402469 NR Description: alpha-tubulin [Nicotiana tabacum]
  misc_feature (1)..(415): Homolog of NCBI NO: 8928432 NR Description: Tubulin alpha-3 chain
  misc_feature (1)..(415): Homolog of NCBI NO: 15029368 NR Description: alpha tubulin subunit [Rosa hybrid cultivar]
  misc_feature (1)..(415): Homolog of NCBI NO: 29124983 NR Description: alpha-tubulin 1 [Populus tremuloides]
  misc_feature (1)..(415): Homolog of NCBI NO: 8928422 NR Description: Tubulin alpha-2 chain
  misc_feature (1)..(415): Homolog of NCBI NO: 8928432 NR Description: Tubulin alpha-3 chain
  misc_feature (1)..(415): Homolog of NCBI NO: 29124983 NR Description: alpha-tubulin 1 [Populus tremuloides]
  misc_feature (1)..(415): Homolog of NCBI NO: 15029368 NR Description: alpha tubulin subunit [Rosa hybrid cultivar]
  misc_feature (1)..(415): Homolog of NCBI NO: 8928432 NR Description: Tubulin alpha-3 chain
  misc_feature (1)..(415): Homolog of NCBI NO: 17402469 NR Description: alpha-tubulin [Nicotiana tabacum]
  misc_feature (1)..(415): Homolog of NCBI NO: 8928422 NR Description: Tubulin alpha-2 chain
  misc_feature (1)..(415): Homolog of NCBI NO: 15233627 NR Description: tubulin alpha-6 chain (TUA6) [Arabidopsis
  misc_feature (1)..(415): Homolog of NCBI NO: 15220329 NR Description: tubulin alpha-2/alpha-4 chain (TUA4) [Arabidopsis
  misc_feature (1)..(415): Homolog of NCBI NO: 16226462 NR Description: AT4g14960/dl3520c [Arabidopsis thaliana]
  misc_feature (1)..(415): Homolog of NCBI NO: 464849 NR Description: TUBULIN ALPHA CHAIN
  misc_feature (1)..(414): Homolog of NCBI NO: 1174592 NR Description: TUBULIN ALPHA-1 CHAIN
  misc_feature (1)..(415): Homolog of NCBI NO: 15233627 NR Description: tubulin alpha-6 chain (TUA6) [Arabidopsis
  misc_feature (1)..(415): Homolog of NCBI NO: 15220329 NR Description: tubulin alpha-2/alpha-4 chain (TUA4) [Arabidopsis
  misc_feature (1)..(415): Homolog of NCBI NO: 16226462 NR Description: AT4g14960/dl3520c [Arabidopsis thaliana]
  misc_feature (1)..(415): Homolog of NCBI NO: 464849 NR Description: TUBULIN ALPHA CHAIN
  misc_feature (1)..(414): Homolog of NCBI NO: 1174592 NR Description: TUBULIN ALPHA-1 CHAIN
  misc_feature (1)..(415): Homolog of NCBI NO: 29124983 NR Description: alpha-tubulin 1 [Populus tremuloides]
  misc_feature (1)..(415): Homolog of NCBI NO: 15029368 NR Description: alpha tubulin subunit [Rosa hybrid cultivar]
  misc_feature (1)..(415): Homolog of NCBI NO: 17402469 NR Description: alpha-tubulin [Nicotiana tabacum]
  misc_feature (1)..(414): Homolog of NCBI NO: 1174592 NR Description: TUBULIN ALPHA-1 CHAIN
  misc_feature (1)..(415): Homolog of NCBI NO: 464849 NR Description: TUBULIN ALPHA CHAIN
  misc_feature (1)..(415): Homolog of NCBI NO: 16226462 NR Description: AT4g14960/dl3520c [Arabidopsis thaliana]
  misc_feature (1)..(415): Homolog of NCBI NO: 15220329 NR Description: tubulin alpha-2/alpha-4 chain (TUA4) [Arabidopsis
  misc_feature (1)..(415): Homolog of NCBI NO: 15233627 NR Description: tubulin alpha-6 chain (TUA6) [Arabidopsis

SEQ ID NO: 46415 - DNA, 3191 bp, Arabidopsis thaliana
  misc_feature (1)..(3191): Ceres Seq. ID no. 13578685
  misc_feature: MA Experiment ID: 20000265 Result: Up-regulated in Transcription
  misc_feature: MA Experiment 20000265 PARAMETER Experiment Name: At_Open_Flower_P Parameter: Age (day) Value: 21
  misc_feature: MA Experiment 20000265 PARAMETER Experiment Name: At_Open_Flower_P Parameter: Plant Line Value: WS
  misc_feature: MA Experiment 20000265 PARAMETER Experiment Name: At_Open_Flower_P Parameter: Tissue Value: Closed Flower vs. Whole Plant
  misc_feature: MA Experiment ID: 20000439 Result: Down-regulated in Transcription
  misc_feature: MA Experiment 20000439 PARAMETER Experiment Name: At_Roots__P Parameter: Age (day) Value: 14 vs. 21
  misc_feature: MA Experiment 20000439 PARAMETER Experiment Name: At_Roots__P Parameter: Organism Value: A. thaliana
  misc_feature: MA Experiment 20000439 PARAMETER Experiment Name: At_Roots__P Parameter: Tissue Value: Roots vs. Whole Plant
  misc_feature: MA Experiment ID: 20000495 Result: Up-regulated in Transcription
  misc_feature: MA Experiment 20000495 PARAMETER Experiment Name: At_Guard_Cells_P Parameter: Harvest Date Value: 8/2/2002
  misc_feature: MA Experiment 20000495 PARAMETER Experiment Name: At_Guard_Cells_P Parameter: Organism Value: A. thaliana
  misc_feature: MA Experiment 20000495 PARAMETER Experiment Name: At_Guard_Cells_P Parameter: Tissue Value: Guard Cells vs. Leaves
  misc_feature: MA Experiment ID: 20000496 Result: Up-regulated in Transcription
  misc_feature: MA Experiment 20000496 PARAMETER Experiment Name: At_Guard_Cells_P Parameter: Harvest Date Value: 7/19/2002
  misc_feature: MA Experiment 20000496 PARAMETER Experiment Name: At_Guard_Cells_P Parameter: Organism Value: Canola
  misc_feature: MA Experiment 20000496 PARAMETER Experiment Name: At_Guard_Cells_P Parameter: Tissue Value: Guard Cells vs. Leaves
gtttcttcttcatggagacttgaaagcttttaaagtatatctaaaaacgcagtcgttttaagactgtgtgtgagaaatggctctgtttagagatattgttcttcttgggtttctcttctgcttgagcttagtagctactgtgacttcagaggagggagcaacgttgctggagattaagaagtcattcaaagatgtgaacaatgttctttatgactggacaacttcaccttcttcggattattgtgtctggagaggtgtgtcttgtgaaaatgtcaccttcaatgttgttgctcttaatttgtcagatttgaatcttgatggagaaatctcacctgctattggagatctcaagagtctcttgtcaattgatctgcgaggtaatcgcttgtctggacaaatccctgatgagattggtgactgttcttctttgcaaaacttagacttatccttcaatgaattaagtggtgacataccgttttcgatttcgaagttgaagcaacttgagcagctgattctgaagaataaccaattgataggaccgatcccttcaacactttcacagattccaaacctgaaaattctggacttggcacagaataaactcagtggtgagataccaagacttatttactggaatgaagttcttcagtatcttgggttgcgaggaaacaacttagtcggtaacatttctccagatttgtgtcaactgactggtctttggtattttgacgtaagaaacaacagtttgactggtagtatacctgagacgataggaaattgcactgccttccaggttttggacttgtcctacaatcagctaactggtgagatcccttttgacatcggcttcctgcaagttgcaacattatcattgcaaggcaatcaactctctgggaagattccatcagtgattggtctcatgcaagcccttgcagtcttagatctaagtggcaacttgttgagtggatctattcctccgattctcggaaatcttactttcaccgagaaattgtatttgcacagtaacaagctgactggttcaattccacctgagcttggaaacatgtcaaaactccattacctggaactcaatgataatcatctcacgggtcatataccaccagagcttgggaagcttactgacttgtttgatctgaatgtggccaacaatgatctggaaggacctatacctgatcatctgagctcttgcacaaatctaaacagcttaaatgttcatgggaacaagtttagtggcactataccccgagcatttcaaaagctagaaagtatgacttaccttaatctgtccagcaacaatatcaaaggtccaatcccggttgagctatctcgtatcggtaacttagatacattggatctttccaacaacaagataaatggaatcattccttcttcccttggtgatttggagcatcttctcaagatgaacttgagtagaaatcatataactggtgtagttccaggcgactttggaaatctaagaagcatcatggaaatagatctttcaaataatgatatctctggcccaattccagaagagcttaaccaattacagaacataattttgctgagactggaaaataataacctgactggtaatgttggttcattagccaactgtctcagtctcactgtattgaatgtatctcataacaacctcgtaggtgatatccctaagaacaataacttctcaagattttcaccagacagcttcattggcaatcctggtctttgcggtagttggctaaactcaccgtgtcatgattctcgtcgaactgtacgagtgtcaatctctagagcagctattcttggaatagctattgggggacttgtgatccttctcatggtcttaatagcagcttgccgaccgcataatcctcctccttttcttgatggatcacttgacaaaccagtaacttattcgacaccgaagctcgtcatccttcatatgaacatggcactccacgtttacgaggatatcatgagaatgacagagaatctaagtgagaagtatatcattgggcacggagcatcaagcactgtatacaaatgtgttttgaagaattgtaaaccggttgcgattaagcggctttactctcacaacccacagtcaatgaaacagtttgaaacagaactcgagatgctaagtagcatcaagcacagaaatcttgtgagcctacaagcttattccctctctcacttggggagtcttctgttctatgactatttggaaaatggtagcctctgggatcttcttcatggccctacgaagaaaaagactcttgattgggacacacggcttaagatagcatatggtgcagcacaaggtttagcttatctacaccatgactgtagtccaaggatcattcacagagacgtgaagtcgtccaacattctcttggacaaagacttagaggctcgtttgacagattttggaatagcgaaaagcttgtgtgtgtcaaagtcacatacttcaacttacgtgatgggcacgataggttacatagaccccgagtatgctcgcacttcacggctcactgagaaatccgatgtctacagttatggaatagtccttcttgagttgttaacccgaaggaaagccgttgatgacgaatccaatctccaccatctgataatgtcaaagacggggaacaatgaagtgatggaaatggcagatccagacatcacatcgacgtgtaaagatctcggtgtggtgaagaaagttttccaactggcactcctatgcaccaaaagacagccgaatgatcgacccacaatgcaccaggtgactcgtgttctcggcagttttatgctatcggaacaaccacctgctgcgactgacacgtcagcgacgctggctggttcgtgctacgtcgatgagtatgcaaatctcaagactcctcattctgtcaattgctcttccatgagtgcttctgatgctcaactgtttcttcggtttggacaagttatttctcagaacagtgagtagtttttcgttaggaggagaatctttaaaacggtatcttttcgttgcgttaagctgttagaaaaattaatgtctcatgtaaagtattatgcactgccttattattattagacaagtgtgtggtgtgaatatgtcttcagactggcacttagacttcctataagttcttgcctatctaagtttttct

SEQ ID NO: 46416 - protein, 976 aa, Arabidopsis thaliana
  peptide (1)..(976): Ceres Seq. ID no. 13578686
  misc_feature (648)..(941): Homolog of NCBI NO: 27497207 NR Description: Hypothetical protein [Oryza sativa (japonica
  misc_feature (12)..(539): Homolog of NCBI NO: 27497207 NR Description: Hypothetical protein [Oryza sativa (japonica
  misc_feature (646)..(930): Homolog of NCBI NO: 15229189 NR Description: leucine-rich repeat transmembrane protein kinase,
  misc_feature (7)..(539): Homolog of NCBI NO: 15229189 NR Description: leucine-rich repeat transmembrane protein kinase,
  misc_feature (73)..(963): Homolog of NCBI NO: 15220056 NR Description: leucine rich repeat protein family [Arabidopsis
  misc_feature (7)..(546): Homolog of NCBI NO: 8809636 NR Description: receptor-like protein kinase [Arabidopsis
  misc_feature (93)..(975): Homolog of NCBI NO: 8809636 NR Description: receptor-like protein kinase [Arabidopsis
  misc_feature (121)..(976): Homolog of NCBI NO: 18390097 NR Description: putative receptor protein kinase [Sorghum bicolor]
  misc_feature (251)..(975): Homolog of NCBI NO: 28140043 NR Description: receptor-like protein kinase [Elaeis guineensis]
  misc_feature (31)..(975): Homolog of NCBI NO: 15240720 NR Description: receptor-related protein kinase [Arabidopsis
  misc_feature (648)..(941): Homolog of NCBI NO: 27497207 NR Description: Hypothetical protein [Oryza sativa (japonica
  misc_feature (12)..(539): Homolog of NCBI NO: 27497207 NR Description: Hypothetical protein [Oryza sativa (japonica
  misc_feature (646)..(930): Homolog of NCBI NO: 15229189 NR Description: leucine-rich repeat transmembrane protein kinase,
  misc_feature (7)..(539): Homolog of NCBI NO: 15229189 NR Description: leucine-rich repeat transmembrane protein kinase,
  misc_feature (73)..(963): Homolog of NCBI NO: 15220056 NR Description: leucine rich repeat protein family [Arabidopsis
  misc_feature (7)..(546): Homolog of NCBI NO: 8809636 NR Description: receptor-like protein kinase [Arabidopsis
  misc_feature (93)..(975): Homolog of NCBI NO: 8809636 NR Description: receptor-like protein kinase [Arabidopsis
  misc_feature (121)..(976): Homolog of NCBI NO: 18390097 NR Description: putative receptor protein kinase [Sorghum bicolor]
  misc_feature (251)..(975): Homolog of NCBI NO: 28140043 NR Description: receptor-like protein kinase [Elaeis guineensis]
  misc_feature (31)..(975): Homolog of NCBI NO: 15240720 NR Description: receptor-related protein kinase [Arabidopsis
MALFRDIVLLGFLFCLSLVATVTSEEGATLLEIKKSFKDVNNVLYDWTTSPSSDYCVWRGVSCENVTFNVVALNLSDLNLDGEISPAIGDLKSLLSIDLRGNRLSGQIPDEIGDCSSLQNLDLSFNELSGDIPFSISKLKQLEQLILKNNQLIGPIPSTLSQIPNLKILDLAQNKLSGEIPRLIYWNEVLQYLGLRGNNLVGNISPDLCQLTGLWYFDVRNNSLTGSIPETIGNCTAFQVLDLSYNQLTGEIPFDIGFLQVATLSLQGNQLSGKIPSVIGLMQALAVLDLSGNLLSGSIPPILGNLTFTEKLYLHSNKLTGSIPPELGNMSKLHYLELNDNHLTGHIPPELGKLTDLFDLNVANNDLEGPIPDHLSSCTNLNSLNVHGNKFSGTIPRAFQKLESMTYLNLSSNNIKGPIPVELSRIGNLDTLDLSNNKINGIIPSSLGDLEHLLKMNLSRNHITGVVPGDFGNLRSIMEIDLSNNDISGPIPEELNQLQNIILLRLENNNLTGNVGSLANCLSLTVLNVSHNNLVGDIPKNNNFSRFSPDSFIGNPGLCGSWLNSPCHDSRRTVRVSISRAAILGIAIGGLVILLMVLIAACRPHNPPPFLDGSLDKPVTYSTPKLVILHMNMALHVYEDIMRMTENLSEKYIIGHGASSTVYKCVLKNCKPVAIKRLYSHNPQSMKQFETELEMLSSIKHRNLVSLQAYSLSHLGSLLFYDYLENGSLWDLLHGPTKKKTLDWDTRLKIAYGAAQGLAYLHHDCSPRIIHRDVKSSNILLDKDLEARLTDFGIAKSLCVSKSHTSTYVMGTIGYIDPEYARTSRLTEKSDVYSYGIVLLELLTRRKAVDDESNLHHLIMSKTGNNEVMEMADPDITSTCKDLGVVKKVFQLALLCTKRQPNDRPTMHQVTRVLGSFMLSEQPPAATDTSATLAGSCYVDEYANLKTPHSVNCSSMSASDAQLFLRFGQVISQNSE

SEQ ID NO: 46417 - protein, 695 aa, Arabidopsis thaliana
  peptide (1)..(695): Ceres Seq. ID no. 13578687
  misc_feature (367)..(660): Homolog of NCBI NO: 27497207 NR Description: Hypothetical protein [Oryza sativa (japonica
  misc_feature (1)..(258): Homolog of NCBI NO: 27497207 NR Description: Hypothetical protein [Oryza sativa (japonica
  misc_feature (365)..(649): Homolog of NCBI NO: 15229189 NR Description: leucine-rich repeat transmembrane protein kinase,
  misc_feature (1)..(258): Homolog of NCBI NO: 15229189 NR Description: leucine-rich repeat transmembrane protein kinase,
  misc_feature (1)..(682): Homolog of NCBI NO: 15220056 NR Description: leucine rich repeat protein family [Arabidopsis
  misc_feature (1)..(265): Homolog of NCBI NO: 8809636 NR Description: receptor-like protein kinase [Arabidopsis
  misc_feature (1)..(694): Homolog of NCBI NO: 8809636 NR Description: receptor-like protein kinase [Arabidopsis
  misc_feature (1)..(695): Homolog of NCBI NO: 18390097 NR Description: putative receptor protein kinase [Sorghum bicolor]
  misc_feature (1)..(694): Homolog of NCBI NO: 28140043 NR Description: receptor-like protein kinase [Elaeis guineensis]
  misc_feature (1)..(694): Homolog of NCBI NO: 15240720 NR Description: receptor-related protein kinase [Arabidopsis
  misc_feature (367)..(660): Homolog of NCBI NO: 27497207 NR Description: Hypothetical protein [Oryza sativa (japonica
  misc_feature (1)..(258): Homolog of NCBI NO: 27497207 NR Description: Hypothetical protein [Oryza sativa (japonica
  misc_feature (365)..(649): Homolog of NCBI NO: 15229189 NR Description: leucine-rich repeat transmembrane protein kinase,
  misc_feature (1)..(258): Homolog of NCBI NO: 15229189 NR Description: leucine-rich repeat transmembrane protein kinase,
  misc_feature (1)..(682): Homolog of NCBI NO: 15220056 NR Description: leucine rich repeat protein family [Arabidopsis
  misc_feature (1)..(265): Homolog of NCBI NO: 8809636 NR Description: receptor-like protein kinase [Arabidopsis
  misc_feature (1)..(694): Homolog of NCBI NO: 8809636 NR Description: receptor-like protein kinase [Arabidopsis
  misc_feature (1)..(695): Homolog of NCBI NO: 18390097 NR Description: putative receptor protein kinase [Sorghum bicolor]
  misc_feature (1)..(694): Homolog of NCBI NO: 28140043 NR Description: receptor-like protein kinase [Elaeis guineensis]
  misc_feature (1)..(694): Homolog of NCBI NO: 15240720 NR Description: receptor-related protein kinase [Arabidopsis
MQALAVLDLSGNLLSGSIPPILGNLTFTEKLYLHSNKLTGSIPPELGNMSKLHYLELNDNHLTGHIPPELGKLTDLFDLNVANNDLEGPIPDHLSSCTNLNSLNVHGNKFSGTIPRAFQKLESMTYLNLSSNNIKGPIPVELSRIGNLDTLDLSNNKINGIIPSSLGDLEHLLKMNLSRNHITGVVPGDFGNLRSIMEIDLSNNDISGPIPEELNQLQNIILLRLENNNLTGNVGSLANCLSLTVLNVSHNNLVGDIPKNNNFSRFSPDSFIGNPGLCGSWLNSPCHDSRRTVRVSISRAAILGIAIGGLVILLMVLIAACRPHNPPPFLDGSLDKPVTYSTPKLVILHMNMALHVYEDIMRMTENLSEKYIIGHGASSTVYKCVLKNCKPVAIKRLYSHNPQSMKQFETELEMLSSIKHRNLVSLQAYSLSHLGSLLFYDYLENGSLWDLLHGPTKKKTLDWDTRLKIAYGAAQGLAYLHHDCSPRIIHRDVKSSNILLDKDLEARLTDFGIAKSLCVSKSHTSTYVMGTIGYIDPEYARTSRLTEKSDVYSYGIVLLELLTRRKAVDDESNLHHLIMSKTGNNEVMEMADPDITSTCKDLGVVKKVFQLALLCTKRQPNDRPTMHQVTRVLGSFMLSEQPPAATDTSATLAGSCYVDEYANLKTPHSVNCSSMSASDAQLFLRFGQVISQNSE

SEQ ID NO: 46418 - protein, 647 aa, Arabidopsis thaliana
  peptide (1)..(647): Ceres Seq. ID no. 13578688
  misc_feature (319)..(612): Homolog of NCBI NO: 27497207 NR Description: Hypothetical protein [Oryza sativa (japonica
  misc_feature (1)..(210): Homolog of NCBI NO: 27497207 NR Description: Hypothetical protein [Oryza sativa (japonica
  misc_feature (317)..(601): Homolog of NCBI NO: 15229189 NR Description: leucine-rich repeat transmembrane protein kinase,
  misc_feature (1)..(210): Homolog of NCBI NO: 15229189 NR Description: leucine-rich repeat transmembrane protein kinase,
  misc_feature (1)..(634): Homolog of NCBI NO: 15220056 NR Description: leucine rich repeat protein family [Arabidopsis
  misc_feature (1)..(217): Homolog of NCBI NO: 8809636 NR Description: receptor-like protein kinase [Arabidopsis
  misc_feature (1)..(646): Homolog of NCBI NO: 8809636 NR Description: receptor-like protein kinase [Arabidopsis
  misc_feature (1)..(647): Homolog of NCBI NO: 18390097 NR Description: putative receptor protein kinase [Sorghum bicolor]
  misc_feature (1)..(646): Homolog of NCBI NO: 28140043 NR Description: receptor-like protein kinase [Elaeis guineensis]
  misc_feature (1)..(646): Homolog of NCBI NO: 15240720 NR Description: receptor-related protein kinase [Arabidopsis
  misc_feature (319)..(612): Homolog of NCBI NO: 27497207 NR Description: Hypothetical protein [Oryza sativa (japonica
  misc_feature (1)..(210): Homolog of NCBI NO: 27497207 NR Description: Hypothetical protein [Oryza sativa (japonica
  misc_feature (317)..(601): Homolog of NCBI NO: 15229189 NR Description: leucine-rich repeat transmembrane protein kinase,
  misc_feature (1)..(210): Homolog of NCBI NO: 15229189 NR Description: leucine-rich repeat transmembrane protein kinase,
  misc_feature (1)..(634): Homolog of NCBI NO: 15220056 NR Description: leucine rich repeat protein family [Arabidopsis
  misc_feature (1)..(217): Homolog of NCBI NO: 8809636 NR Description: receptor-like protein kinase [Arabidopsis
  misc_feature (1)..(646): Homolog of NCBI NO: 8809636 NR Description: receptor-like protein kinase [Arabidopsis
  misc_feature (1)..(647): Homolog of NCBI NO: 18390097 NR Description: putative receptor protein kinase [Sorghum bicolor]
  misc_feature (1)..(646): Homolog of NCBI NO: 28140043 NR Description: receptor-like protein kinase [Elaeis guineensis]
  misc_feature (1)..(646): Homolog of NCBI NO: 15240720 NR Description: receptor-related protein kinase [Arabidopsis
MSKLHYLELNDNHLTGHIPPELGKLTDLFDLNVANNDLEGPIPDHLSSCTNLNSLNVHGNKFSGTIPRAFQKLESMTYLNLSSNNIKGPIPVELSRIGNLDTLDLSNNKINGIIPSSLGDLEHLLKMNLSRNHITGVVPGDFGNLRSIMEIDLSNNDISGPIPEELNQLQNIILLRLENNNLTGNVGSLANCLSLTVLNVSHNNLVGDIPKNNNFSRFSPDSFIGNPGLCGSWLNSPCHDSRRTVRVSISRAAILGIAIGGLVILLMVLIAACRPHNPPPFLDGSLDKPVTYSTPKLVILHMNMALHVYEDIMRMTENLSEKYIIGHGASSTVYKCVLKNCKPVAIKRLYSHNPQSMKQFETELEMLSSIKHRNLVSLQAYSLSHLGSLLFYDYLENGSLWDLLHGPTKKKTLDWDTRLKIAYGAAQGLAYLHHDCSPRIIHRDVKSSNILLDKDLEARLTDFGIAKSLCVSKSHTSTYVMGTIGYIDPEYARTSRLTEKSDVYSYGIVLLELLTRRKAVDDESNLHHLIMSKTGNNEVMEMADPDITSTCKDLGVVKKVFQLALLCTKRQPNDRPTMHQVTRVLGSFMLSEQPPAATDTSATLAGSCYVDEYANLKTPHSVNCSSMSASDAQLFLRFGQVISQNSE

SEQ ID NO: 46419 - DNA, 1664 bp, Arabidopsis thaliana; identical to SEQ ID NO: 26269
  misc_feature (1)..(1664): Ceres Seq. ID no. 13591642
  misc_feature: MA Experiment ID: 108434 Result: Down-regulated in Transcription
  misc_feature: MA Experiment 108434 PARAMETER Experiment Name: At_Root_Tips_cDNA_P Parameter: Tissue Value: Root Tips
  misc_feature: MA Experiment ID: 108462 Result: Up-regulated in Transcription
  misc_feature: MA Experiment 108462 PARAMETER Experiment Name: At_Germinating_Seeds_cDNA_P Parameter: Age (day) Value: 2 vs. 0
  misc_feature: MA Experiment 108462 PARAMETER Experiment Name: At_Germinating_Seeds_cDNA_P Parameter: Tissue Value: Germinating Seeds
  misc_feature: MA Experiment ID: 108463 Result: Up-regulated in Transcription
  misc_feature: MA Experiment 108463 PARAMETER Experiment Name: At_Germinating_Seeds_cDNA_P Parameter: Age (day) Value: 3 vs. 0
  misc_feature: MA Experiment 108463 PARAMETER Experiment Name: At_Germinating_Seeds_cDNA_P Parameter: Tissue Value: Germinating Seeds
  misc_feature: MA Experiment ID: 108595 Result: Down-regulated in Transcription
  misc_feature: MA Experiment 108595 PARAMETER Experiment Name: At_Ler-pi_Ovule_cDNA_P Parameter: Plant Line Value: null
  misc_feature: MA Experiment ID: 20000069 Result: Down-regulated in Transcription
  misc_feature: MA Experiment 20000069 PARAMETER Experiment Name: At_100uM_ABA_Mutants_cDNA_P Parameter: Plant Line Value: CS23
  misc_feature: MA Experiment 20000069 PARAMETER Experiment Name: At_100uM_ABA_Mutants_cDNA_P Parameter: Timepoint (hr) Value: 6
  misc_feature: MA Experiment 20000069 PARAMETER Experiment Name: At_100uM_ABA_Mutants_cDNA_P Parameter: Tissue Value: Aerial
  misc_feature: MA Experiment 20000069 PARAMETER Experiment Name: At_100uM_ABA_Mutants_cDNA_P Parameter: Treatment Value: 100uM ABA vs. No Treatment
  misc_feature: MA Experiment ID: 20000072 Result: Down-regulated in Transcription
  misc_feature: MA Experiment 20000072 PARAMETER Experiment Name: At_100uM_ABA_Mutants_cDNA_P Parameter: Plant Line Value: CS8105
  misc_feature: MA Experiment 20000072 PARAMETER Experiment Name: At_100uM_ABA_Mutants_cDNA_P Parameter: Timepoint (hr) Value: 6
  misc_feature: MA Experiment 20000072 PARAMETER Experiment Name: At_100uM_ABA_Mutants_cDNA_P Parameter: Tissue Value: Aerial
  misc_feature: MA Experiment 20000072 PARAMETER Experiment Name: At_100uM_ABA_Mutants_cDNA_P Parameter: Treatment Value: 100uM ABA vs. No Treatment
  misc_feature: MA Experiment ID: 20000087 Result: Down-regulated in Transcription
  misc_feature: MA Experiment 20000087 PARAMETER Experiment Name: At_100uM_ABA_Mutants_cDNA_P Parameter: Plant Line Value: WS
  misc_feature: MA Experiment 20000087 PARAMETER Experiment Name: At_100uM_ABA_Mutants_cDNA_P Parameter: Timepoint (hr) Value: 6
  misc_feature: MA Experiment 20000087 PARAMETER Experiment Name: At_100uM_ABA_Mutants_cDNA_P Parameter: Tissue Value: Aerial
  misc_feature: MA Experiment 20000087 PARAMETER Experiment Name: At_100uM_ABA_Mutants_cDNA_P Parameter: Treatment Value: 100uM ABA vs. No Treatment
  misc_feature: MA Experiment ID: 20000180 Result: Up-regulated in Transcription
  misc_feature: MA Experiment 20000180 PARAMETER Experiment Name: At_Germinating_Seeds_P Parameter: Age (hr) Value: 24 vs. 0
  misc_feature: MA Experiment 20000180 PARAMETER Experiment Name: At_Germinating_Seeds_P Parameter: Tissue Value: Germinating Seeds
  misc_feature: MA Experiment ID: 20000184 Result: Up-regulated in Transcription
  misc_feature: MA Experiment 20000184 PARAMETER Experiment Name: At_Shoots__P Parameter: Age (day) Value: 7
  misc_feature: MA Experiment 20000184 PARAMETER Experiment Name: At_Shoots__P Parameter: Tissue Value: Shoots vs. Whole Plant
  misc_feature: MA Experiment ID: 20000185 Result: Down-regulated in Transcription
  misc_feature: MA Experiment 20000185 PARAMETER Experiment Name: At_Roots__P Parameter: Age (day) Value: 7 vs. 21
  misc_feature: MA Experiment 20000185 PARAMETER Experiment Name: At_Roots__P Parameter: Organism Value: A. thaliana
  misc_feature: MA Experiment 20000185 PARAMETER Experiment Name: At_Roots__P Parameter: Tissue Value: Roots vs. Whole Plant
  misc_feature: MA Experiment ID: 20000438 Result: Up-regulated in Transcription
  misc_feature: MA Experiment 20000438 PARAMETER Experiment Name: At_Shoots__P Parameter: Age (day) Value: 14
  misc_feature: MA Experiment 20000438 PARAMETER Experiment Name: At_Shoots__P Parameter: Tissue Value: Shoots vs. Whole Plant
  misc_feature: MA Experiment ID: 20000439 Result: Down-regulated in Transcription
  misc_feature: MA Experiment 20000439 PARAMETER Experiment Name: At_Roots__P Parameter: Age (day) Value: 14 vs. 21
  misc_feature: MA Experiment 20000439 PARAMETER Experiment Name: At_Roots__P Parameter: Organism Value: A. thaliana
  misc_feature: MA Experiment 20000439 PARAMETER Experiment Name: At_Roots__P Parameter: Tissue Value: Roots vs. Whole Plant
  misc_feature: MA Experiment ID: 20000794 Result: Down-regulated in Transcription
  misc_feature: MA Experiment 20000794 PARAMETER Experiment Name: At_Petals_P Parameter: Age (day) Value: 23-25 days
  misc_feature: MA Experiment 20000794 PARAMETER Experiment Name: At_Petals_P Parameter: Plant Line Value: WS
  misc_feature: MA Experiment 20000794 PARAMETER Experiment Name: At_Petals_P Parameter: Tissue Value: Petals vs. Whole plant
  misc_feature: MA Experiment ID: 20001905 Result: Down-regulated in Transcription
  misc_feature: MA Experiment 20001905 PARAMETER Experiment Name: At_Drought_Reproduction_P Parameter: Age (day) Value: 40
  misc_feature: MA Experiment 20001905 PARAMETER Experiment Name: At_Drought_Reproduction_P Parameter: Organism Value: A. thaliana
  misc_feature: MA Experiment 20001905 PARAMETER Experiment Name: At_Drought_Reproduction_P Parameter: Plant Line Value: WS
  misc_feature: MA Experiment 20001905 PARAMETER Experiment Name: At_Drought_Reproduction_P Parameter: Timepoint (day) Value: 10
  misc_feature: MA Experiment 20001905 PARAMETER Experiment Name: At_Drought_Reproduction_P Parameter: Tissue Value: Rosettes
  misc_feature: MA Experiment 20001905 PARAMETER Experiment Name: At_Drought_Reproduction_P Parameter: Treatment Value: Drought vs. No Drought
  misc_feature: MA Experiment ID: 20001906 Result: Down-regulated in Transcription
  misc_feature: MA Experiment 20001906 PARAMETER Experiment Name: At_Drought_Reproduction_P Parameter: Age (day) Value: 35
  misc_feature: MA Experiment 20001906 PARAMETER Experiment Name: At_Drought_Reproduction_P Parameter: Organism Value: A. thaliana
  misc_feature: MA Experiment 20001906 PARAMETER Experiment Name: At_Drought_Reproduction_P Parameter: Plant Line Value: WS
  misc_feature: MA Experiment 20001906 PARAMETER Experiment Name: At_Drought_Reproduction_P Parameter: Timepoint (day) Value: 5
  misc_feature: MA Experiment 20001906 PARAMETER Experiment Name: At_Drought_Reproduction_P Parameter: Tissue Value: Siliques
  misc_feature: MA Experiment 20001906 PARAMETER Experiment Name: At_Drought_Reproduction_P Parameter: Treatment Value: Drought vs. No Drought
  misc_feature: MA Experiment ID: 20001908 Result: Down-regulated in Transcription
  misc_feature: MA Experiment 20001908 PARAMETER Experiment Name: At_Drought_Reproduction_P Parameter: Age (day) Value: 40
  misc_feature: MA Experiment 20001908 PARAMETER Experiment Name: At_Drought_Reproduction_P Parameter: Organism Value: A. thaliana
  misc_feature: MA Experiment 20001908 PARAMETER Experiment Name: At_Drought_Reproduction_P Parameter: Plant Line Value: WS
  misc_feature: MA Experiment 20001908 PARAMETER Experiment Name: At_Drought_Reproduction_P Parameter: Timepoint (day) Value: 10
  misc_feature: MA Experiment 20001908 PARAMETER Experiment Name: At_Drought_Reproduction_P Parameter: Tissue Value: Siliques
  misc_feature: MA Experiment 20001908 PARAMETER Experiment Name: At_Drought_Reproduction_P Parameter: Treatment Value: Drought vs. No Drought
  misc_feature: MA Experiment ID: 20001911 Result: Down-regulated in Transcription
  misc_feature: MA Experiment 20001911 PARAMETER Experiment Name: At_Drought_Reproduction_P Parameter: Age (day) Value: 40
  misc_feature: MA Experiment 20001911 PARAMETER Experiment Name: At_Drought_Reproduction_P Parameter: Organism Value: A. thaliana
  misc_feature: MA Experiment 20001911 PARAMETER Experiment Name: At_Drought_Reproduction_P Parameter: Plant Line Value: WS
  misc_feature: MA Experiment 20001911 PARAMETER Experiment Name: At_Drought_Reproduction_P Parameter: Timepoint (day) Value: 10
  misc_feature: MA Experiment 20001911 PARAMETER Experiment Name: At_Drought_Reproduction_P Parameter: Tissue Value: Flowers
  misc_feature: MA Experiment 20001911 PARAMETER Experiment Name: At_Drought_Reproduction_P Parameter: Treatment Value: Drought vs. No Drought

SEQ ID NO: 46420 - protein, 448 aa, Arabidopsis thaliana; identical to SEQ ID NO: 26270
  peptide (1)..(448): Ceres Seq. ID no. 13591643
  misc_feature (152)..(447): Pfam Name: Extensin-like region Pfam Description: Extensin-like region
  misc_feature (152)..(447): Pfam Name: Extensin-like region Pfam Description: Extensin-like region
  misc_feature (152)..(447): Pfam Name: Extensin-like region Pfam Description: Extensin-like region
  misc_feature (152)..(445): Homolog of NCBI NO: 5917664 NR Description: extensin-like protein [Lycopersicon esculentum]
  misc_feature (151)..(434): Homolog of NCBI NO: 7489265 NR Description: proline-rich protein GPP1 - potato
  misc_feature (152)..(448): Homolog of NCBI NO: 7489265 NR Description: proline-rich protein GPP1 - potato
  misc_feature (1)..(286): Homolog of NCBI NO: 7620011 NR Description: proline-rich protein 2 [Arabidopsis thaliana]
  misc_feature (1)..(286): Homolog of NCBI NO: 15226468 NR Description: proline-rich protein family [Arabidopsis
  misc_feature (152)..(445): Homolog of NCBI NO: 5917664 NR Description: extensin-like protein [Lycopersicon esculentum]
  misc_feature (152)..(448): Homolog of NCBI NO: 7489265 NR Description: proline-rich protein GPP1 - potato
  misc_feature (1)..(286): Homolog of NCBI NO: 15226468 NR Description: proline-rich protein family [Arabidopsis
  misc_feature (1)..(286): Homolog of NCBI NO: 7620011 NR Description: proline-rich protein 2 [Arabidopsis thaliana]
  misc_feature (152)..(448): Homolog of NCBI NO: 7489265 NR Description: proline-rich protein GPP1 - potato
  misc_feature (151)..(434): Homolog of NCBI NO: 7489265 NR Description: proline-rich protein GPP1 - potato
  misc_feature (152)..(445): Homolog of NCBI NO: 5917664 NR Description: extensin-like protein [Lycopersicon esculentum]
  misc_feature (1)..(448): Homolog of NCBI NO: 15234785 NR Description: proline-rich protein family [Arabidopsis
  misc_feature (1)..(448): Homolog of NCBI NO: 7620015 NR Description: proline-rich protein 4 [Arabidopsis thaliana]
  misc_feature (1)..(448): Homolog of NCBI NO: 6782442 NR Description: proline-rich protein [Arabidopsis thaliana]
  misc_feature (16)..(446): Homolog of NCBI NO: 7489265 NR Description: proline-rich protein GPP1 - potato
  misc_feature (10)..(448): Homolog of NCBI NO: 7489265 NR Description: proline-rich protein GPP1 - potato
  misc_feature (1)..(448): Homolog of NCBI NO: 15234785 NR Description: proline-rich protein family [Arabidopsis
  misc_feature (1)..(448): Homolog of NCBI NO: 7620015 NR Description: proline-rich protein 4 [Arabidopsis thaliana]
  misc_feature (1)..(448): Homolog of NCBI NO: 6782442 NR Description: proline-rich protein [Arabidopsis thaliana]
  misc_feature (16)..(446): Homolog of NCBI NO: 7489265 NR Description: proline-rich protein GPP1 - potato
  misc_feature (10)..(448): Homolog of NCBI NO: 7489265 NR Description: proline-rich protein GPP1 - potato
  misc_feature (1)..(286): Homolog of NCBI NO: 15226468 NR Description: proline-rich protein family [Arabidopsis
  misc_feature (1)..(286): Homolog of NCBI NO: 7620011 NR Description: proline-rich protein 2 [Arabidopsis thaliana]
  misc_feature (151)..(434): Homolog of NCBI NO: 7489265 NR Description: proline-rich protein GPP1 - potato
  misc_feature (10)..(448): Homolog of NCBI NO: 7489265 NR Description: proline-rich protein GPP1 - potato
  misc_feature (16)..(446): Homolog of NCBI NO: 7489265 NR Description: proline-rich protein GPP1 - potato
  misc_feature (1)..(448): Homolog of NCBI NO: 6782442 NR Description: proline-rich protein [Arabidopsis thaliana]
  misc_feature (1)..(448): Homolog of NCBI NO: 7620015 NR Description: proline-rich protein 4 [Arabidopsis thaliana]
  misc_feature (1)..(448): Homolog of NCBI NO: 15234785 NR Description: proline-rich protein family [Arabidopsis

SEQ ID NO: 46421 - protein, 296 aa, Arabidopsis thaliana; identical to SEQ ID NO: 26271
  peptide (1)..(296): Ceres Seq. ID no. 13591644
  misc_feature (1)..(295): Pfam Name: Extensin-like region Pfam Description: Extensin-like region
  misc_feature (1)..(295): Pfam Name: Extensin-like region Pfam Description: Extensin-like region
  misc_feature (1)..(295): Pfam Name: Extensin-like region Pfam Description: Extensin-like region
  misc_feature (1)..(293): Homolog of NCBI NO: 5917664 NR Description: extensin-like protein [Lycopersicon esculentum]
  misc_feature (1)..(282): Homolog of NCBI NO: 7489265 NR Description: proline-rich protein GPP1 - potato
  misc_feature (1)..(296): Homolog of NCBI NO: 7489265 NR Description: proline-rich protein GPP1 - potato
  misc_feature (1)..(134): Homolog of NCBI NO: 7620011 NR Description: proline-rich protein 2 [Arabidopsis thaliana]
  misc_feature (1)..(134): Homolog of NCBI NO: 15226468 NR Description: proline-rich protein family [Arabidopsis
  misc_feature (1)..(293): Homolog of NCBI NO: 5917664 NR Description: extensin-like protein [Lycopersicon esculentum]
  misc_feature (1)..(296): Homolog of NCBI NO: 7489265 NR Description: proline-rich protein GPP1 - potato
  misc_feature (1)..(134): Homolog of NCBI NO: 15226468 NR Description: proline-rich protein family [Arabidopsis
  misc_feature (1)..(134): Homolog of NCBI NO: 7620011 NR Description: proline-rich protein 2 [Arabidopsis thaliana]
  misc_feature (1)..(296): Homolog of NCBI NO: 7489265 NR Description: proline-rich protein GPP1 - potato
  misc_feature (1)..(282): Homolog of NCBI NO: 7489265 NR Description: proline-rich protein GPP1 - potato
  misc_feature (1)..(293): Homolog of NCBI NO: 5917664 NR Description: extensin-like protein [Lycopersicon esculentum]
  misc_feature (1)..(296): Homolog of NCBI NO: 15234785 NR Description: proline-rich protein family [Arabidopsis
  misc_feature (1)..(296): Homolog of NCBI NO: 7620015 NR Description: proline-rich protein 4 [Arabidopsis thaliana]
  misc_feature (1)..(296): Homolog of NCBI NO: 6782442 NR Description: proline-rich protein [Arabidopsis thaliana]
  misc_feature (1)..(294): Homolog of NCBI NO: 7489265 NR Description: proline-rich protein GPP1 - potato
  misc_feature (1)..(296): Homolog of NCBI NO: 7489265 NR Description: proline-rich protein GPP1 - potato
  misc_feature (1)..(296): Homolog of NCBI NO: 15234785 NR Description: proline-rich protein family [Arabidopsis
  misc_feature (1)..(296): Homolog of NCBI NO: 7620015 NR Description: proline-rich protein 4 [Arabidopsis thaliana]
  misc_feature (1)..(296): Homolog of NCBI NO: 6782442 NR Description: proline-rich protein [Arabidopsis thaliana]
  misc_feature (1)..(294): Homolog of NCBI NO: 7489265 NR Description: proline-rich protein GPP1 - potato
  misc_feature (1)..(296): Homolog of NCBI NO: 7489265 NR Description: proline-rich protein GPP1 - potato
  misc_feature (1)..(134): Homolog of NCBI NO: 15226468 NR Description: proline-rich protein family [Arabidopsis
  misc_feature (1)..(134): Homolog of NCBI NO: 7620011 NR Description: proline-rich protein 2 [Arabidopsis thaliana]
  misc_feature (1)..(282): Homolog of NCBI NO: 7489265 NR Description: proline-rich protein GPP1 - potato
  misc_feature (1)..(296): Homolog of NCBI NO: 7489265 NR Description: proline-rich protein GPP1 - potato
  misc_feature (1)..(294): Homolog of NCBI NO: 7489265 NR Description: proline-rich protein GPP1 - potato
  misc_feature (1)..(296): Homolog of NCBI NO: 6782442 NR Description: proline-rich protein [Arabidopsis thaliana]
  misc_feature (1)..(296): Homolog of NCBI NO: 7620015 NR Description: proline-rich protein 4 [Arabidopsis thaliana]
  misc_feature (1)..(296): Homolog of NCBI NO: 15234785 NR Description: proline-rich protein family [Arabidopsis

SEQ ID NO: 46422 - DNA, 2186 bp, Arabidopsis thaliana; identical to SEQ ID NO: 45056
  misc_feature (1)..(2186): Ceres Seq. ID no. 13575826
  misc_feature: MA Experiment ID: 20000327 Result: Up-regulated in Transcription
  misc_feature: MA Experiment 20000327 PARAMETER Experiment Name: At_42deg_Heat_Sub_P Parameter: Age (day) Value: 14
  misc_feature: MA Experiment 20000327 PARAMETER Experiment Name: At_42deg_Heat_Sub_P Parameter: Organism Value: A. thaliana
  misc_feature: MA Experiment 20000327 PARAMETER Experiment Name: At_42deg_Heat_Sub_P Parameter: Plant Line Value: WS
  misc_feature: MA Experiment 20000327 PARAMETER Experiment Name: At_42deg_Heat_Sub_P Parameter: Temperature (deg C) Value: 42 vs. 22
  misc_feature: MA Experiment 20000327 PARAMETER Experiment Name: At_42deg_Heat_Sub_P Parameter: Timepoint (hr) Value: 1
  misc_feature: MA Experiment 20000327 PARAMETER Experiment Name: At_42deg_Heat_Sub_P Parameter: Tissue Value: Aerial
  misc_feature: MA Experiment ID: 20000328 Result: Up-regulated in Transcription
  misc_feature: MA Experiment 20000328 PARAMETER Experiment Name: At_42deg_Heat_Sub_P Parameter: Age (day) Value: 14
  misc_feature: MA Experiment 20000328 PARAMETER Experiment Name: At_42deg_Heat_Sub_P Parameter: Organism Value: A. thaliana
  misc_feature: MA Experiment 20000328 PARAMETER Experiment Name: At_42deg_Heat_Sub_P Parameter: Plant Line Value: WS
  misc_feature: MA Experiment 20000328 PARAMETER Experiment Name: At_42deg_Heat_Sub_P Parameter: Temperature (deg C) Value: 42 vs. 22
  misc_feature: MA Experiment 20000328 PARAMETER Experiment Name: At_42deg_Heat_Sub_P Parameter: Timepoint (hr) Value: 6
  misc_feature: MA Experiment 20000328 PARAMETER Experiment Name: At_42deg_Heat_Sub_P Parameter: Tissue Value: Aerial

SEQ ID NO: 46423 - protein, 699 aa, Arabidopsis thaliana; identical to SEQ ID NO: 45057
  peptide (1)..(699): Ceres Seq. ID no. 15222635
  misc_feature (184)..(699): Pfam Name: Hsp90 protein Pfam Description: Hsp90 protein
  misc_feature (184)..(699): Pfam Name: Hsp90 protein Pfam Description: Hsp90 protein
  misc_feature (4)..(699): Homolog of NCBI NO: 2239253 NR Description: gp96/GRP94 [Sus scrofa]
  misc_feature (4)..(699): Homolog of NCBI NO: 7441885 NR Description: protein kinase ppk98 (EC 2.7.1.-) precursor,
  misc_feature (4)..(699): Homolog of NCBI NO: 4507677 NR Description: tumor rejection antigen (gp96) 1
  misc_feature (4)..(699): Homolog of NCBI NO: 27807263 NR Description: tumor rejection antigen (gp96) 1 [Bos taurus]
  misc_feature (4)..(699): Homolog of NCBI NO: 119359 NR Description: Endoplasmin precursor (Heat shock 108 kDa
  misc_feature (4)..(699): Homolog of NCBI NO: 2239253 NR Description: gp96/GRP94 [Sus scrofa]
  misc_feature (4)..(699): Homolog of NCBI NO: 4507677 NR Description: tumor rejection antigen (gp96) 1
  misc_feature (4)..(699): Homolog of NCBI NO: 119359 NR Description: Endoplasmin precursor (Heat shock 108 kDa
  misc_feature (211)..(699): Homolog of NCBI NO: 29145077 NR Description: Hspca protein [Mus musculus]
  misc_feature (3)..(280): Homolog of NCBI NO: 29145077 NR Description: Hspca protein [Mus musculus]
  misc_feature (1)..(699): Homolog of NCBI NO: 12005809 NR Description: 90-kDa heat shock protein HSP83 [Spodoptera
  misc_feature (4)..(697): Homolog of NCBI NO: 6755863 NR Description: tumor rejection antigen gp96; tumor rejection
  misc_feature (4)..(697): Homolog of NCBI NO: 14714615 NR Description: tumor rejection antigen gp96 [Mus musculus]
  misc_feature (4)..(699): Homolog of NCBI NO: 27807263 NR Description: tumor rejection antigen (gp96) 1 [Bos taurus]
  misc_feature (4)..(699): Homolog of NCBI NO: 7441885 NR Description: protein kinase ppk98 (EC 2.7.1.-) precursor,
  misc_feature (4)..(697): Homolog of NCBI NO: 14714615 NR Description: tumor rejection antigen gp96 [Mus musculus]
  misc_feature (4)..(697): Homolog of NCBI NO: 6755863 NR Description: tumor rejection antigen gp96; tumor rejection
  misc_feature (1)..(699): Homolog of NCBI NO: 12005809 NR Description: 90-kDa heat shock protein HSP83 [Spodoptera
  misc_feature (3)..(280): Homolog of NCBI NO: 29145077 NR Description: Hspca protein [Mus musculus]
  misc_feature (211)..(699): Homolog of NCBI NO: 29145077 NR Description: Hspca protein [Mus musculus]

SEQ ID NO: 46424 - protein, 615 aa, Arabidopsis thaliana; identical to SEQ ID NO: 45058
  peptide (1)..(615): Ceres Seq. ID no. 15222636
  misc_feature (100)..(615): Pfam Name: Hsp90 protein Pfam Description: Hsp90 protein
  misc_feature (100)..(615): Pfam Name: Hsp90 protein Pfam Description: Hsp90 protein
  misc_feature (1)..(615): Homolog of NCBI NO: 2239253 NR Description: gp96/GRP94 [Sus scrofa]
  misc_feature (1)..(615): Homolog of NCBI NO: 7441885 NR Description: protein kinase ppk98 (EC 2.7.1.-) precursor,
  misc_feature (1)..(615): Homolog of NCBI NO: 4507677 NR Description: tumor rejection antigen (gp96) 1
  misc_feature (1)..(615): Homolog of NCBI NO: 27807263 NR Description: tumor rejection antigen (gp96) 1 [Bos taurus]
  misc_feature (1)..(615): Homolog of NCBI NO: 119359 NR Description: Endoplasmin precursor (Heat shock 108 kDa
  misc_feature (1)..(615): Homolog of NCBI NO: 2239253 NR Description: gp96/GRP94 [Sus scrofa]
  misc_feature (1)..(615): Homolog of NCBI NO: 4507677 NR Description: tumor rejection antigen (gp96) 1
  misc_feature (1)..(615): Homolog of NCBI NO: 119359 NR Description: Endoplasmin precursor (Heat shock 108 kDa
  misc_feature (127)..(615): Homolog of NCBI NO: 29145077 NR Description: Hspca protein [Mus musculus]
  misc_feature (1)..(196): Homolog of NCBI NO: 29145077 NR Description: Hspca protein [Mus musculus]
  misc_feature (1)..(615): Homolog of NCBI NO: 12005809 NR Description: 90-kDa heat shock protein HSP83 [Spodoptera
  misc_feature (1)..(613): Homolog of NCBI NO: 6755863 NR Description: tumor rejection antigen gp96; tumor rejection
  misc_feature (1)..(613): Homolog of NCBI NO: 14714615 NR Description: tumor rejection antigen gp96 [Mus musculus]
  misc_feature (1)..(615): Homolog of NCBI NO: 27807263 NR Description: tumor rejection antigen (gp96) 1 [Bos taurus]
  misc_feature (1)..(615): Homolog of NCBI NO: 7441885 NR Description: protein kinase ppk98 (EC 2.7.1.-) precursor,
  misc_feature (1)..(613): Homolog of NCBI NO: 14714615 NR Description: tumor rejection antigen gp96 [Mus musculus]
  misc_feature (1)..(613): Homolog of NCBI NO: 6755863 NR Description: tumor rejection antigen gp96; tumor rejection
  misc_feature (1)..(615): Homolog of NCBI NO: 12005809 NR Description: 90-kDa heat shock protein HSP83 [Spodoptera
  misc_feature (1)..(196): Homolog of NCBI NO: 29145077 NR Description: Hspca protein [Mus musculus]
  misc_feature (127)..(615): Homolog of NCBI NO: 29145077 NR Description: Hspca protein [Mus musculus]

SEQ ID NO: 46425 - protein, 594 aa, Arabidopsis thaliana; identical to SEQ ID NO: 45059
  peptide (1)..(594): Ceres Seq. ID no. 15222637
  misc_feature (79)..(594): Pfam Name: Hsp90 protein Pfam Description: Hsp90 protein
  misc_feature (79)..(594): Pfam Name: Hsp90 protein Pfam Description: Hsp90 protein
  misc_feature (1)..(594): Homolog of NCBI NO: 2239253 NR Description: gp96/GRP94 [Sus scrofa]
  misc_feature (1)..(594): Homolog of NCBI NO: 7441885 NR Description: protein kinase ppk98 (EC 2.7.1.-) precursor,
  misc_feature (1)..(594): Homolog of NCBI NO: 4507677 NR Description: tumor rejection antigen (gp96) 1
  misc_feature (1)..(594): Homolog of NCBI NO: 27807263 NR Description: tumor rejection antigen (gp96) 1 [Bos taurus]
  misc_feature (1)..(594): Homolog of NCBI NO: 119359 NR Description: Endoplasmin precursor (Heat shock 108 kDa
  misc_feature (1)..(594): Homolog of NCBI NO: 2239253 NR Description: gp96/GRP94 [Sus scrofa]
  misc_feature (1)..(594): Homolog of NCBI NO: 4507677 NR Description: tumor rejection antigen (gp96) 1
  misc_feature (1)..(594): Homolog of NCBI NO: 119359 NR Description: Endoplasmin precursor (Heat shock 108 kDa
  misc_feature (106)..(594): Homolog of NCBI NO: 29145077 NR Description: Hspca protein [Mus musculus]
  misc_feature (1)..(175): Homolog of NCBI NO: 29145077 NR Description: Hspca protein [Mus musculus]
  misc_feature (1)..(594): Homolog of NCBI NO: 12005809 NR Description: 90-kDa heat shock protein HSP83 [Spodoptera
  misc_feature (1)..(592): Homolog of NCBI NO: 6755863 NR Description: tumor rejection antigen gp96; tumor rejection
  misc_feature (1)..(592): Homolog of NCBI NO: 14714615 NR Description: tumor rejection antigen gp96 [Mus musculus]
  misc_feature (1)..(594): Homolog of NCBI NO: 27807263 NR Description: tumor rejection antigen (gp96) 1 [Bos taurus]
  misc_feature (1)..(594): Homolog of NCBI NO: 7441885 NR Description: protein kinase ppk98 (EC 2.7.1.-) precursor,
  misc_feature (1)..(592): Homolog of NCBI NO: 14714615 NR Description: tumor rejection antigen gp96 [Mus musculus]
  misc_feature (1)..(592): Homolog of NCBI NO: 6755863 NR Description: tumor rejection antigen gp96; tumor rejection
  misc_feature (1)..(594): Homolog of NCBI NO: 12005809 NR Description: 90-kDa heat shock protein HSP83 [Spodoptera
  misc_feature (1)..(175): Homolog of NCBI NO: 29145077 NR Description: Hspca protein [Mus musculus]
  misc_feature (106)..(594): Homolog of NCBI NO: 29145077 NR Description: Hspca protein [Mus musculus]

SEQ ID NO: 46426 - DNA, 1698 bp, Arabidopsis thaliana
  misc_feature (1)..(1698): Ceres Seq. ID no. 14309962
  misc_feature: MA Experiment ID: 20000173 Result: Down-regulated in Transcription
  misc_feature: MA Experiment 20000173 PARAMETER Experiment Name: At_42deg_Heat_P Parameter: Age (day) Value: 14
  misc_feature: MA Experiment 20000173 PARAMETER Experiment Name: At_42deg_Heat_P Parameter: Organism Value: A. thaliana
  misc_feature: MA Experiment 20000173 PARAMETER Experiment Name: At_42deg_Heat_P Parameter: Plant Line Value: WS
  misc_feature: MA Experiment 20000173 PARAMETER Experiment Name: At_42deg_Heat_P Parameter: Temperature (deg C) Value: 42 vs. 22
  misc_feature: MA Experiment 20000173 PARAMETER Experiment Name: At_42deg_Heat_P Parameter: Timepoint (hr) Value: 6
  misc_feature: MA Experiment 20000173 PARAMETER Experiment Name: At_42deg_Heat_P Parameter: Tissue Value: Aerial
  misc_feature: MA Experiment ID: 20000184 Result: Down-regulated in Transcription
  misc_feature: MA Experiment 20000184 PARAMETER Experiment Name: At_Shoots__P Parameter: Age (day) Value: 7
  misc_feature: MA Experiment 20000184 PARAMETER Experiment Name: At_Shoots__P Parameter: Tissue Value: Shoots vs. Whole Plant
  misc_feature: MA Experiment ID: 20000234 Result: Down-regulated in Transcription
  misc_feature: MA Experiment 20000234 PARAMETER Experiment Name: At_Siliques_P Parameter: Age (day) Value: 21
  misc_feature: MA Experiment 20000234 PARAMETER Experiment Name: At_Siliques_P Parameter: Organism Value: A. thaliana
  misc_feature: MA Experiment 20000234 PARAMETER Experiment Name: At_Siliques_P Parameter: Plant Line Value: WS
  misc_feature: MA Experiment 20000234 PARAMETER Experiment Name: At_Siliques_P Parameter: Tissue Value: Less Than 5mm Siliques vs. Whole Plant
  misc_feature: MA Experiment ID: 20000235 Result: Down-regulated in Transcription
  misc_feature: MA Experiment 20000235 PARAMETER Experiment Name: At_Siliques_P Parameter: Age (day) Value: 21
  misc_feature: MA Experiment 20000235 PARAMETER Experiment Name: At_Siliques_P Parameter: Organism Value: A. thaliana
  misc_feature: MA Experiment 20000235 PARAMETER Experiment Name: At_Siliques_P Parameter: Plant Line Value: WS
  misc_feature: MA Experiment 20000235 PARAMETER Experiment Name: At_Siliques_P Parameter: Tissue Value: 5-10mm Siliques vs. Whole Plant
  misc_feature: MA Experiment ID: 20000264 Result: Down-regulated in Transcription
  misc_feature: MA Experiment 20000264 PARAMETER Experiment Name: At_Open_Flower_P Parameter: Age (day) Value: 21
  misc_feature: MA Experiment 20000264 PARAMETER Experiment Name: At_Open_Flower_P Parameter: Plant Line Value: WS
  misc_feature: MA Experiment 20000264 PARAMETER Experiment Name: At_Open_Flower_P Parameter: Tissue Value: Open Flower vs. Whole Plant
  misc_feature: MA Experiment ID: 20000265 Result: Down-regulated in Transcription
  misc_feature: MA Experiment 20000265 PARAMETER Experiment Name: At_Open_Flower_P Parameter: Age (day) Value: 21
  misc_feature: MA Experiment 20000265 PARAMETER Experiment Name: At_Open_Flower_P Parameter: Plant Line Value: WS
  misc_feature: MA Experiment 20000265 PARAMETER Experiment Name: At_Open_Flower_P Parameter: Tissue Value: Closed Flower vs. Whole Plant
  misc_feature: MA Experiment ID: 20000286 Result: Down-regulated in Transcription
  misc_feature: MA Experiment 20000286 PARAMETER Experiment Name: At_Open_Flower_P Parameter: Age (day) Value: 21
  misc_feature: MA Experiment 20000286 PARAMETER Experiment Name: At_Open_Flower_P Parameter: Plant Line Value: WS
  misc_feature: MA Experiment 20000286 PARAMETER Experiment Name: At_Open_Flower_P Parameter: Tissue Value: Half Open vs. Whole Plant
  misc_feature: MA Experiment ID: 20000437 Result: Down-regulated in Transcription
  misc_feature: MA Experiment 20000437 PARAMETER Experiment Name: At_Drought_P Parameter: Age (day) Value: 8
  misc_feature: MA Experiment 20000437 PARAMETER Experiment Name: At_Drought_P Parameter: Organism Value: A. thaliana
  misc_feature: MA Experiment 20000437 PARAMETER Experiment Name: At_Drought_P Parameter: Plant Line Value: WS
  misc_feature: MA Experiment 20000437 PARAMETER Experiment Name: At_Drought_P Parameter: Timepoint (hr) Value: 24
  misc_feature: MA Experiment 20000437 PARAMETER Experiment Name: At_Drought_P Parameter: Tissue Value: Whole Plant
  misc_feature: MA Experiment 20000437 PARAMETER Experiment Name: At_Drought_P Parameter: Treatment Value: Drought vs. No Drought
  misc_feature: MA Experiment ID: 20000573 Result: Down-regulated in Transcription
  misc_feature: MA Experiment 20000573 PARAMETER Experiment Name: At_100uM_ABA_Mutants__P Parameter: Organism Value: A. thaliana
  misc_feature: MA Experiment 20000573 PARAMETER Experiment Name: At_100uM_ABA_Mutants__P Parameter: Plant Line Value: CS22 vs. Ler wt
  misc_feature: MA Experiment 20000573 PARAMETER Experiment Name: At_100uM_ABA_Mutants__P Parameter: Timepoint (hr) Value: N/A
  misc_feature: MA Experiment 20000573 PARAMETER Experiment Name: At_100uM_ABA_Mutants__P Parameter: Tissue Value: Whole Plant
  misc_feature: MA Experiment 20000573 PARAMETER Experiment Name: At_100uM_ABA_Mutants__P Parameter: Treatment Value: None
  misc_feature: MA Experiment ID: 20000574 Result: Down-regulated in Transcription
  misc_feature: MA Experiment 20000574 PARAMETER Experiment Name: At_100uM_ABA_Mutants__P Parameter: Organism Value: A. thaliana
  misc_feature: MA Experiment 20000574 PARAMETER Experiment Name: At_100uM_ABA_Mutants__P Parameter: Plant Line Value: CS23 vs. Ler wt
  misc_feature: MA Experiment 20000574 PARAMETER Experiment Name: At_100uM_ABA_Mutants__P Parameter: Timepoint (hr) Value: N/A
  misc_feature: MA Experiment 20000574 PARAMETER Experiment Name: At_100uM_ABA_Mutants__P Parameter: Tissue Value: Whole Plant
  misc_feature: MA Experiment 20000574 PARAMETER Experiment Name: At_100uM_ABA_Mutants__P Parameter: Treatment Value: None
  misc_feature: MA Experiment ID: 20000794 Result: Down-regulated in Transcription
  misc_feature: MA Experiment 20000794 PARAMETER Experiment Name: At_Petals_P Parameter: Age (day) Value: 23-25 days
  misc_feature: MA Experiment 20000794 PARAMETER Experiment Name: At_Petals_P Parameter: Plant Line Value: WS
  misc_feature: MA Experiment 20000794 PARAMETER Experiment Name: At_Petals_P Parameter: Tissue Value: Petals vs. Whole plant
  misc_feature: MA Experiment ID: 20001248 Result: Down-regulated in Transcription
  misc_feature: MA Experiment 20001248 PARAMETER Experiment Name: At_Far-red-induction_P Parameter: Age (day) Value: 7
  misc_feature: MA Experiment 20001248 PARAMETER Experiment Name: At_Far-red-induction_P Parameter: Light Value: Far-red vs. White
  misc_feature: MA Experiment 20001248 PARAMETER Experiment Name: At_Far-red-induction_P Parameter: Organism Value: A. thaliana
  misc_feature: MA Experiment 20001248 PARAMETER Experiment Name: At_Far-red-induction_P Parameter: Plant Line Value: Columbia
  misc_feature: MA Experiment 20001248 PARAMETER Experiment Name: At_Far-red-induction_P Parameter: Timepoint (hr) Value: 4
  misc_feature: MA Experiment 20001248 PARAMETER Experiment Name: At_Far-red-induction_P Parameter: Tissue Value: Whole Plant
  misc_feature: MA Experiment ID: 20001450 Result: Down-regulated in Transcription
  misc_feature: MA Experiment 20001450 PARAMETER Experiment Name: At_Far-red-induction_P Parameter: Age (day) Value: 7
  misc_feature: MA Experiment 20001450 PARAMETER Experiment Name: At_Far-red-induction_P Parameter: Light Value: Far-red vs. White
  misc_feature: MA Experiment 20001450 PARAMETER Experiment Name: At_Far-red-induction_P Parameter: Organism Value: A. thaliana
  misc_feature: MA Experiment 20001450 PARAMETER Experiment Name: At_Far-red-induction_P Parameter: Plant Line Value: Columbia
  misc_feature: MA Experiment 20001450 PARAMETER Experiment Name: At_Far-red-induction_P Parameter: Timepoint (hr) Value: 8
  misc_feature: MA Experiment 20001450 PARAMETER Experiment Name: At_Far-red-induction_P Parameter: Tissue Value: Whole Plant
  misc_feature: MA Experiment ID: 20001451 Result: Down-regulated in Transcription
  misc_feature: MA Experiment 20001451 PARAMETER Experiment Name: At_Far-red-induction_P Parameter: Age (day) Value: 7
  misc_feature: MA Experiment 20001451 PARAMETER Experiment Name: At_Far-red-induction_P Parameter: Light Value: Far-red vs. White
  misc_feature: MA Experiment 20001451 PARAMETER Experiment Name: At_Far-red-induction_P Parameter: Organism Value: A. thaliana
  misc_feature: MA Experiment 20001451 PARAMETER Experiment Name: At_Far-red-induction_P Parameter: Plant Line Value: Columbia
  misc_feature: MA Experiment 20001451 PARAMETER Experiment Name: At_Far-red-induction_P Parameter: Timepoint (hr) Value: 24
  misc_feature: MA Experiment 20001451 PARAMETER Experiment Name: At_Far-red-induction_P Parameter: Tissue Value: Whole Plant
  misc_feature: MA Experiment ID: 20001557 Result: Up-regulated in Transcription
  misc_feature: MA Experiment 20001557 PARAMETER Experiment Name: At_Drought_Soil_Dry_P Parameter: Age (day) Value: 27
  misc_feature: MA Experiment 20001557 PARAMETER Experiment Name: At_Drought_Soil_Dry_P Parameter: Organism Value: A. thaliana
  misc_feature: MA Experiment 20001557 PARAMETER Experiment Name: At_Drought_Soil_Dry_P Parameter: Plant Line Value: WS
  misc_feature: MA Experiment 20001557 PARAMETER Experiment Name: At_Drought_Soil_Dry_P Parameter: Post Timepoint (hr) Value: 3
  misc_feature: MA Experiment 20001557 PARAMETER Experiment Name: At_Drought_Soil_Dry_P Parameter: Post-Treatment Value: Re-Water vs. No Drought
  misc_feature: MA Experiment 20001557 PARAMETER Experiment Name: At_Drought_Soil_Dry_P Parameter: Timepoint (day) Value: 13
  misc_feature: MA Experiment 20001557 PARAMETER Experiment Name: At_Drought_Soil_Dry_P Parameter: Treatment Value: Drought vs. No Drought
agatttgagtctactcgttttttcttatctatcgcaaaacaaactctcccgtcgtcaccattcgattacgggagtgtaatggctcttatacaatttggaagttcatgtgttgctcaatgggggattcttcgtcctcggtttgctgttaaagctttttatccaagcagattggagtctcaccatgacaattgcatcagccaaataaattgtctgggagcttcaaggtcgagtatgtttgcacagggctctttacccttcttgtcattgacgggagtatctcctaatacattctcgtagaggagctcgcttcactgttagagctgatactgatttctattctgtccttggagtctcgaaaaatgcaaccaaagctgagattaaaagcgcttatcggaagctcgctaggagttatcatccagatgtgaacaaggatgctggggcagaagataaatttaaagaaataagtaatgcatatgagatcttatcagatgatgagaaaagatctctatacgacagatatggcgaggcaggagttaaaggcgctggaatgggaggcatgggggattatagtaatccgtttgatctatttgagtcattattcgaaggaatgggtgggatgggaggaatgggcggtggaatgggtagtagaggctcaaggagcagagctatcgatggtgaagatgagtattactcactaatcttgaatttcaaagaagcggttttcggtattgagaaagaaattgagatatctcggttagagagctgtgggacttgcaatggttctggagctaaagcgggaaccaaaccaaccaaatgcaaaacatgtggcgggcaaggacaggtggtagcatcaacgaggacaccactcggtgtattccaacaagtgatgacttgctctccgtgtaacggaactggggagatatcaaaaccgtgtggtgcatgctcaggagatggacgtgtgagaaggacaaagcggattagtcttaaagttcctgcgggtgtggattctggaagtaggttaagagtgaggggagaagggaatgcaggaaagagaggtggatcaccgggagatctctttgcggttattgaggttattccagatccggttttgaagcgtgatgatacaaatatactttatacgtgtaagatatcgtatgtagatgccatattggggacgactttgaggtaccaacagtggatggagaggtggatttgaaagtaccggcagggacacaaccaagcacgacattggtgatggctaaaaaaggagttccggttttgaataagagcaagatgagaggtgatcagttagtgagagtgcaagttgagattcctaagagattgagtaaagaagagaagatgcttgttgaggagctggctgatatgagcaagaacaaggtagctaatagcaggagataaaccaacacacaatattagtgaaatgtgatattatatagattcatcgttctctgcttgtcttctttctaatggttcttctaatgatggagaagataagcaagaggaagaagaaagaattattaggtgagaggaaaatctgaagaactctgtttttgggttttcctcttcaatttttgtgttttacttttaaaacaaattttatgggtttatcaggattcagggtaggtcttgattgtattgtactgctatttttatacatttgaatcttcttttcttatt

SEQ ID NO: 46427 - protein, 222 aa, Arabidopsis thaliana
  peptide (1)..(222): Ceres Seq. ID no. 14309963
  misc_feature (156)..(213): Pfam Name: DnaJ C terminal region Pfam Description: DnaJ C terminal region
  misc_feature (1)..(213): Homolog of NCBI NO: 14326568 NR Description: At1g80030/F18B13_37 [Arabidopsis thaliana]
  misc_feature (1)..(213): Homolog of NCBI NO: 18412605 NR Description: DnaJ protein, putative [Arabidopsis thaliana]
  misc_feature (1)..(213): Homolog of NCBI NO: 7441921 NR Description: heat shock protein dnaJ - garden pea
  misc_feature (1)..(213): Homolog of NCBI NO: 16326131 NR Description: DNAJ homologue [Oryza sativa]
  misc_feature (1)..(213): Homolog of NCBI NO: 25296019 NR Description: probable DnaJ protein [imported] - Arabidopsis
  misc_feature (1)..(213): Homolog of NCBI NO: 21536561 NR Description: putative DnaJ protein [Arabidopsis thaliana]
  misc_feature (1)..(213): Homolog of NCBI NO: 30794072 NR Description: putative DnaJ protein [Arabidopsis thaliana]
  misc_feature (1)..(213): Homolog of NCBI NO: 18399949 NR Description: DnaJ protein, putative [Arabidopsis thaliana]
  misc_feature (1)..(213): Homolog of NCBI NO: 7441920 NR Description: heat shock protein T5J17.130, dnaJ-type -
  misc_feature (1)..(213): Homolog of NCBI NO: 18420568 NR Description: DnaJ protein, putative [Arabidopsis thaliana]
MGGMGDYSNPFDLFESLFEGMGGMGGMGGGMGSRGSRSRAIDGEDEYYSLILNFKEAVFGIEKEIEISRLESCGTCNGSGAKAGTKPTKCKTCGGQGQVVASTRTPLGVFQQVMTCSPCNGTGEISKPCGACSGDGRVRRTKRISLKVPAGVDSGSRLRVRGEGNAGKRGGSPGDLFAVIEVIPDPVLKRDDTNILYTCKISYVDAILGTTLRYQQWMERWI

SEQ ID NO: 46428 - protein, 219 aa, Arabidopsis thaliana
  peptide (1)..(219): Ceres Seq. ID no. 14309964
  misc_feature (153)..(210): Pfam Name: DnaJ C terminal region Pfam Description: DnaJ C terminal region
  misc_feature (1)..(210): Homolog of NCBI NO: 14326568 NR Description: At1g80030/F18B13_37 [Arabidopsis thaliana]
  misc_feature (1)..(210): Homolog of NCBI NO: 18412605 NR Description: DnaJ protein, putative [Arabidopsis thaliana]
  misc_feature (1)..(210): Homolog of NCBI NO: 7441921 NR Description: heat shock protein dnaJ - garden pea
  misc_feature (1)..(210): Homolog of NCBI NO: 16326131 NR Description: DNAJ homologue [Oryza sativa]
  misc_feature (1)..(210): Homolog of NCBI NO: 25296019 NR Description: probable DnaJ protein [imported] - Arabidopsis
  misc_feature (1)..(210): Homolog of NCBI NO: 21536561 NR Description: putative DnaJ protein [Arabidopsis thaliana]
  misc_feature (1)..(210): Homolog of NCBI NO: 30794072 NR Description: putative DnaJ protein [Arabidopsis thaliana]
  misc_feature (1)..(210): Homolog of NCBI NO: 18399949 NR Description: DnaJ protein, putative [Arabidopsis thaliana]
  misc_feature (1)..(210): Homolog of NCBI NO: 7441920 NR Description: heat shock protein T5J17.130, dnaJ-type -
  misc_feature (1)..(210): Homolog of NCBI NO: 18420568 NR Description: DnaJ protein, putative [Arabidopsis thaliana]
MGDYSNPFDLFESLFEGMGGMGGMGGGMGSRGSRSRAIDGEDEYYSLILNFKEAVFGIEKEIEISRLESCGTCNGSGAKAGTKPTKCKTCGGQGQVVASTRTPLGVFQQVMTCSPCNGTGEISKPCGACSGDGRVRRTKRISLKVPAGVDSGSRLRVRGEGNAGKRGGSPGDLFAVIEVIPDPVLKRDDTNILYTCKISYVDAILGTTLRYQQWMERWI

SEQ ID NO: 46429 - protein, 202 aa, Arabidopsis thaliana
  peptide (1)..(202): Ceres Seq. ID no. 14309965
  misc_feature (136)..(193): Pfam Name: DnaJ C terminal region Pfam Description: DnaJ C terminal region
  misc_feature (1)..(193): Homolog of NCBI NO: 14326568 NR Description: At1g80030/F18B13_37 [Arabidopsis thaliana]
  misc_feature (1)..(193): Homolog of NCBI NO: 18412605 NR Description: DnaJ protein, putative [Arabidopsis thaliana]
  misc_feature (1)..(193): Homolog of NCBI NO: 7441921 NR Description: heat shock protein dnaJ - garden pea
  misc_feature (1)..(193): Homolog of NCBI NO: 16326131 NR Description: DNAJ homologue [Oryza sativa]
  misc_feature (1)..(193): Homolog of NCBI NO: 25296019 NR Description: probable DnaJ protein [imported] - Arabidopsis
  misc_feature (1)..(193): Homolog of NCBI NO: 21536561 NR Description: putative DnaJ protein [Arabidopsis thaliana]
  misc_feature (1)..(193): Homolog of NCBI NO: 30794072 NR Description: putative DnaJ protein [Arabidopsis thaliana]
  misc_feature (1)..(193): Homolog of NCBI NO: 18399949 NR Description: DnaJ protein, putative [Arabidopsis thaliana]
  misc_feature (1)..(193): Homolog of NCBI NO: 7441920 NR Description: heat shock protein T5J17.130, dnaJ-type -
  misc_feature (1)..(193): Homolog of NCBI NO: 18420568 NR Description: DnaJ protein, putative [Arabidopsis thaliana]
MGGMGGMGGGMGSRGSRSRAIDGEDEYYSLILNFKEAVFGIEKEIEISRLESCGTCNGSGAKAGTKPTKCKTCGGQGQVVASTRTPLGVFQQVMTCSPCNGTGEISKPCGACSGDGRVRRTKRISLKVPAGVDSGSRLRVRGEGNAGKRGGSPGDLFAVIEVIPDPVLKRDDTNILYTCKISYVDAILGTTLRYQQWMERWI

SEQ ID NO: 46430 - DNA, 1152 bp, Arabidopsis thaliana
  misc_feature (1)..(1152): Ceres Seq. ID no. 12576001
  misc_feature: MA Experiment ID: 20000328 Result: Down-regulated in Transcription
  misc_feature: MA Experiment 20000328 PARAMETER Experiment Name: At_42deg_Heat_Sub_P Parameter: Age (day) Value: 14
  misc_feature: MA Experiment 20000328 PARAMETER Experiment Name: At_42deg_Heat_Sub_P Parameter: Organism Value: A. thaliana
  misc_feature: MA Experiment 20000328 PARAMETER Experiment Name: At_42deg_Heat_Sub_P Parameter: Plant Line Value: WS
  misc_feature: MA Experiment 20000328 PARAMETER Experiment Name: At_42deg_Heat_Sub_P Parameter: Temperature (deg C) Value: 42 vs. 22
  misc_feature: MA Experiment 20000328 PARAMETER Experiment Name: At_42deg_Heat_Sub_P Parameter: Timepoint (hr) Value: 6
  misc_feature: MA Experiment 20000328 PARAMETER Experiment Name: At_42deg_Heat_Sub_P Parameter: Tissue Value: Aerial
  misc_feature: MA Experiment ID: 20000348 Result: Up-regulated in Transcription
  misc_feature: MA Experiment 20000348 PARAMETER Experiment Name: At_100uM_ABA_Sub_P Parameter: Age (day) Value: 14
  misc_feature: MA Experiment 20000348 PARAMETER Experiment Name: At_100uM_ABA_Sub_P Parameter: Organism Value: A. thaliana
  misc_feature: MA Experiment 20000348 PARAMETER Experiment Name: At_100uM_ABA_Sub_P Parameter: Plant Line Value: WS
  misc_feature: MA Experiment 20000348 PARAMETER Experiment Name: At_100uM_ABA_Sub_P Parameter: Timepoint (hr) Value: 1
  misc_feature: MA Experiment 20000348 PARAMETER Experiment Name: At_100uM_ABA_Sub_P Parameter: Tissue Value: Aerial
  misc_feature: MA Experiment 20000348 PARAMETER Experiment Name: At_100uM_ABA_Sub_P Parameter: Treatment Value: 100uM ABA vs. No Treatment
gacgaggttcccaactttttcaccactggctcctctgtgattgattccattcccgtctaaaatatctcagatctcagatttcagatctctcagttcaactttctcattcatcacagatcatagtgtacgaagatggcggctatggcggcgaagcttcatatatcgacgaaatcggatcagagcaatgtgcgattgcctagactgatcaacctgtcgcgtgatccaaccgctagagtcttgtttccacgaaacggatcagtttcttcgctccacaccaacttctcttctccaaatataatggttccatgcgccggaggtggtggtggtggaagcatcggtaatcacggcggtggaagtggaagcggaggaggtggtggtggttatggaggttcagaagaagaagaatcgtctccatggggaccattagggttatttatccaaggatggagatcacgagttgcagctgattctcaattccctttcaaggtactaatggaaatgcttgttggtgttagcgccaatgtacttggcgacatggcttcacgccctaatttcggattgaacgagctagatttcgtcttctccactctcgttgtaggttcgattctcaatttcacactcatgtacctcttagctccttctgcaatatctcatggatcctccaatttgttgcctggaatctttagaagctgtccttcgagccatatgtttgaacagggtaacttcacccttatgaaccgttttgggactcttgtgtacaaaggaatggtttttgctaccgtgggattagctgcaggtcttgttggaaccgctatctctaacgggttgatcatgctgaggaaaaagattgatccgagcttcgaaacgccgaacaaaccaccacctacgctgctgaattctttaacttgggcaacgcatatgggagtgagcgccaatgtgaggtaccaaacgttgaatggggctgaattcttgctggaaaagtcattgccgccattggtgtttaaaacaagtgtgattgctttgagggttgtgaacaatgttttgggaggaatgtcgtttgttacattggcgaggatgactggatcacagtcggtggaggaggagaagaagatagagatgtcagagatatcagagaaggagaaagaggattga

SEQ ID NO: 46431 - protein, 339 aa, Arabidopsis thaliana
  peptide (1)..(339): Ceres Seq. ID no. 12576002
  misc_feature (91)..(319): Homolog of NCBI NO: 15242979 NR Description: putative protein
  misc_feature (51)..(103): Homolog of NCBI NO: 34900644 NR Description: hypothetical protein~similar to Arabidopsis
  misc_feature (91)..(319): Homolog of NCBI NO: 34900644 NR Description: hypothetical protein~similar to Arabidopsis
  misc_feature (61)..(120): Homolog of NCBI NO: 30687286 NR Description: expressed protein [Arabidopsis thaliana]
  misc_feature (96)..(319): Homolog of NCBI NO: 30687286 NR Description: expressed protein [Arabidopsis thaliana]
  misc_feature (51)..(103): Homolog of NCBI NO: 34395170 NR Description: chloroplast lumen common protein family-like
  misc_feature (91)..(319): Homolog of NCBI NO: 34395170 NR Description: chloroplast lumen common protein family-like
  misc_feature (21)..(338): Homolog of NCBI NO: 34909204 NR Description: P0425G02.25 [Oryza sativa (japonica
  misc_feature (1)..(339): Homolog of NCBI NO: 15231951 NR Description: unknown protein
  misc_feature (1)..(339): Homolog of NCBI NO: 15231950 NR Description: unknown protein; protein id: At3g08630.1
MAAMAAKLHISTKSDQSNVRLPRLINLSRDPTARVLFPRNGSVSSLHTNFSSPNIMVPCAGGGGGGSIGNHGGGSGSGGGGGGYGGSEEEESSPWGPLGLFIQGWRSRVAADSQFPFKVLMEMLVGVSANVLGDMASRPNFGLNELDFVFSTLVVGSILNFTLMYLLAPSAISHGSSNLLPGIFRSCPSSHMFEQGNFTLMNRFGTLVYKGMVFATVGLAAGLVGTAISNGLIMLRKKIDPSFETPNKPPPTLLNSLTWATHMGVSANVRYQTLNGAEFLLEKSLPPLVFKTSVIALRVVNNVLGGMSFVTLARMTGSQSVEEEKKIEMSEISEKEKED

SEQ ID NO: 46432 - protein, 336 aa, Arabidopsis thaliana
  peptide (1)..(336): Ceres Seq. ID no. 12576003
  misc_feature (88)..(316): Homolog of NCBI NO: 15242979 NR Description: putative protein
  misc_feature (48)..(100): Homolog of NCBI NO: 34900644 NR Description: hypothetical protein~similar to Arabidopsis
  misc_feature (88)..(316): Homolog of NCBI NO: 34900644 NR Description: hypothetical protein~similar to Arabidopsis
  misc_feature (58)..(117): Homolog of NCBI NO: 30687286 NR Description: expressed protein [Arabidopsis thaliana]
  misc_feature (93)..(316): Homolog of NCBI NO: 30687286 NR Description: expressed protein [Arabidopsis thaliana]
  misc_feature (48)..(100): Homolog of NCBI NO: 34395170 NR Description: chloroplast lumen common protein family-like
  misc_feature (88)..(316): Homolog of NCBI NO: 34395170 NR Description: chloroplast lumen common protein family-like
  misc_feature (18)..(335): Homolog of NCBI NO: 34909204 NR Description: P0425G02.25 [Oryza sativa (japonica
  misc_feature (1)..(336): Homolog of NCBI NO: 15231951 NR Description: unknown protein
  misc_feature (1)..(336): Homolog of NCBI NO: 15231950 NR Description: unknown protein; protein id: At3g08630.1
MAAKLHISTKSDQSNVRLPRLINLSRDPTARVLFPRNGSVSSLHTNFSSPNIMVPCAGGGGGGSIGNHGGGSGSGGGGGGYGGSEEEESSPWGPLGLFIQGWRSRVAADSQFPFKVLMEMLVGVSANVLGDMASRPNFGLNELDFVFSTLVVGSILNFTLMYLLAPSAISHGSSNLLPGIFRSCPSSHMFEQGNFTLMNRFGTLVYKGMVFATVGLAAGLVGTAISNGLIMLRKKIDPSFETPNKPPPTLLNSLTWATHMGVSANVRYQTLNGAEFLLEKSLPPLVFKTSVIALRVVNNVLGGMSFVTLARMTGSQSVEEEKKIEMSEISEKEKED

SEQ ID NO: 46433 - protein, 284 aa, Arabidopsis thaliana
  peptide (1)..(284): Ceres Seq. ID no. 12576004
  misc_feature (36)..(264): Homolog of NCBI NO: 15242979 NR Description: putative protein
  misc_feature (1)..(48): Homolog of NCBI NO: 34900644 NR Description: hypothetical protein~similar to Arabidopsis
  misc_feature (36)..(264): Homolog of NCBI NO: 34900644 NR Description: hypothetical protein~similar to Arabidopsis
  misc_feature (6)..(65): Homolog of NCBI NO: 30687286 NR Description: expressed protein [Arabidopsis thaliana]
  misc_feature (41)..(264): Homolog of NCBI NO: 30687286 NR Description: expressed protein [Arabidopsis thaliana]
  misc_feature (1)..(48): Homolog of NCBI NO: 34395170 NR Description: chloroplast lumen common protein family-like
  misc_feature (36)..(264): Homolog of NCBI NO: 34395170 NR Description: chloroplast lumen common protein family-like
  misc_feature (1)..(283): Homolog of NCBI NO: 34909204 NR Description: P0425G02.25 [Oryza sativa (japonica
  misc_feature (1)..(284): Homolog of NCBI NO: 15231951 NR Description: unknown protein
  misc_feature (1)..(284): Homolog of NCBI NO: 15231950 NR Description: unknown protein; protein id: At3g08630.1
MVPCAGGGGGGSIGNHGGGSGSGGGGGGYGGSEEEESSPWGPLGLFIQGWRSRVAADSQFPFKVLMEMLVGVSANVLGDMASRPNFGLNELDFVFSTLVVGSILNFTLMYLLAPSAISHGSSNLLPGIFRSCPSSHMFEQGNFTLMNRFGTLVYKGMVFATVGLAAGLVGTAISNGLIMLRKKIDPSFETPNKPPPTLLNSLTWATHMGVSANVRYQTLNGAEFLLEKSLPPLVFKTSVIALRVVNNVLGGMSFVTLARMTGSQSVEEEKKIEMSEISEKEKED

SEQ ID NO: 46434 - DNA, 2255 bp, Arabidopsis thaliana
  misc_feature (1)..(2255): Ceres Seq. ID no. 14310031
  misc_feature: MA Experiment ID: 20000171 Result: Up-regulated in Transcription
  misc_feature: MA Experiment 20000171 PARAMETER Experiment Name: At_42deg_Heat_P Parameter: Age (day) Value: 14
  misc_feature: MA Experiment 20000171 PARAMETER Experiment Name: At_42deg_Heat_P Parameter: Organism Value: A. thaliana
  misc_feature: MA Experiment 20000171 PARAMETER Experiment Name: At_42deg_Heat_P Parameter: Plant Line Value: WS
  misc_feature: MA Experiment 20000171 PARAMETER Experiment Name: At_42deg_Heat_P Parameter: Temperature (deg C) Value: 42 vs. 22
  misc_feature: MA Experiment 20000171 PARAMETER Experiment Name: At_42deg_Heat_P Parameter: Timepoint (hr) Value: 1
  misc_feature: MA Experiment 20000171 PARAMETER Experiment Name: At_42deg_Heat_P Parameter: Tissue Value: Aerial
  misc_feature: MA Experiment ID: 20000173 Result: Up-regulated in Transcription
  misc_feature: MA Experiment 20000173 PARAMETER Experiment Name: At_42deg_Heat_P Parameter: Age (day) Value: 14
  misc_feature: MA Experiment 20000173 PARAMETER Experiment Name: At_42deg_Heat_P Parameter: Organism Value: A. thaliana
  misc_feature: MA Experiment 20000173 PARAMETER Experiment Name: At_42deg_Heat_P Parameter: Plant Line Value: WS
  misc_feature: MA Experiment 20000173 PARAMETER Experiment Name: At_42deg_Heat_P Parameter: Temperature (deg C) Value: 42 vs. 22
  misc_feature: MA Experiment 20000173 PARAMETER Experiment Name: At_42deg_Heat_P Parameter: Timepoint (hr) Value: 6
  misc_feature: MA Experiment 20000173 PARAMETER Experiment Name: At_42deg_Heat_P Parameter: Tissue Value: Aerial
  misc_feature: MA Experiment ID: 20000184 Result: Down-regulated in Transcription
  misc_feature: MA Experiment 20000184 PARAMETER Experiment Name: At_Shoots__P Parameter: Age (day) Value: 7
  misc_feature: MA Experiment 20000184 PARAMETER Experiment Name: At_Shoots__P Parameter: Tissue Value: Shoots vs. Whole Plant
  misc_feature: MA Experiment ID: 20001451 Result: Down-regulated in Transcription
  misc_feature: MA Experiment 20001451 PARAMETER Experiment Name: At_Far-red-induction_P Parameter: Age (day) Value: 7
  misc_feature: MA Experiment 20001451 PARAMETER Experiment Name: At_Far-red-induction_P Parameter: Light Value: Far-red vs. White
  misc_feature: MA Experiment 20001451 PARAMETER Experiment Name: At_Far-red-induction_P Parameter: Organism Value: A. thaliana
  misc_feature: MA Experiment 20001451 PARAMETER Experiment Name: At_Far-red-induction_P Parameter: Plant Line Value: Columbia
  misc_feature: MA Experiment 20001451 PARAMETER Experiment Name: At_Far-red-induction_P Parameter: Timepoint (hr) Value: 24
  misc_feature: MA Experiment 20001451 PARAMETER Experiment Name: At_Far-red-induction_P Parameter: Tissue Value: Whole Plant
  misc_feature: MA Experiment ID: 20001557 Result: Up-regulated in Transcription
  misc_feature: MA Experiment 20001557 PARAMETER Experiment Name: At_Drought_Soil_Dry_P Parameter: Age (day) Value: 27
  misc_feature: MA Experiment 20001557 PARAMETER Experiment Name: At_Drought_Soil_Dry_P Parameter: Organism Value: A. thaliana
  misc_feature: MA Experiment 20001557 PARAMETER Experiment Name: At_Drought_Soil_Dry_P Parameter: Plant Line Value: WS
  misc_feature: MA Experiment 20001557 PARAMETER Experiment Name: At_Drought_Soil_Dry_P Parameter: Post Timepoint (hr) Value: 3
  misc_feature: MA Experiment 20001557 PARAMETER Experiment Name: At_Drought_Soil_Dry_P Parameter: Post-Treatment Value: Re-Water vs. No Drought
  misc_feature: MA Experiment 20001557 PARAMETER Experiment Name: At_Drought_Soil_Dry_P Parameter: Timepoint (day) Value: 13
  misc_feature: MA Experiment 20001557 PARAMETER Experiment Name: At_Drought_Soil_Dry_P Parameter: Treatment Value: Drought vs. No Drought
gagaaccttctttttccggcgagggaaaagcttcctcagccctaatcgctaaatcgatgaaattatgctcccaacgtttaacggtttaaagatcattccaaaaactcaaccttttgcgtgtctcctctcgccatgaccctaatctcaagatttttgatctctagagtgattagtagaactctgttttcgaatcagaataatagaacagctattaatgtttctgtaaagttgccacaattcagaattcagagtaatggatatcacacattgggtcttcttcataatgttaaaggaaggtttttaggtagtaatcatcatcagcttgcgcgtaggagctattcgattgcagttgcgagtaatgtagttaagcaacatgctcaagtctcttggggaaggcttgtacagagagtaactctgagtcgtagttggaacttacctcggataagtcagattgctcaagcgtgtagcttgtctttagcccgttcgcacttcttgttacctggtttattggctcttacctatagacaagtggcgtatgcgcaaagggtggttccaaatcctgtggtctattctccttcacacatttctccttataggagttcgataaacttccctatcgttctctcgtctttagtgttttctgcggtcaagggtgttgttctgaacgggagagctctttatttagcaattttgttttctccaaatgttattatggcgttgttgggatttgcttgcgggcctcgttacagacagctgcagtatgaggtcctccatcgaactctggagaaagcaggtcctgcttttatcaaatttggtcaatggattgctacgcgacctgatcggtttaataaggatttgtgtttgcagctttcaaagcttcacagtaatgctcctgagcacagttttgcgttcaccaaaaagagcattgaaaatgcatttggtcgtaaactctctgagatatttgaggaatttgatgaggcgccagtggcatctgggagtatagctcaagtacaccgagcttccttgaagtttcagtatgcaggacaaaaggtgaagtcctcggaagttgctgtgaaagttagacatccttgtgttgaggaaacgatgaagcgagattttgtgataattaatttcgtggcgaggctaaccacttttattccggggttaaattggcttagattggacgagtgtgtgcaacagtttagtgtctacatgttgtcccaagttgatctctcaagggaagcttctcatttgagtcggtttatatataacttccgtggatggaaagatgtctcttttcctaagcccatctatcctctaatacatcccgctgttttagtcgagacgtatgagcacggagagagtgtggctcgttatgttgatggctccgaaggacaagaaaaacttaaggctaaagtagctcatatcggaactaatgctctcttgaaaatgctcctggtcgacaacttcattcatgcagatatgcatcctgggaatattcttgtccggccaaacaatactagaagaggtctattcagatcgaggaagccacacatcgttttcctagatgtgggcatgactgcagaactttcaaaaactgaccgagataacctactcggatttttcaaggccgttgcacgtagagacggccggactgctgctgaacgaacacttaaattatctaaacaacagaattgtcctgatccacaggcctttatcaaggaagtagaagaagcatttacattctggggaacagaggaaggggatctagtccatccagcggattgtatgcacgaactattcgagaaaatgaggagtcatagagttaatatcgacggcaatgtgtccaccgtcatgtttacaacattagttctcgagggttggcaacggaaactggatccaggatacgatgtgatgcgtacgctacaaacaatgctgctgaaaacggattggatgaaatcactttcttacacgatcgatggacttatggctccgtagattgaaaaggttcaatctttgattcttttacccatttaacacttgagagccacatttttgttttgttgccttaggatgtgaagaagaaccaaaacatatattttagagaaaaacaaaggaaaagtcctttactgttttgtcttcttcttatcttttgcttattctttgattattctttttgctagaaattggaattcttcatcattctaaaacagagaatttgtattttgggtatatatcagttttgaatttcctcg

SEQ ID NO: 46435 - protein, 621 aa, Arabidopsis thaliana
  peptide (1)..(621): Ceres Seq. ID no. 14310032
  misc_feature (267)..(393): Pfam Name: ABC1 family Pfam Description: ABC1 family
  misc_feature (472)..(595): Homolog of NCBI NO: 32409949 NR Description: hypothetical protein [Neurospora crassa]
  misc_feature (282)..(459): Homolog of NCBI NO: 32409949 NR Description: hypothetical protein [Neurospora crassa]
  misc_feature (180)..(296): Homolog of NCBI NO: 32261307 NR Description: aarF domain containing kinase 2
  misc_feature (475)..(603): Homolog of NCBI NO: 32261307 NR Description: aarF domain containing kinase 2
  misc_feature (288)..(480): Homolog of NCBI NO: 32261307 NR Description: aarF domain containing kinase 2
  misc_feature (67)..(606): Homolog of NCBI NO: 34394005 NR Description: putative ubiquinone biosynthesis protein AarF
  misc_feature (54)..(621): Homolog of NCBI NO: 32488318 NR Description: OSJNBa0015K02.12 [Oryza sativa (japonica
  misc_feature (54)..(621): Homolog of NCBI NO: 19387282 NR Description: putative 62.8 kDa protein [Oryza sativa (japonica
  misc_feature (194)..(621): Homolog of NCBI NO: 30682208 NR Description: hypethetical 62.8 KD protein in SSE1-CAR1
  misc_feature (194)..(621): Homolog of NCBI NO: 25404331 NR Description: hypothetical protein T25B24.1 [imported] -
MTLISRFLISRVISRTLFSNQNNRTAINVSVKLPQFRIQSNGYHTLGLLHNVKGRFLGSNHHQLARRSYSIAVASNVVKQHAQVSWGRLVQRVTLSRSWNLPRISQIAQACSLSLARSHFLLPGLLALTYRQVAYAQRVVPNPVVYSPSHISPYRSSINFPIVLSSLVFSAVKGVVLNGRALYLAILFSPNVIMALLGFACGPRYRQLQYEVLHRTLEKAGPAFIKFGQWIATRPDRFNKDLCLQLSKLHSNAPEHSFAFTKKSIENAFGRKLSEIFEEFDEAPVASGSIAQVHRASLKFQYAGQKVKSSEVAVKVRHPCVEETMKRDFVIINFVARLTTFIPGLNWLRLDECVQQFSVYMLSQVDLSREASHLSRFIYNFRGWKDVSFPKPIYPLIHPAVLVETYEHGESVARYVDGSEGQEKLKAKVAHIGTNALLKMLLVDNFIHADMHPGNILVRPNNTRRGLFRSRKPHIVFLDVGMTAELSKTDRDNLLGFFKAVARRDGRTAAERTLKLSKQQNCPDPQAFIKEVEEAFTFWGTEEGDLVHPADCMHELFEKMRSHRVNIDGNVSTVMFTTLVLEGWQRKLDPGYDVMRTLQTMLLKTDWMKSLSYTIDGLMAP

SEQ ID NO: 46436 - protein, 428 aa, Arabidopsis thaliana
  peptide (1)..(428): Ceres Seq. ID no. 14310033
  misc_feature (74)..(200): Pfam Name: ABC1 family Pfam Description: ABC1 family
  misc_feature (279)..(402): Homolog of NCBI NO: 32409949 NR Description: hypothetical protein [Neurospora crassa]
  misc_feature (89)..(266): Homolog of NCBI NO: 32409949 NR Description: hypothetical protein [Neurospora crassa]
  misc_feature (1)..(103): Homolog of NCBI NO: 32261307 NR Description: aarF domain containing kinase 2
  misc_feature (282)..(410): Homolog of NCBI NO: 32261307 NR Description: aarF domain containing kinase 2
  misc_feature (95)..(287): Homolog of NCBI NO: 32261307 NR Description: aarF domain containing kinase 2
  misc_feature (1)..(413): Homolog of NCBI NO: 34394005 NR Description: putative ubiquinone biosynthesis protein AarF
  misc_feature (1)..(428): Homolog of NCBI NO: 32488318 NR Description: OSJNBa0015K02.12 [Oryza sativa (japonica
  misc_feature (1)..(428): Homolog of NCBI NO: 19387282 NR Description: putative 62.8 kDa protein [Oryza sativa (japonica
  misc_feature (1)..(428): Homolog of NCBI NO: 30682208 NR Description: hypethetical 62.8 KD protein in SSE1-CAR1
  misc_feature (1)..(428): Homolog of NCBI NO: 25404331 NR Description: hypothetical protein T25B24.1 [imported] -
MALLGFACGPRYRQLQYEVLHRTLEKAGPAFIKFGQWIATRPDRFNKDLCLQLSKLHSNAPEHSFAFTKKSIENAFGRKLSEIFEEFDEAPVASGSIAQVHRASLKFQYAGQKVKSSEVAVKVRHPCVEETMKRDFVIINFVARLTTFIPGLNWLRLDECVQQFSVYMLSQVDLSREASHLSRFIYNFRGWKDVSFPKPIYPLIHPAVLVETYEHGESVARYVDGSEGQEKLKAKVAHIGTNALLKMLLVDNFIHADMHPGNILVRPNNTRRGLFRSRKPHIVFLDVGMTAELSKTDRDNLLGFFKAVARRDGRTAAERTLKLSKQQNCPDPQAFIKEVEEAFTFWGTEEGDLVHPADCMHELFEKMRSHRVNIDGNVSTVMFTTLVLEGWQRKLDPGYDVMRTLQTMLLKTDWMKSLSYTIDGLMAP

SEQ ID NO: 46437 - DNA, 2369 bp, Arabidopsis thaliana
  misc_feature (1)..(2369): Ceres Seq. ID no. 12574176
  misc_feature: MA Experiment ID: 20000173 Result: Down-regulated in Transcription
  misc_feature: MA Experiment 20000173 PARAMETER Experiment Name: At_42deg_Heat_P Parameter: Age (day) Value: 14
  misc_feature: MA Experiment 20000173 PARAMETER Experiment Name: At_42deg_Heat_P Parameter: Organism Value: A. thaliana
  misc_feature: MA Experiment 20000173 PARAMETER Experiment Name: At_42deg_Heat_P Parameter: Plant Line Value: WS
  misc_feature: MA Experiment 20000173 PARAMETER Experiment Name: At_42deg_Heat_P Parameter: Temperature (deg C) Value: 42 vs. 22
  misc_feature: MA Experiment 20000173 PARAMETER Experiment Name: At_42deg_Heat_P Parameter: Timepoint (hr) Value: 6
  misc_feature: MA Experiment 20000173 PARAMETER Experiment Name: At_42deg_Heat_P Parameter: Tissue Value: Aerial
  misc_feature: MA Experiment ID: 20000234 Result: Down-regulated in Transcription
  misc_feature: MA Experiment 20000234 PARAMETER Experiment Name: At_Siliques_P Parameter: Age (day) Value: 21
  misc_feature: MA Experiment 20000234 PARAMETER Experiment Name: At_Siliques_P Parameter: Organism Value: A. thaliana
  misc_feature: MA Experiment 20000234 PARAMETER Experiment Name: At_Siliques_P Parameter: Plant Line Value: WS
  misc_feature: MA Experiment 20000234 PARAMETER Experiment Name: At_Siliques_P Parameter: Tissue Value: Less Than 5mm Siliques vs. Whole Plant
  misc_feature: MA Experiment ID: 20000235 Result: Down-regulated in Transcription
  misc_feature: MA Experiment 20000235 PARAMETER Experiment Name: At_Siliques_P Parameter: Age (day) Value: 21
  misc_feature: MA Experiment 20000235 PARAMETER Experiment Name: At_Siliques_P Parameter: Organism Value: A. thaliana
  misc_feature: MA Experiment 20000235 PARAMETER Experiment Name: At_Siliques_P Parameter: Plant Line Value: WS
  misc_feature: MA Experiment 20000235 PARAMETER Experiment Name: At_Siliques_P Parameter: Tissue Value: 5-10mm Siliques vs. Whole Plant
  misc_feature: MA Experiment ID: 20000264 Result: Down-regulated in Transcription
  misc_feature: MA Experiment 20000264 PARAMETER Experiment Name: At_Open_Flower_P Parameter: Age (day) Value: 21
  misc_feature: MA Experiment 20000264 PARAMETER Experiment Name: At_Open_Flower_P Parameter: Plant Line Value: WS
  misc_feature: MA Experiment 20000264 PARAMETER Experiment Name: At_Open_Flower_P Parameter: Tissue Value: Open Flower vs. Whole Plant
  misc_feature: MA Experiment ID: 20000265 Result: Down-regulated in Transcription
  misc_feature: MA Experiment 20000265 PARAMETER Experiment Name: At_Open_Flower_P Parameter: Age (day) Value: 21
  misc_feature: MA Experiment 20000265 PARAMETER Experiment Name: At_Open_Flower_P Parameter: Plant Line Value: WS
  misc_feature: MA Experiment 20000265 PARAMETER Experiment Name: At_Open_Flower_P Parameter: Tissue Value: Closed Flower vs. Whole Plant
  misc_feature: MA Experiment ID: 20000268 Result: Down-regulated in Transcription
  misc_feature: MA Experiment 20000268 PARAMETER Experiment Name: At_100mM_NaCl__P Parameter: Age (day) Value: 14
  misc_feature: MA Experiment 20000268 PARAMETER Experiment Name: At_100mM_NaCl__P Parameter: Organism Value: A. thaliana
  misc_feature: MA Experiment 20000268 PARAMETER Experiment Name: At_100mM_NaCl__P Parameter: Plant Line Value: WS
  misc_feature: MA Experiment 20000268 PARAMETER Experiment Name: At_100mM_NaCl__P Parameter: Timepoint (hr) Value: 6
  misc_feature: MA Experiment 20000268 PARAMETER Experiment Name: At_100mM_NaCl__P Parameter: Tissue Value: Whole Plant
  misc_feature: MA Experiment 20000268 PARAMETER Experiment Name: At_100mM_NaCl__P Parameter: Treatment Value: 100mM NaCl vs. No Treatment
  misc_feature: MA Experiment ID: 20000286 Result: Down-regulated in Transcription
  misc_feature: MA Experiment 20000286 PARAMETER Experiment Name: At_Open_Flower_P Parameter: Age (day) Value: 21
  misc_feature: MA Experiment 20000286 PARAMETER Experiment Name: At_Open_Flower_P Parameter: Plant Line Value: WS
  misc_feature: MA Experiment 20000286 PARAMETER Experiment Name: At_Open_Flower_P Parameter: Tissue Value: Half Open vs. Whole Plant
  misc_feature: MA Experiment ID: 20000438 Result: Down-regulated in Transcription
  misc_feature: MA Experiment 20000438 PARAMETER Experiment Name: At_Shoots__P Parameter: Age (day) Value: 14
  misc_feature: MA Experiment 20000438 PARAMETER Experiment Name: At_Shoots__P Parameter: Tissue Value: Shoots vs. Whole Plant
  misc_feature: MA Experiment ID: 20000495 Result: Down-regulated in Transcription
  misc_feature: MA Experiment 20000495 PARAMETER Experiment Name: At_Guard_Cells_P Parameter: Harvest Date Value: 8/2/2002
  misc_feature: MA Experiment 20000495 PARAMETER Experiment Name: At_Guard_Cells_P Parameter: Organism Value: A. thaliana
  misc_feature: MA Experiment 20000495 PARAMETER Experiment Name: At_Guard_Cells_P Parameter: Tissue Value: Guard Cells vs. Leaves
  misc_feature: MA Experiment ID: 20000709 Result: Up-regulated in Transcription
  misc_feature: MA Experiment 20000709 PARAMETER Experiment Name: At_15mM_NH4NO3_L-to-H_P Parameter: Age (hr) Value: 14
  misc_feature: MA Experiment 20000709 PARAMETER Experiment Name: At_15mM_NH4NO3_L-to-H_P Parameter: Organism Value: A. thaliana
  misc_feature: MA Experiment 20000709 PARAMETER Experiment Name: At_15mM_NH4NO3_L-to-H_P Parameter: Plant Line Value: WS
  misc_feature: MA Experiment 20000709 PARAMETER Experiment Name: At_15mM_NH4NO3_L-to-H_P Parameter: Timepoint (hr) Value: 4
  misc_feature: MA Experiment 20000709 PARAMETER Experiment Name: At_15mM_NH4NO3_L-to-H_P Parameter: Tissue Value: Aerial
  misc_feature: MA Experiment 20000709 PARAMETER Experiment Name: At_15mM_NH4NO3_L-to-H_P Parameter: Treatment Value: 15mM NH4NO3 vs. 30mM Mannitol
  misc_feature: MA Experiment ID: 20000794 Result: Down-regulated in Transcription
  misc_feature: MA Experiment 20000794 PARAMETER Experiment Name: At_Petals_P Parameter: Age (day) Value: 23-25 days
  misc_feature: MA Experiment 20000794 PARAMETER Experiment Name: At_Petals_P Parameter: Plant Line Value: WS
  misc_feature: MA Experiment 20000794 PARAMETER Experiment Name: At_Petals_P Parameter: Tissue Value: Petals vs. Whole plant
  misc_feature: MA Experiment ID: 20001248 Result: Up-regulated in Transcription
  misc_feature: MA Experiment 20001248 PARAMETER Experiment Name: At_Far-red-induction_P Parameter: Age (day) Value: 7
  misc_feature: MA Experiment 20001248 PARAMETER Experiment Name: At_Far-red-induction_P Parameter: Light Value: Far-red vs. White
  misc_feature: MA Experiment 20001248 PARAMETER Experiment Name: At_Far-red-induction_P Parameter: Organism Value: A. thaliana
  misc_feature: MA Experiment 20001248 PARAMETER Experiment Name: At_Far-red-induction_P Parameter: Plant Line Value: Columbia
  misc_feature: MA Experiment 20001248 PARAMETER Experiment Name: At_Far-red-induction_P Parameter: Timepoint (hr) Value: 4
  misc_feature: MA Experiment 20001248 PARAMETER Experiment Name: At_Far-red-induction_P Parameter: Tissue Value: Whole Plant
  misc_feature: MA Experiment ID: 20001450 Result: Up-regulated in Transcription
  misc_feature: MA Experiment 20001450 PARAMETER Experiment Name: At_Far-red-induction_P Parameter: Age (day) Value: 7
  misc_feature: MA Experiment 20001450 PARAMETER Experiment Name: At_Far-red-induction_P Parameter: Light Value: Far-red vs. White
  misc_feature: MA Experiment 20001450 PARAMETER Experiment Name: At_Far-red-induction_P Parameter: Organism Value: A. thaliana
  misc_feature: MA Experiment 20001450 PARAMETER Experiment Name: At_Far-red-induction_P Parameter: Plant Line Value: Columbia
  misc_feature: MA Experiment 20001450 PARAMETER Experiment Name: At_Far-red-induction_P Parameter: Timepoint (hr) Value: 8
  misc_feature: MA Experiment 20001450 PARAMETER Experiment Name: At_Far-red-induction_P Parameter: Tissue Value: Whole Plant
  misc_feature: MA Experiment ID: 20001451 Result: Up-regulated in Transcription
  misc_feature: MA Experiment 20001451 PARAMETER Experiment Name: At_Far-red-induction_P Parameter: Age (day) Value: 7
  misc_feature: MA Experiment 20001451 PARAMETER Experiment Name: At_Far-red-induction_P Parameter: Light Value: Far-red vs. White
  misc_feature: MA Experiment 20001451 PARAMETER Experiment Name: At_Far-red-induction_P Parameter: Organism Value: A. thaliana
  misc_feature: MA Experiment 20001451 PARAMETER Experiment Name: At_Far-red-induction_P Parameter: Plant Line Value: Columbia
  misc_feature: MA Experiment 20001451 PARAMETER Experiment Name: At_Far-red-induction_P Parameter: Timepoint (hr) Value: 24
  misc_feature: MA Experiment 20001451 PARAMETER Experiment Name: At_Far-red-induction_P Parameter: Tissue Value: Whole Plant
  misc_feature: MA Experiment ID: 20001556 Result: Down-regulated in Transcription
  misc_feature: MA Experiment 20001556 PARAMETER Experiment Name: At_Drought_Soil_Dry_P Parameter: Age (day) Value: 26
  misc_feature: MA Experiment 20001556 PARAMETER Experiment Name: At_Drought_Soil_Dry_P Parameter: Organism Value: A. thaliana
  misc_feature: MA Experiment 20001556 PARAMETER Experiment Name: At_Drought_Soil_Dry_P Parameter: Plant Line Value: WS
  misc_feature: MA Experiment 20001556 PARAMETER Experiment Name: At_Drought_Soil_Dry_P Parameter: Post Timepoint (hr) Value: None
  misc_feature: MA Experiment 20001556 PARAMETER Experiment Name: At_Drought_Soil_Dry_P Parameter: Post-Treatment Value: None
  misc_feature: MA Experiment 20001556 PARAMETER Experiment Name: At_Drought_Soil_Dry_P Parameter: Timepoint (day) Value: 12
  misc_feature: MA Experiment 20001556 PARAMETER Experiment Name: At_Drought_Soil_Dry_P Parameter: Treatment Value: Drought vs. No Drought
  misc_feature: MA Experiment ID: 20001558 Result: Up-regulated in Transcription
  misc_feature: MA Experiment 20001558 PARAMETER Experiment Name: At_Drought_Soil_Dry_P Parameter: Age (day) Value: 27
  misc_feature: MA Experiment 20001558 PARAMETER Experiment Name: At_Drought_Soil_Dry_P Parameter: Organism Value: A. thaliana
  misc_feature: MA Experiment 20001558 PARAMETER Experiment Name: At_Drought_Soil_Dry_P Parameter: Plant Line Value: WS
  misc_feature: MA Experiment 20001558 PARAMETER Experiment Name: At_Drought_Soil_Dry_P Parameter: Post Timepoint (hr) Value: 6
  misc_feature: MA Experiment 20001558 PARAMETER Experiment Name: At_Drought_Soil_Dry_P Parameter: Post-Treatment Value: Re-Water vs. No Drought
  misc_feature: MA Experiment 20001558 PARAMETER Experiment Name: At_Drought_Soil_Dry_P Parameter: Timepoint (day) Value: 13
  misc_feature: MA Experiment 20001558 PARAMETER Experiment Name: At_Drought_Soil_Dry_P Parameter: Treatment Value: Drought vs. No Drought
  misc_feature: MA Experiment ID: 20001560 Result: Up-regulated in Transcription
  misc_feature: MA Experiment 20001560 PARAMETER Experiment Name: At_Drought_Soil_Dry_P Parameter: Age (day) Value: 28
  misc_feature: MA Experiment 20001560 PARAMETER Experiment Name: At_Drought_Soil_Dry_P Parameter: Organism Value: A. thaliana
  misc_feature: MA Experiment 20001560 PARAMETER Experiment Name: At_Drought_Soil_Dry_P Parameter: Plant Line Value: WS
  misc_feature: MA Experiment 20001560 PARAMETER Experiment Name: At_Drought_Soil_Dry_P Parameter: Post Timepoint (hr) Value: None
  misc_feature: MA Experiment 20001560 PARAMETER Experiment Name: At_Drought_Soil_Dry_P Parameter: Post-Treatment Value: None
  misc_feature: MA Experiment 20001560 PARAMETER Experiment Name: At_Drought_Soil_Dry_P Parameter: Timepoint (day) Value: 14
  misc_feature: MA Experiment 20001560 PARAMETER Experiment Name: At_Drought_Soil_Dry_P Parameter: Treatment Value: Drought vs. No Drought
  misc_feature: MA Experiment ID: 20001910 Result: Down-regulated in Transcription
  misc_feature: MA Experiment 20001910 PARAMETER Experiment Name: At_Drought_Reproduction_P Parameter: Age (day) Value: 37
  misc_feature: MA Experiment 20001910 PARAMETER Experiment Name: At_Drought_Reproduction_P Parameter: Organism Value: A. thaliana
  misc_feature: MA Experiment 20001910 PARAMETER Experiment Name: At_Drought_Reproduction_P Parameter: Plant Line Value: WS
  misc_feature: MA Experiment 20001910 PARAMETER Experiment Name: At_Drought_Reproduction_P Parameter: Timepoint (day) Value: 7
  misc_feature: MA Experiment 20001910 PARAMETER Experiment Name: At_Drought_Reproduction_P Parameter: Tissue Value: Flowers
  misc_feature: MA Experiment 20001910 PARAMETER Experiment Name: At_Drought_Reproduction_P Parameter: Treatment Value: Drought vs. No Drought
atctcctccattttctctcttctctctttttataagaactcttcttcttcttcttctctctcaattccatctctctctctctttctagttcttgttccctttcgaatcaagtgatcatggctcaagaagagatacagaaacctactgcctctgttccagtggttaaggaggaaactcctgccccggttaaggaggttgaggtgccggttactacggagaaagctgtggctgcgcctgctccggaagctacggaggagaaagttgtgtctgaggtggcggtgcctgaaacagaggtgacggcggtgaaagaggaggaggttgcgacgggaaaggagatcttgcaatcggagtcgtttaaggaggaaggctatttggcttctgaattacaggaagctgagaagaatgctttggctgagttaaaggagttggttagggaggctttgaacaagcgtgaattcaccgcgccaccgccaccaccagctccggtaaaggaagagaaagttgaggagaagaaaacagaggaaacagaggaaaagaaggaagaagttaaaacagaggaaaaatctcttgaggctgaaaccaaagaagaggagaaatctgctgctccggccaccgtagagaccaagaaagaagagatcttggccgctccggctccgatcgtcgcagagaccaagaaggaagagacaccagttgctcctgctccggtagagactaaaccggctgctccggtcgttgcagagacaaagaaggaagaaatattaccagctgctccggtcaccacagagaccaaggtggaagagaaagtcgttccagtagaaaccacaccggctgctccagtcaccacagagaccaaggaagaagagaaagccgctccggtcaccacagagaccaaggaggaagagaaagcagctccgggagagaccaagaaagaagagaaagcaaccgcctctactcaggtcaagagggcctcaaaatttattaaagatatatttgtctcagtcaccactagcgagaagaagaaggaagaagagaaaccagcagtagtaacaatcgagaaggctttcgcagctgatcaagaagaagaaacaaaaaccgttgaagcagtcgaagaatcaatcgtctccatcactcttccagagacagctgcatacgtagagccagaagaagtctcaatctggggaatcccacttctagaggacgaaagatccgacgtgatcctcctcaaattcctccgtgcacgtgacttcaaggtcaaagaagccttcacgatgctgaaaaacaccgtccaatggcgcaaagagaacaagatcgacgacctagtctcagaagatcttgaaggaagcgagtttgagaagttggtgttcactcacggtgtcgacaaacaaggacatgtcgtgatctatagctcgtacggtgagtttcagaacaaggagattttctcagataaagagaagcttagcaagtttctcaaatggaggattcagttccaagagaagtgtgtgaggtctcttgactttagccctgaggctaagtcatcgttcgtgttcgttagtgacttcaggaacgctcctggacttggtcagagagcattgtggcagttcattaaacgcgccgttaagcaattcgaagataactatccagagtttgtcgctaaagagctgttcattaatgtcccatggtggtacattccttactacaaaacattcggaagtatcattacatcgccaaggacaaggagcaagatggtcctttctggtccatccaaatccgctgagaccattttcaaatacgtagctcctgaagtagtcccggttaagtatggtggactcagcaaagatagtccattcaccgttgaagatggagtcaccgaggccgtagttaaatcgacatctaaatataccattgatttgcctgctacagagggttccacgctctcatgggagcttagggttttgggtgcggacgtgagctacggagctcaatttgagccaagcaatgaggcaagctacaccgtgattgtctctaagaaccggaaggtcggtttaactgatgaaccggtgataaccgattctttcaaggcaagtgaggcgggaaaggtcgtgatcacgattgacaaccaaacctttaagaagaagaaggtgctctacaggtccaaaacccaagcataagattatgtgtccgatctttgaatgaatgaagaaacaagaaagatggttgggaattttaattcatttaatttagtacgtttattcatttgtgtatttttgaaacctaaaagaaggtttgtgttttatggatggttttgatttgttttggtgatgggatttttttttgttgatgattcttatatatacaaaatatttgtgtgc

SEQ ID NO: 46438 - protein, 683 aa, Arabidopsis thaliana
  peptide (1)..(683): Ceres Seq. ID no. 12574177
  misc_feature (414)..(593): Pfam Name: CRAL/TRIO domain Pfam Description: CRAL/TRIO domain
  misc_feature (143)..(682): Homolog of NCBI NO: 18397616 NR Description: expressed protein
  misc_feature (605)..(682): Homolog of NCBI NO: 25407487 NR Description: hypothetical protein AT4g09160 [imported] -
  misc_feature (30)..(598): Homolog of NCBI NO: 25407487 NR Description: hypothetical protein AT4g09160 [imported] -
  misc_feature (30)..(682): Homolog of NCBI NO: 30680992 NR Description: expressed protein [Arabidopsis thaliana]
  misc_feature (86)..(683): Homolog of NCBI NO: 34907288 NR Description: contains ESTs
  misc_feature (187)..(678): Homolog of NCBI NO: 15218383 NR Description: cytosolic factor, putative
  misc_feature (79)..(118): Homolog of NCBI NO: 15081614 NR Description: At1g72160/T9N14_8 [Arabidopsis thaliana]
  misc_feature (348)..(678): Homolog of NCBI NO: 15081614 NR Description: At1g72160/T9N14_8 [Arabidopsis thaliana]
  misc_feature (208)..(681): Homolog of NCBI NO: 8894548 NR Description: hypothetical protein [Cicer arietinum]
  misc_feature (122)..(682): Homolog of NCBI NO: 15218382 NR Description: cytosolic factor, putative
MAQEEIQKPTASVPVVKEETPAPVKEVEVPVTTEKAVAAPAPEATEEKVVSEVAVPETEVTAVKEEEVATGKEILQSESFKEEGYLASELQEAEKNALAELKELVREALNKREFTAPPPPPAPVKEEKVEEKKTEETEEKKEEVKTEEKSLEAETKEEEKSAAPATVETKKEEILAAPAPIVAETKKEETPVAPAPVETKPAAPVVAETKKEEILPAAPVTTETKVEEKVVPVETTPAAPVTTETKEEEKAAPVTTETKEEEKAAPGETKKEEKATASTQVKRASKFIKDIFVSVTTSEKKKEEEKPAVVTIEKAFAADQEEETKTVEAVEESIVSITLPETAAYVEPEEVSIWGIPLLEDERSDVILLKFLRARDFKVKEAFTMLKNTVQWRKENKIDDLVSEDLEGSEFEKLVFTHGVDKQGHVVIYSSYGEFQNKEIFSDKEKLSKFLKWRIQFQEKCVRSLDFSPEAKSSFVFVSDFRNAPGLGQRALWQFIKRAVKQFEDNYPEFVAKELFINVPWWYIPYYKTFGSIITSPRTRSKMVLSGPSKSAETIFKYVAPEVVPVKYGGLSKDSPFTVEDGVTEAVVKSTSKYTIDLPATEGSTLSWELRVLGADVSYGAQFEPSNEASYTVIVSKNRKVGLTDEPVITDSFKASEAGKVVITIDNQTFKKKKVLYRSKTQA

SEQ ID NO: 46439 - DNA, 1454 bp, Arabidopsis thaliana
  misc_feature (1)..(1454): Ceres Seq. ID no. 14315696
  misc_feature: MA Experiment ID: 20000185 Result: Up-regulated in Transcription
  misc_feature: MA Experiment 20000185 PARAMETER Experiment Name: At_Roots__P Parameter: Age (day) Value: 7 vs. 21
  misc_feature: MA Experiment 20000185 PARAMETER Experiment Name: At_Roots__P Parameter: Organism Value: A. thaliana
  misc_feature: MA Experiment 20000185 PARAMETER Experiment Name: At_Roots__P Parameter: Tissue Value: Roots vs. Whole Plant
  misc_feature: MA Experiment ID: 20000496 Result: Up-regulated in Transcription
  misc_feature: MA Experiment 20000496 PARAMETER Experiment Name: At_Guard_Cells_P Parameter: Harvest Date Value: 7/19/2002
  misc_feature: MA Experiment 20000496 PARAMETER Experiment Name: At_Guard_Cells_P Parameter: Organism Value: Canola
  misc_feature: MA Experiment 20000496 PARAMETER Experiment Name: At_Guard_Cells_P Parameter: Tissue Value: Guard Cells vs. Leaves
  misc_feature: MA Experiment ID: 20000794 Result: Up-regulated in Transcription
  misc_feature: MA Experiment 20000794 PARAMETER Experiment Name: At_Petals_P Parameter: Age (day) Value: 23-25 days
  misc_feature: MA Experiment 20000794 PARAMETER Experiment Name: At_Petals_P Parameter: Plant Line Value: WS
  misc_feature: MA Experiment 20000794 PARAMETER Experiment Name: At_Petals_P Parameter: Tissue Value: Petals vs. Whole plant
gagcttcttgaagcagatcaagatcaagaaagaacacttttgtgaacttcttcttccccacatctcctaaaagcttcacacacaccaaaccaagcgtttcttttcttatctactcgattatcaacacatcttttcctgaaactccttccacatctttgtctgatcatggtgaaggaaacagtgtattatgatgttcttggtgtcactccctctgcttctgaggaagagattcgcaaggcttattacatcaaggcaagacaagttcatcctgacaagaatcaaggtgatcctctagctgctgaaaagtttcaggttcttggtgaagcttaccaggttctaagtgatcctgttcatcgtgaagcgtatgatcggactggaaaattctcagctcccaaagaaacaatggttgatccaacggctgttttcgctcttcttttcggaagtgaactattcgaggattatatcggtcacttggctgttgcatcaatggcttccactcaaatggcttctgaaatcgaaaactctgatcagtttcaagacaaactaaaggctgttcagaaagaaagagaagaaaacctttcaaggtttctcaaagattttctgagtcaatatgtccacggagacaaagaaggattcataagccgcgcagaatctgaagccaagagactttcagatgcagcttttggagcggatatgttgcatacaattggatatgtatacacaagacaagcagctcaagaacttgggaagagagctctttacttaggagttccatttgtagctgaatgggttaggaacaaaggtcattcttggaaatcacagattagtgcagctaaaggagctttacagttacttcagctgcaagaagagagtaaccggagattaaagaaagatgggactagtccagcaaatgagttagagtctcatattcagaccaacaaagaaacattgatgggatctttgtggaaacttaatgttgtcgacattgaagtgactctgttacatgtgtgtcagatggtcttgcgcgaaaacaatttgagaaaggaggagctcaagtctagagcaatggctctcaagattcttgggaagatttttcagcaagaaaagcaatcgaagaacggtacaacatcaagaaaagaagatgaagacagcgacgatgatgacagtagcagcgatgacgattcttcacaaccactttcatacagaactcctctgcttactcaggggattggtagacttttcagatgtctctgcaatccagcattcgatgtagacgatgatgaaattgtatacaaaggcaaatgatcaataccacactcaaatatttcaatttgatgggtctcacatgtgaaatgtgatgcagcttcttaagttattaattctttataaatatatgtaatgatgataattgatgggatcaaacttaacaaattgttaaaataagtttattttcc

SEQ ID NO: 46440 - protein, 379 aa, Arabidopsis thaliana
  peptide (1)..(379): Ceres Seq. ID no. 14315697
  misc_feature (6)..(71): Pfam Name: DnaJ domain Pfam Description: DnaJ domain
  misc_feature (1)..(341): Homolog of NCBI NO: 15226572 NR Description: DnaJ protein family [Arabidopsis thaliana]
  misc_feature (1)..(354): Homolog of NCBI NO: 2230757 NR Description: dnaJ-like protein [Arabidopsis thaliana]
  misc_feature (1)..(354): Homolog of NCBI NO: 18394951 NR Description: DnaJ protein family [Arabidopsis thaliana]
  misc_feature (1)..(129): Homolog of NCBI NO: 27817868 NR Description: OJ1081_B12.17 [Oryza sativa (japonica
  misc_feature (129)..(340): Homolog of NCBI NO: 27817868 NR Description: OJ1081_B12.17 [Oryza sativa (japonica
  misc_feature (1)..(354): Homolog of NCBI NO: 26449747 NR Description: putative DnaJ protein [Arabidopsis thaliana]
  misc_feature (1)..(354): Homolog of NCBI NO: 15223142 NR Description: DnaJ protein family [Arabidopsis thaliana]
  misc_feature (312)..(379): Homolog of NCBI NO: 25406486 NR Description: hypothetical protein F22K20.12 [imported] -
  misc_feature (1)..(284): Homolog of NCBI NO: 25406486 NR Description: hypothetical protein F22K20.12 [imported] -
  misc_feature (1)..(379): Homolog of NCBI NO: 30699227 NR Description: DnaJ protein family [Arabidopsis thaliana]
MVKETVYYDVLGVTPSASEEEIRKAYYIKARQVHPDKNQGDPLAAEKFQVLGEAYQVLSDPVHREAYDRTGKFSAPKETMVDPTAVFALLFGSELFEDYIGHLAVASMASTQMASEIENSDQFQDKLKAVQKEREENLSRFLKDFLSQYVHGDKEGFISRAESEAKRLSDAAFGADMLHTIGYVYTRQAAQELGKRALYLGVPFVAEWVRNKGHSWKSQISAAKGALQLLQLQEESNRRLKKDGTSPANELESHIQTNKETLMGSLWKLNVVDIEVTLLHVCQMVLRENNLRKEELKSRAMALKILGKIFQQEKQSKNGTTSRKEDEDSDDDDSSSDDDSSQPLSYRTPLLTQGIGRLFRCLCNPAFDVDDDEIVYKGK

SEQ ID NO: 46441 - protein, 300 aa, Arabidopsis thaliana
  peptide (1)..(300): Ceres Seq. ID no. 14315698
  misc_feature (1)..(262): Homolog of NCBI NO: 15226572 NR Description: DnaJ protein family [Arabidopsis thaliana]
  misc_feature (1)..(275): Homolog of NCBI NO: 2230757 NR Description: dnaJ-like protein [Arabidopsis thaliana]
  misc_feature (1)..(275): Homolog of NCBI NO: 18394951 NR Description: DnaJ protein family [Arabidopsis thaliana]
  misc_feature (1)..(50): Homolog of NCBI NO: 27817868 NR Description: OJ1081_B12.17 [Oryza sativa (japonica
  misc_feature (50)..(261): Homolog of NCBI NO: 27817868 NR Description: OJ1081_B12.17 [Oryza sativa (japonica
  misc_feature (1)..(275): Homolog of NCBI NO: 26449747 NR Description: putative DnaJ protein [Arabidopsis thaliana]
  misc_feature (1)..(275): Homolog of NCBI NO: 15223142 NR Description: DnaJ protein family [Arabidopsis thaliana]
  misc_feature (233)..(300): Homolog of NCBI NO: 25406486 NR Description: hypothetical protein F22K20.12 [imported] -
  misc_feature (1)..(205): Homolog of NCBI NO: 25406486 NR Description: hypothetical protein F22K20.12 [imported] -
  misc_feature (1)..(300): Homolog of NCBI NO: 30699227 NR Description: DnaJ protein family [Arabidopsis thaliana]
MVDPTAVFALLFGSELFEDYIGHLAVASMASTQMASEIENSDQFQDKLKAVQKEREENLSRFLKDFLSQYVHGDKEGFISRAESEAKRLSDAAFGADMLHTIGYVYTRQAAQELGKRALYLGVPFVAEWVRNKGHSWKSQISAAKGALQLLQLQEESNRRLKKDGTSPANELESHIQTNKETLMGSLWKLNVVDIEVTLLHVCQMVLRENNLRKEELKSRAMALKILGKIFQQEKQSKNGTTSRKEDEDSDDDDSSSDDDSSQPLSYRTPLLTQGIGRLFRCLCNPAFDVDDDEIVYKGK

SEQ ID NO: 46442 - protein, 272 aa, Arabidopsis thaliana
  peptide (1)..(272): Ceres Seq. ID no. 14315699
  misc_feature (1)..(234): Homolog of NCBI NO: 15226572 NR Description: DnaJ protein family [Arabidopsis thaliana]
  misc_feature (1)..(247): Homolog of NCBI NO: 2230757 NR Description: dnaJ-like protein [Arabidopsis thaliana]
  misc_feature (1)..(247): Homolog of NCBI NO: 18394951 NR Description: DnaJ protein family [Arabidopsis thaliana]
  misc_feature (1)..(22): Homolog of NCBI NO: 27817868 NR Description: OJ1081_B12.17 [Oryza sativa (japonica
  misc_feature (22)..(233): Homolog of NCBI NO: 27817868 NR Description: OJ1081_B12.17 [Oryza sativa (japonica
  misc_feature (1)..(247): Homolog of NCBI NO: 26449747 NR Description: putative DnaJ protein [Arabidopsis thaliana]
  misc_feature (1)..(247): Homolog of NCBI NO: 15223142 NR Description: DnaJ protein family [Arabidopsis thaliana]
  misc_feature (205)..(272): Homolog of NCBI NO: 25406486 NR Description: hypothetical protein F22K20.12 [imported] -
  misc_feature (1)..(177): Homolog of NCBI NO: 25406486 NR Description: hypothetical protein F22K20.12 [imported] -
  misc_feature (1)..(272): Homolog of NCBI NO: 30699227 NR Description: DnaJ protein family [Arabidopsis thaliana]
MASTQMASEIENSDQFQDKLKAVQKEREENLSRFLKDFLSQYVHGDKEGFISRAESEAKRLSDAAFGADMLHTIGYVYTRQAAQELGKRALYLGVPFVAEWVRNKGHSWKSQISAAKGALQLLQLQEESNRRLKKDGTSPANELESHIQTNKETLMGSLWKLNVVDIEVTLLHVCQMVLRENNLRKEELKSRAMALKILGKIFQQEKQSKNGTTSRKEDEDSDDDDSSSDDDSSQPLSYRTPLLTQGIGRLFRCLCNPAFDVDDDEIVYKGK

SEQ ID NO: 46443 - DNA, 2589 bp, Arabidopsis thaliana
  misc_feature (1)..(2589): Ceres Seq. ID no. 12600667
  misc_feature: MA Experiment ID: 20000169 Result: Up-regulated in Transcription
  misc_feature: MA Experiment 20000169 PARAMETER Experiment Name: At_100uM_ABA_P Parameter: Age (day) Value: 14
  misc_feature: MA Experiment 20000169 PARAMETER Experiment Name: At_100uM_ABA_P Parameter: Organism Value: A. thaliana
  misc_feature: MA Experiment 20000169 PARAMETER Experiment Name: At_100uM_ABA_P Parameter: Plant Line Value: WS
  misc_feature: MA Experiment 20000169 PARAMETER Experiment Name: At_100uM_ABA_P Parameter: Timepoint (hr) Value: 6
  misc_feature: MA Experiment 20000169 PARAMETER Experiment Name: At_100uM_ABA_P Parameter: Tissue Value: Aerial
  misc_feature: MA Experiment 20000169 PARAMETER Experiment Name: At_100uM_ABA_P Parameter: Treatment Value: 100uM ABA vs. No Treatment
  misc_feature: MA Experiment ID: 20000179 Result: Up-regulated in Transcription
  misc_feature: MA Experiment 20000179 PARAMETER Experiment Name: At_Germinating_Seeds_P Parameter: Age (hr) Value: 6 vs. 0
  misc_feature: MA Experiment 20000179 PARAMETER Experiment Name: At_Germinating_Seeds_P Parameter: Tissue Value: Germinating Seeds
  misc_feature: MA Experiment ID: 20000180 Result: Up-regulated in Transcription
  misc_feature: MA Experiment 20000180 PARAMETER Experiment Name: At_Germinating_Seeds_P Parameter: Age (hr) Value: 24 vs. 0
  misc_feature: MA Experiment 20000180 PARAMETER Experiment Name: At_Germinating_Seeds_P Parameter: Tissue Value: Germinating Seeds
  misc_feature: MA Experiment ID: 20000185 Result: Down-regulated in Transcription
  misc_feature: MA Experiment 20000185 PARAMETER Experiment Name: At_Roots__P Parameter: Age (day) Value: 7 vs. 21
  misc_feature: MA Experiment 20000185 PARAMETER Experiment Name: At_Roots__P Parameter: Organism Value: A. thaliana
  misc_feature: MA Experiment 20000185 PARAMETER Experiment Name: At_Roots__P Parameter: Tissue Value: Roots vs. Whole Plant
  misc_feature: MA Experiment ID: 20000211 Result: Down-regulated in Transcription
  misc_feature: MA Experiment 20000211 PARAMETER Experiment Name: At_0.001percent_MeJA__P Parameter: Age (day) Value: 14
  misc_feature: MA Experiment 20000211 PARAMETER Experiment Name: At_0.001percent_MeJA__P Parameter: Organism Value: A. thaliana
  misc_feature: MA Experiment 20000211 PARAMETER Experiment Name: At_0.001percent_MeJA__P Parameter: Plant Line Value: WS
  misc_feature: MA Experiment 20000211 PARAMETER Experiment Name: At_0.001percent_MeJA__P Parameter: Timepoint (hr) Value: 1
  misc_feature: MA Experiment 20000211 PARAMETER Experiment Name: At_0.001percent_MeJA__P Parameter: Tissue Value: Aerial
  misc_feature: MA Experiment 20000211 PARAMETER Experiment Name: At_0.001percent_MeJA__P Parameter: Treatment Value: 0.001percent MeJA vs. No Treatment
  misc_feature: MA Experiment ID: 20000213 Result: Down-regulated in Transcription
  misc_feature: MA Experiment 20000213 PARAMETER Experiment Name: At_4deg_Cold_P Parameter: Timepoint (hr) Value: 2
  misc_feature: MA Experiment ID: 20000227 Result: Up-regulated in Transcription
  misc_feature: MA Experiment 20000227 PARAMETER Experiment Name: At_Root-Tips-vs-Tops_P Parameter: Tissue Value: Root Tips vs. Root Tops
  misc_feature: MA Experiment ID: 20000234 Result: Down-regulated in Transcription
  misc_feature: MA Experiment 20000234 PARAMETER Experiment Name: At_Siliques_P Parameter: Age (day) Value: 21
  misc_feature: MA Experiment 20000234 PARAMETER Experiment Name: At_Siliques_P Parameter: Organism Value: A. thaliana
  misc_feature: MA Experiment 20000234 PARAMETER Experiment Name: At_Siliques_P Parameter: Plant Line Value: WS
  misc_feature: MA Experiment 20000234 PARAMETER Experiment Name: At_Siliques_P Parameter: Tissue Value: Less Than 5mm Siliques vs. Whole Plant
  misc_feature: MA Experiment ID: 20000235 Result: Down-regulated in Transcription
  misc_feature: MA Experiment 20000235 PARAMETER Experiment Name: At_Siliques_P Parameter: Age (day) Value: 21
  misc_feature: MA Experiment 20000235 PARAMETER Experiment Name: At_Siliques_P Parameter: Organism Value: A. thaliana
  misc_feature: MA Experiment 20000235 PARAMETER Experiment Name: At_Siliques_P Parameter: Plant Line Value: WS
  misc_feature: MA Experiment 20000235 PARAMETER Experiment Name: At_Siliques_P Parameter: Tissue Value: 5-10mm Siliques vs. Whole Plant
  misc_feature: MA Experiment ID: 20000265 Result: Down-regulated in Transcription
  misc_feature: MA Experiment 20000265 PARAMETER Experiment Name: At_Open_Flower_P Parameter: Age (day) Value: 21
  misc_feature: MA Experiment 20000265 PARAMETER Experiment Name: At_Open_Flower_P Parameter: Plant Line Value: WS
  misc_feature: MA Experiment 20000265 PARAMETER Experiment Name: At_Open_Flower_P Parameter: Tissue Value: Closed Flower vs. Whole Plant
  misc_feature: MA Experiment ID: 20000268 Result: Down-regulated in Transcription
  misc_feature: MA Experiment 20000268 PARAMETER Experiment Name: At_100mM_NaCl__P Parameter: Age (day) Value: 14
  misc_feature: MA Experiment 20000268 PARAMETER Experiment Name: At_100mM_NaCl__P Parameter: Organism Value: A. thaliana
  misc_feature: MA Experiment 20000268 PARAMETER Experiment Name: At_100mM_NaCl__P Parameter: Plant Line Value: WS
  misc_feature: MA Experiment 20000268 PARAMETER Experiment Name: At_100mM_NaCl__P Parameter: Timepoint (hr) Value: 6
  misc_feature: MA Experiment 20000268 PARAMETER Experiment Name: At_100mM_NaCl__P Parameter: Tissue Value: Whole Plant
  misc_feature: MA Experiment 20000268 PARAMETER Experiment Name: At_100mM_NaCl__P Parameter: Treatment Value: 100mM NaCl vs. No Treatment
  misc_feature: MA Experiment ID: 20000269 Result: Down-regulated in Transcription
  misc_feature: MA Experiment 20000269 PARAMETER Experiment Name: At_1mM_KNO3_L-vs-H_Roots_P Parameter: Age (day) Value: 7,10,12
  misc_feature: MA Experiment 20000269 PARAMETER Experiment Name: At_1mM_KNO3_L-vs-H_Roots_P Parameter: Organism Value: A. thaliana
  misc_feature: MA Experiment 20000269 PARAMETER Experiment Name: At_1mM_KNO3_L-vs-H_Roots_P Parameter: Plant Line Value: WS
  misc_feature: MA Experiment 20000269 PARAMETER Experiment Name: At_1mM_KNO3_L-vs-H_Roots_P Parameter: Timepoint (day) Value: 7,10,12
  misc_feature: MA Experiment 20000269 PARAMETER Experiment Name: At_1mM_KNO3_L-vs-H_Roots_P Parameter: Tissue Value: Roots
  misc_feature: MA Experiment 20000269 PARAMETER Experiment Name: At_1mM_KNO3_L-vs-H_Roots_P Parameter: Treatment Value: 1mM KNO3 vs. 50mM KNO3
  misc_feature: MA Experiment ID: 20000286 Result: Down-regulated in Transcription
  misc_feature: MA Experiment 20000286 PARAMETER Experiment Name: At_Open_Flower_P Parameter: Age (day) Value: 21
  misc_feature: MA Experiment 20000286 PARAMETER Experiment Name: At_Open_Flower_P Parameter: Plant Line Value: WS
  misc_feature: MA Experiment 20000286 PARAMETER Experiment Name: At_Open_Flower_P Parameter: Tissue Value: Half Open vs. Whole Plant
  misc_feature: MA Experiment ID: 20000308 Result: Down-regulated in Transcription
  misc_feature: MA Experiment 20000308 PARAMETER Experiment Name: At_100mM_NaCl__P Parameter: Age (day) Value: 17
  misc_feature: MA Experiment 20000308 PARAMETER Experiment Name: At_100mM_NaCl__P Parameter: Organism Value: A. thaliana
  misc_feature: MA Experiment 20000308 PARAMETER Experiment Name: At_100mM_NaCl__P Parameter: Plant Line Value: WS
  misc_feature: MA Experiment 20000308 PARAMETER Experiment Name: At_100mM_NaCl__P Parameter: Timepoint (hr) Value: 72
  misc_feature: MA Experiment 20000308 PARAMETER Experiment Name: At_100mM_NaCl__P Parameter: Tissue Value: Whole Plant
  misc_feature: MA Experiment 20000308 PARAMETER Experiment Name: At_100mM_NaCl__P Parameter: Treatment Value: 100mM NaCl vs. No Treatment
  misc_feature: MA Experiment ID: 20000438 Result: Down-regulated in Transcription
  misc_feature: MA Experiment 20000438 PARAMETER Experiment Name: At_Shoots__P Parameter: Age (day) Value: 14
  misc_feature: MA Experiment 20000438 PARAMETER Experiment Name: At_Shoots__P Parameter: Tissue Value: Shoots vs. Whole Plant
  misc_feature: MA Experiment ID: 20000439 Result: Down-regulated in Transcription
  misc_feature: MA Experiment 20000439 PARAMETER Experiment Name: At_Roots__P Parameter: Age (day) Value: 14 vs. 21
  misc_feature: MA Experiment 20000439 PARAMETER Experiment Name: At_Roots__P Parameter: Organism Value: A. thaliana
  misc_feature: MA Experiment 20000439 PARAMETER Experiment Name: At_Roots__P Parameter: Tissue Value: Roots vs. Whole Plant
  misc_feature: MA Experiment ID: 20000441 Result: Up-regulated in Transcription
  misc_feature: MA Experiment 20000441 PARAMETER Experiment Name: At_1uM_BR-BRZ__P Parameter: Tissue Value: Shoot Apices
  misc_feature: MA Experiment 20000441 PARAMETER Experiment Name: At_1uM_BR-BRZ__P Parameter: Treatment Value: 1uM BR vs. No Treatment
  misc_feature: MA Experiment ID: 20000443 Result: Up-regulated in Transcription
  misc_feature: MA Experiment 20000443 PARAMETER Experiment Name: At_1uM_BR-BRZ__P Parameter: Tissue Value: Shoot Apices
  misc_feature: MA Experiment 20000443 PARAMETER Experiment Name: At_1uM_BR-BRZ__P Parameter: Treatment Value: 1uM BRZ vs. No Treatment
  misc_feature: MA Experiment ID: 20000452 Result: Down-regulated in Transcription
  misc_feature: MA Experiment 20000452 PARAMETER Experiment Name: At_CS6879_Shoots-Roots_P Parameter: Age (day) Value: 14
  misc_feature: MA Experiment 20000452 PARAMETER Experiment Name: At_CS6879_Shoots-Roots_P Parameter: Organism Value: A. thaliana
  misc_feature: MA Experiment 20000452 PARAMETER Experiment Name: At_CS6879_Shoots-Roots_P Parameter: Plant Line Value: CS6879 vs. WS
  misc_feature: MA Experiment 20000452 PARAMETER Experiment Name: At_CS6879_Shoots-Roots_P Parameter: Tissue Value: Shoots
  misc_feature: MA Experiment ID: 20000456 Result: Down-regulated in Transcription
  misc_feature: MA Experiment 20000456 PARAMETER Experiment Name: At_100uM_BA_P Parameter: Age (day) Value: 14
  misc_feature: MA Experiment 20000456 PARAMETER Experiment Name: At_100uM_BA_P Parameter: Organism Value: A. thaliana
  misc_feature: MA Experiment 20000456 PARAMETER Experiment Name: At_100uM_BA_P Parameter: Plant Line Value: WS
  misc_feature: MA Experiment 20000456 PARAMETER Experiment Name: At_100uM_BA_P Parameter: Timepoint (hr) Value: 6
  misc_feature: MA Experiment 20000456 PARAMETER Experiment Name: At_100uM_BA_P Parameter: Tissue Value: Aerial
  misc_feature: MA Experiment 20000456 PARAMETER Experiment Name: At_100uM_BA_P Parameter: Treatment Value: 100uM BA vs. No Treatment
  misc_feature: MA Experiment ID: 20000573 Result: Up-regulated in Transcription
  misc_feature: MA Experiment 20000573 PARAMETER Experiment Name: At_100uM_ABA_Mutants__P Parameter: Organism Value: A. thaliana
  misc_feature: MA Experiment 20000573 PARAMETER Experiment Name: At_100uM_ABA_Mutants__P Parameter: Plant Line Value: CS22 vs. Ler wt
  misc_feature: MA Experiment 20000573 PARAMETER Experiment Name: At_100uM_ABA_Mutants__P Parameter: Timepoint (hr) Value: N/A
  misc_feature: MA Experiment 20000573 PARAMETER Experiment Name: At_100uM_ABA_Mutants__P Parameter: Tissue Value: Whole Plant
  misc_feature: MA Experiment 20000573 PARAMETER Experiment Name: At_100uM_ABA_Mutants__P Parameter: Treatment Value: None
  misc_feature: MA Experiment ID: 20000709 Result: Up-regulated in Transcription
  misc_feature: MA Experiment 20000709 PARAMETER Experiment Name: At_15mM_NH4NO3_L-to-H_P Parameter: Age (hr) Value: 14
  misc_feature: MA Experiment 20000709 PARAMETER Experiment Name: At_15mM_NH4NO3_L-to-H_P Parameter: Organism Value: A. thaliana
  misc_feature: MA Experiment 20000709 PARAMETER Experiment Name: At_15mM_NH4NO3_L-to-H_P Parameter: Plant Line Value: WS
  misc_feature: MA Experiment 20000709 PARAMETER Experiment Name: At_15mM_NH4NO3_L-to-H_P Parameter: Timepoint (hr) Value: 4
  misc_feature: MA Experiment 20000709 PARAMETER Experiment Name: At_15mM_NH4NO3_L-to-H_P Parameter: Tissue Value: Aerial
  misc_feature: MA Experiment 20000709 PARAMETER Experiment Name: At_15mM_NH4NO3_L-to-H_P Parameter: Treatment Value: 15mM NH4NO3 vs. 30mM Mannitol
  misc_feature: MA Experiment ID: 20000794 Result: Up-regulated in Transcription
  misc_feature: MA Experiment 20000794 PARAMETER Experiment Name: At_Petals_P Parameter: Age (day) Value: 23-25 days
  misc_feature: MA Experiment 20000794 PARAMETER Experiment Name: At_Petals_P Parameter: Plant Line Value: WS
  misc_feature: MA Experiment 20000794 PARAMETER Experiment Name: At_Petals_P Parameter: Tissue Value: Petals vs. Whole plant
  misc_feature: MA Experiment ID: 20001247 Result: Up-regulated in Transcription
  misc_feature: MA Experiment 20001247 PARAMETER Experiment Name: At_Far-red-induction_P Parameter: Age (day) Value: 7
  misc_feature: MA Experiment 20001247 PARAMETER Experiment Name: At_Far-red-induction_P Parameter: Light Value: Far-red vs. White
  misc_feature: MA Experiment 20001247 PARAMETER Experiment Name: At_Far-red-induction_P Parameter: Organism Value: A. thaliana
  misc_feature: MA Experiment 20001247 PARAMETER Experiment Name: At_Far-red-induction_P Parameter: Plant Line Value: Columbia
  misc_feature: MA Experiment 20001247 PARAMETER Experiment Name: At_Far-red-induction_P Parameter: Timepoint (hr) Value: 1
  misc_feature: MA Experiment 20001247 PARAMETER Experiment Name: At_Far-red-induction_P Parameter: Tissue Value: Whole Plant
  misc_feature: MA Experiment ID: 20001248 Result: Up-regulated in Transcription
  misc_feature: MA Experiment 20001248 PARAMETER Experiment Name: At_Far-red-induction_P Parameter: Age (day) Value: 7
  misc_feature: MA Experiment 20001248 PARAMETER Experiment Name: At_Far-red-induction_P Parameter: Light Value: Far-red vs. White
  misc_feature: MA Experiment 20001248 PARAMETER Experiment Name: At_Far-red-induction_P Parameter: Organism Value: A. thaliana
  misc_feature: MA Experiment 20001248 PARAMETER Experiment Name: At_Far-red-induction_P Parameter: Plant Line Value: Columbia
  misc_feature: MA Experiment 20001248 PARAMETER Experiment Name: At_Far-red-induction_P Parameter: Timepoint (hr) Value: 4
  misc_feature: MA Experiment 20001248 PARAMETER Experiment Name: At_Far-red-induction_P Parameter: Tissue Value: Whole Plant
  misc_feature: MA Experiment ID: 20001450 Result: Up-regulated in Transcription
  misc_feature: MA Experiment 20001450 PARAMETER Experiment Name: At_Far-red-induction_P Parameter: Age (day) Value: 7
  misc_feature: MA Experiment 20001450 PARAMETER Experiment Name: At_Far-red-induction_P Parameter: Light Value: Far-red vs. White
  misc_feature: MA Experiment 20001450 PARAMETER Experiment Name: At_Far-red-induction_P Parameter: Organism Value: A. thaliana
  misc_feature: MA Experiment 20001450 PARAMETER Experiment Name: At_Far-red-induction_P Parameter: Plant Line Value: Columbia
  misc_feature: MA Experiment 20001450 PARAMETER Experiment Name: At_Far-red-induction_P Parameter: Timepoint (hr) Value: 8
  misc_feature: MA Experiment 20001450 PARAMETER Experiment Name: At_Far-red-induction_P Parameter: Tissue Value: Whole Plant
  misc_feature: MA Experiment ID: 20001451 Result: Up-regulated in Transcription
  misc_feature: MA Experiment 20001451 PARAMETER Experiment Name: At_Far-red-induction_P Parameter: Age (day) Value: 7
  misc_feature: MA Experiment 20001451 PARAMETER Experiment Name: At_Far-red-induction_P Parameter: Light Value: Far-red vs. White
  misc_feature: MA Experiment 20001451 PARAMETER Experiment Name: At_Far-red-induction_P Parameter: Organism Value: A. thaliana
  misc_feature: MA Experiment 20001451 PARAMETER Experiment Name: At_Far-red-induction_P Parameter: Plant Line Value: Columbia
  misc_feature: MA Experiment 20001451 PARAMETER Experiment Name: At_Far-red-induction_P Parameter: Timepoint (hr) Value: 24
  misc_feature: MA Experiment 20001451 PARAMETER Experiment Name: At_Far-red-induction_P Parameter: Tissue Value: Whole Plant
  misc_feature: MA Experiment ID: 20001556 Result: Down-regulated in Transcription
  misc_feature: MA Experiment 20001556 PARAMETER Experiment Name: At_Drought_Soil_Dry_P Parameter: Age (day) Value: 26
  misc_feature: MA Experiment 20001556 PARAMETER Experiment Name: At_Drought_Soil_Dry_P Parameter: Organism Value: A. thaliana
  misc_feature: MA Experiment 20001556 PARAMETER Experiment Name: At_Drought_Soil_Dry_P Parameter: Plant Line Value: WS
  misc_feature: MA Experiment 20001556 PARAMETER Experiment Name: At_Drought_Soil_Dry_P Parameter: Post Timepoint (hr) Value: None
  misc_feature: MA Experiment 20001556 PARAMETER Experiment Name: At_Drought_Soil_Dry_P Parameter: Post-Treatment Value: None
  misc_feature: MA Experiment 20001556 PARAMETER Experiment Name: At_Drought_Soil_Dry_P Parameter: Timepoint (day) Value: 12
  misc_feature: MA Experiment 20001556 PARAMETER Experiment Name: At_Drought_Soil_Dry_P Parameter: Treatment Value: Drought vs. No Drought
  misc_feature: MA Experiment ID: 20001559 Result: Down-regulated in Transcription
  misc_feature: MA Experiment 20001559 PARAMETER Experiment Name: At_Drought_Soil_Dry_P Parameter: Age (day) Value: 28
  misc_feature: MA Experiment 20001559 PARAMETER Experiment Name: At_Drought_Soil_Dry_P Parameter: Organism Value: A. thaliana
  misc_feature: MA Experiment 20001559 PARAMETER Experiment Name: At_Drought_Soil_Dry_P Parameter: Plant Line Value: WS
  misc_feature: MA Experiment 20001559 PARAMETER Experiment Name: At_Drought_Soil_Dry_P Parameter: Post Timepoint (hr) Value: 29
  misc_feature: MA Experiment 20001559 PARAMETER Experiment Name: At_Drought_Soil_Dry_P Parameter: Post-Treatment Value: Re-Water vs. No Drought
  misc_feature: MA Experiment 20001559 PARAMETER Experiment Name: At_Drought_Soil_Dry_P Parameter: Timepoint (day) Value: 14
  misc_feature: MA Experiment 20001559 PARAMETER Experiment Name: At_Drought_Soil_Dry_P Parameter: Treatment Value: Drought vs. No Drought
  misc_feature: MA Experiment ID: 20001560 Result: Down-regulated in Transcription
  misc_feature: MA Experiment 20001560 PARAMETER Experiment Name: At_Drought_Soil_Dry_P Parameter: Age (day) Value: 28
  misc_feature: MA Experiment 20001560 PARAMETER Experiment Name: At_Drought_Soil_Dry_P Parameter: Organism Value: A. thaliana
  misc_feature: MA Experiment 20001560 PARAMETER Experiment Name: At_Drought_Soil_Dry_P Parameter: Plant Line Value: WS
  misc_feature: MA Experiment 20001560 PARAMETER Experiment Name: At_Drought_Soil_Dry_P Parameter: Post Timepoint (hr) Value: None
  misc_feature: MA Experiment 20001560 PARAMETER Experiment Name: At_Drought_Soil_Dry_P Parameter: Post-Treatment Value: None
  misc_feature: MA Experiment 20001560 PARAMETER Experiment Name: At_Drought_Soil_Dry_P Parameter: Timepoint (day) Value: 14
  misc_feature: MA Experiment 20001560 PARAMETER Experiment Name: At_Drought_Soil_Dry_P Parameter: Treatment Value: Drought vs. No Drought
  misc_feature: MA Experiment ID: 20001757 Result: Up-regulated in Transcription
  misc_feature: MA Experiment 20001757 PARAMETER Experiment Name: At_50mM_NH4NO3_L-to-H_P Parameter: Timepoint (hr) Value: 6
  misc_feature: MA Experiment 20001757 PARAMETER Experiment Name: At_50mM_NH4NO3_L-to-H_P Parameter: Tissue Value: Leaf
  misc_feature: MA Experiment 20001757 PARAMETER Experiment Name: At_50mM_NH4NO3_L-to-H_P Parameter: Treatment Value: 50mM NH4NO3 vs 100mM Mannitol
  misc_feature: MA Experiment ID: 20001769 Result: Down-regulated in Transcription
  misc_feature: MA Experiment 20001769 PARAMETER Experiment Name: At_Far-red-enriched-adult_P Parameter: Age (day) Value: 28
  misc_feature: MA Experiment 20001769 PARAMETER Experiment Name: At_Far-red-enriched-adult_P Parameter: Light Value: Far-red enriched vs. White
  misc_feature: MA Experiment 20001769 PARAMETER Experiment Name: At_Far-red-enriched-adult_P Parameter: Organism Value: A. thaliana
  misc_feature: MA Experiment 20001769 PARAMETER Experiment Name: At_Far-red-enriched-adult_P Parameter: Plant Line Value: Columbia
  misc_feature: MA Experiment 20001769 PARAMETER Experiment Name: At_Far-red-enriched-adult_P Parameter: Timepoint (hr) Value: 4
  misc_feature: MA Experiment 20001769 PARAMETER Experiment Name: At_Far-red-enriched-adult_P Parameter: Tissue Value: Aerial
  misc_feature: MA Experiment ID: 20001905 Result: Down-regulated in Transcription
  misc_feature: MA Experiment 20001905 PARAMETER Experiment Name: At_Drought_Reproduction_P Parameter: Age (day) Value: 40
  misc_feature: MA Experiment 20001905 PARAMETER Experiment Name: At_Drought_Reproduction_P Parameter: Organism Value: A. thaliana
  misc_feature: MA Experiment 20001905 PARAMETER Experiment Name: At_Drought_Reproduction_P Parameter: Plant Line Value: WS
  misc_feature: MA Experiment 20001905 PARAMETER Experiment Name: At_Drought_Reproduction_P Parameter: Timepoint (day) Value: 10
  misc_feature: MA Experiment 20001905 PARAMETER Experiment Name: At_Drought_Reproduction_P Parameter: Tissue Value: Rosettes
  misc_feature: MA Experiment 20001905 PARAMETER Experiment Name: At_Drought_Reproduction_P Parameter: Treatment Value: Drought vs. No Drought
  misc_feature: MA Experiment ID: 20001911 Result: Down-regulated in Transcription
  misc_feature: MA Experiment 20001911 PARAMETER Experiment Name: At_Drought_Reproduction_P Parameter: Age (day) Value: 40
  misc_feature: MA Experiment 20001911 PARAMETER Experiment Name: At_Drought_Reproduction_P Parameter: Organism Value: A. thaliana
  misc_feature: MA Experiment 20001911 PARAMETER Experiment Name: At_Drought_Reproduction_P Parameter: Plant Line Value: WS
  misc_feature: MA Experiment 20001911 PARAMETER Experiment Name: At_Drought_Reproduction_P Parameter: Timepoint (day) Value: 10
  misc_feature: MA Experiment 20001911 PARAMETER Experiment Name: At_Drought_Reproduction_P Parameter: Tissue Value: Flowers
  misc_feature: MA Experiment 20001911 PARAMETER Experiment Name: At_Drought_Reproduction_P Parameter: Treatment Value: Drought vs. No Drought
aaaaaacacaaacatcacatgtatacacacatatagttacaaacacacatacacaaaacacagatatataaaaatgtcttgttataataaagcactattgatcggcaacaaagtcgtcgttatacttgtattcctcttatgtttggttcactcgtcagagtcacttcgaccactgtttgcatgtgatccagcaaacgggttaacccggacgctccggttctgtcgggccaatgtaccgatccatgtgagagttcaagatttgctcggaaggctcacgttgcaggagaagatccgcaacctcgtcaacaatgctgccgccgtaccacgtctcggtattggaggctatgagtggtggtccgaggctctccacggcatttccgacgttggtccaggcgctaagttcggtggtgcttttcccggtgccaccagcttccctcaggtcatcaccaccgcagcttctttcaaccagtctctatgggaagagatcggacgggtggtgtctgatgaggcaagagctatgtacaatggtggcgtggccggtctgacatattggagtccgaatgtgaatatcttgagggacccgcggtggggccgaggccaagaaactcccggagaagatcctatcgttgccgcaaaatatgccgccagctacgtccggggacttcagggtactgctgccggtaaccgccttaaagtcgccgcatgttgcaaacattacactgcttatgatcttgataattggaatggcgtcgaccgtttccacttcaacgctaaggtcacccaacaagatttagaggacacatacaacgtgccattcaaatcatgtgtttacgaaggaaaagtagcgagtgtaatgtgttcgtacaaccaagtcaatggaaagcccacatgtgctgatgaaaatctcttaaagaacactattcgtggtcaatggcgtctcaatgggtacattgtctcagattgtgactctgttgatgttttcttcaaccaacaacattacactagcactccggaagaagccgccgccagatccattaaagccggtttggacttggactgcgggccgtttttggcgattttcacggaaggtgcagtgaagaaaggattgttaacggagaatgacatcaatttagcacttgctaatacattaacagtccaaatgagacttggtatgtttgatggtaaccttgggccgtacgctaatcttgggccaagagatgtttgtactccggcccataaacatttagctcttgaagcagcccatcaagggattgttcttctcaaaaactctgctcgctctcttccactctcccccagacgccaccgcaccgtcgccgtgattggtccaaactccgacgtcactgagactatgatcggcaactatgcagggaaagcatgcgcctatacgtcgccgttgcaagggatttcaagatacgcgaggacacttcaccaagctggctgtgccggcgtggcttgcaaagggaaccaaggatttggtgcagcggaggcagcggcgcgtgaagccgacgcgacggttcttgtgatgggattagatcagtcgatagaggcagagacacgagatcgaaccgggcttctcttaccgggttatcaacaagacctagtgacccgtgtagctcaagcttctagaggtccagtcattttggtccttatgagtggtggaccaatcgatgtaaccttcgctaagaatgatcctcgtgttgctgccatcatttgggctgggtatccgggtcaagcgggtggagctgccatcgccaatatcatctttggtgctgctaatcccggaggaaaactaccaatgacatggtatccacaagattacgtggccaaagtgccaatgacggtaatggccatgagagcatccggtaattatccaggaaggacatacagattctacaaaggtccagtagtatttccatttgggttcggtttaagttacactaccttcactcatagtttggccaaaagcccattggcccaactatcagtttcactctccaatctcaactctgccaataccattctcaactcttcatcacactccatcaaagtgtctcacaccaactgcaattcatttccgaaaatgccccttcacgtcgaagtatcaaacacaggtgaattcgatggaacacacacggtgtttgtatttgctgagccgccgataaacggaataaaaggattgggtgtgaacaaacaattgatagcgttcgagaaggttcatgtcatggcaggggcaaaacagaccgttcaagttgatgttgatgcttgcaagcatcttggtgtagtggatgagtatggaaagaggagaatcccaatgggtgagcataagctgcacattggtgaccttaaacatactattttggtccaaccgcaactttgacggacgcataaaaaaaccaacaaataaggaaagcattttaacaaagtggagtgtttcctcttatttatataatatagagagataggtttattttcttatgaaattattactcaagaaagtatgaatttgtaaagaaccaccaaagggttgcttcttggttgtgtcttttttcctttaatttttttttggac

SEQ ID NO: 46444 - protein, 798 aa, Arabidopsis thaliana
  peptide (1)..(798): Ceres Seq. ID no. 12600668
  misc_feature (424)..(654): Pfam Name: Glycosyl hydrolase family 3 C terminal domain Pfam Description: Glycosyl hydrolase family 3 C terminal domain
  misc_feature (424)..(654): Pfam Name: Glycosyl hydrolase family 3 C terminal domain Pfam Description: Glycosyl hydrolase family 3 C terminal domain
  misc_feature (424)..(654): Pfam Name: Glycosyl hydrolase family 3 C terminal domain Pfam Description: Glycosyl hydrolase family 3 C terminal domain
  misc_feature (226)..(795): Homolog of NCBI NO: 15238197 NR Description: glycosyl hydrolase family 3
  misc_feature (40)..(794): Homolog of NCBI NO: 15218202 NR Description: glycosyl hydrolase family 3
  misc_feature (37)..(786): Homolog of NCBI NO: 25453520 NR Description: beta-1,4-xylosidase [imported] - Arabidopsis
  misc_feature (37)..(786): Homolog of NCBI NO: 15230897 NR Description: glycosyl hydrolase family 3; protein id:
  misc_feature (52)..(792): Homolog of NCBI NO: 18025340 NR Description: alpha-L-arabinofuranosidase/beta-D-xylosidase
  misc_feature (226)..(795): Homolog of NCBI NO: 15238197 NR Description: glycosyl hydrolase family 3
  misc_feature (37)..(786): Homolog of NCBI NO: 25453520 NR Description: beta-1,4-xylosidase [imported] - Arabidopsis
  misc_feature (52)..(792): Homolog of NCBI NO: 18025340 NR Description: alpha-L-arabinofuranosidase/beta-D-xylosidase
  misc_feature (37)..(786): Homolog of NCBI NO: 15230897 NR Description: glycosyl hydrolase family 3; protein id:
  misc_feature (37)..(786): Homolog of NCBI NO: 25453520 NR Description: beta-1,4-xylosidase [imported] - Arabidopsis
  misc_feature (40)..(794): Homolog of NCBI NO: 15218202 NR Description: glycosyl hydrolase family 3
  misc_feature (226)..(795): Homolog of NCBI NO: 15238197 NR Description: glycosyl hydrolase family 3
  misc_feature (33)..(795): Homolog of NCBI NO: 18378991 NR Description: glycosyl hydrolase family 3
  misc_feature (38)..(795): Homolog of NCBI NO: 25518461 NR Description: hypothetical protein T14P4.8 - Arabidopsis
  misc_feature (38)..(795): Homolog of NCBI NO: 15237736 NR Description: glycosyl hydrolase family 3; protein id:
  misc_feature (35)..(792): Homolog of NCBI NO: 38344900 NR Description: OSJNBb0079B02.3 [Oryza sativa (japonica
  misc_feature (25)..(792): Homolog of NCBI NO: 15242492 NR Description: glycosyl hydrolase family 3
  misc_feature (33)..(795): Homolog of NCBI NO: 18378991 NR Description: glycosyl hydrolase family 3
  misc_feature (38)..(795): Homolog of NCBI NO: 25518461 NR Description: hypothetical protein T14P4.8 - Arabidopsis
  misc_feature (38)..(795): Homolog of NCBI NO: 15237736 NR Description: glycosyl hydrolase family 3; protein id:
  misc_feature (35)..(792): Homolog of NCBI NO: 38344900 NR Description: OSJNBb0079B02.3 [Oryza sativa (japonica
  misc_feature (25)..(792): Homolog of NCBI NO: 15242492 NR Description: glycosyl hydrolase family 3
  misc_feature (52)..(792): Homolog of NCBI NO: 18025340 NR Description: alpha-L-arabinofuranosidase/beta-D-xylosidase
  misc_feature (37)..(786): Homolog of NCBI NO: 15230897 NR Description: glycosyl hydrolase family 3; protein id:
  misc_feature (40)..(794): Homolog of NCBI NO: 15218202 NR Description: glycosyl hydrolase family 3
  misc_feature (25)..(792): Homolog of NCBI NO: 15242492 NR Description: glycosyl hydrolase family 3
  misc_feature (35)..(792): Homolog of NCBI NO: 38344900 NR Description: OSJNBb0079B02.3 [Oryza sativa (japonica
  misc_feature (38)..(795): Homolog of NCBI NO: 15237736 NR Description: glycosyl hydrolase family 3; protein id:
  misc_feature (38)..(795): Homolog of NCBI NO: 25518461 NR Description: hypothetical protein T14P4.8 - Arabidopsis
  misc_feature (33)..(795): Homolog of NCBI NO: 18378991 NR Description: glycosyl hydrolase family 3
KNTNITCIHTYSYKHTYTKHRYIKMSCYNKALLIGNKVVVILVFLLCLVHSSESLRPLFACDPANGLTRTLRFCRANVPIHVRVQDLLGRLTLQEKIRNLVNNAAAVPRLGIGGYEWWSEALHGISDVGPGAKFGGAFPGATSFPQVITTAASFNQSLWEEIGRVVSDEARAMYNGGVAGLTYWSPNVNILRDPRWGRGQETPGEDPIVAAKYAASYVRGLQGTAAGNRLKVAACCKHYTAYDLDNWNGVDRFHFNAKVTQQDLEDTYNVPFKSCVYEGKVASVMCSYNQVNGKPTCADENLLKNTIRGQWRLNGYIVSDCDSVDVFFNQQHYTSTPEEAAARSIKAGLDLDCGPFLAIFTEGAVKKGLLTENDINLALANTLTVQMRLGMFDGNLGPYANLGPRDVCTPAHKHLALEAAHQGIVLLKNSARSLPLSPRRHRTVAVIGPNSDVTETMIGNYAGKACAYTSPLQGISRYARTLHQAGCAGVACKGNQGFGAAEAAAREADATVLVMGLDQSIEAETRDRTGLLLPGYQQDLVTRVAQASRGPVILVLMSGGPIDVTFAKNDPRVAAIIWAGYPGQAGGAAIANIIFGAANPGGKLPMTWYPQDYVAKVPMTVMAMRASGNYPGRTYRFYKGPVVFPFGFGLSYTTFTHSLAKSPLAQLSVSLSNLNSANTILNSSSHSIKVSHTNCNSFPKMPLHVEVSNTGEFDGTHTVFVFAEPPINGIKGLGVNKQLIAFEKVHVMAGAKQTVQVDVDACKHLGVVDEYGKRRIPMGEHKLHIGDLKHTILVQPQL

SEQ ID NO: 46445 - protein, 774 aa, Arabidopsis thaliana
  peptide (1)..(774): Ceres Seq. ID no. 12600669
  misc_feature (400)..(630): Pfam Name: Glycosyl hydrolase family 3 C terminal domain Pfam Description: Glycosyl hydrolase family 3 C terminal domain
  misc_feature (400)..(630): Pfam Name: Glycosyl hydrolase family 3 C terminal domain Pfam Description: Glycosyl hydrolase family 3 C terminal domain
  misc_feature (400)..(630): Pfam Name: Glycosyl hydrolase family 3 C terminal domain Pfam Description: Glycosyl hydrolase family 3 C terminal domain
  misc_feature (202)..(771): Homolog of NCBI NO: 15238197 NR Description: glycosyl hydrolase family 3
  misc_feature (16)..(770): Homolog of NCBI NO: 15218202 NR Description: glycosyl hydrolase family 3
  misc_feature (13)..(762): Homolog of NCBI NO: 25453520 NR Description: beta-1,4-xylosidase [imported] - Arabidopsis
  misc_feature (13)..(762): Homolog of NCBI NO: 15230897 NR Description: glycosyl hydrolase family 3; protein id:
  misc_feature (28)..(768): Homolog of NCBI NO: 18025340 NR Description: alpha-L-arabinofuranosidase/beta-D-xylosidase
  misc_feature (202)..(771): Homolog of NCBI NO: 15238197 NR Description: glycosyl hydrolase family 3
  misc_feature (13)..(762): Homolog of NCBI NO: 25453520 NR Description: beta-1,4-xylosidase [imported] - Arabidopsis
  misc_feature (28)..(768): Homolog of NCBI NO: 18025340 NR Description: alpha-L-arabinofuranosidase/beta-D-xylosidase
  misc_feature (13)..(762): Homolog of NCBI NO: 15230897 NR Description: glycosyl hydrolase family 3; protein id:
  misc_feature (13)..(762): Homolog of NCBI NO: 25453520 NR Description: beta-1,4-xylosidase [imported] - Arabidopsis
  misc_feature (16)..(770): Homolog of NCBI NO: 15218202 NR Description: glycosyl hydrolase family 3
  misc_feature (202)..(771): Homolog of NCBI NO: 15238197 NR Description: glycosyl hydrolase family 3
  misc_feature (9)..(771): Homolog of NCBI NO: 18378991 NR Description: glycosyl hydrolase family 3
  misc_feature (14)..(771): Homolog of NCBI NO: 25518461 NR Description: hypothetical protein T14P4.8 - Arabidopsis
  misc_feature (14)..(771): Homolog of NCBI NO: 15237736 NR Description: glycosyl hydrolase family 3; protein id:
  misc_feature (11)..(768): Homolog of NCBI NO: 38344900 NR Description: OSJNBb0079B02.3 [Oryza sativa (japonica
  misc_feature (1)..(768): Homolog of NCBI NO: 15242492 NR Description: glycosyl hydrolase family 3
  misc_feature (9)..(771): Homolog of NCBI NO: 18378991 NR Description: glycosyl hydrolase family 3
  misc_feature (14)..(771): Homolog of NCBI NO: 25518461 NR Description: hypothetical protein T14P4.8 - Arabidopsis
  misc_feature (14)..(771): Homolog of NCBI NO: 15237736 NR Description: glycosyl hydrolase family 3; protein id:
  misc_feature (11)..(768): Homolog of NCBI NO: 38344900 NR Description: OSJNBb0079B02.3 [Oryza sativa (japonica
  misc_feature (1)..(768): Homolog of NCBI NO: 15242492 NR Description: glycosyl hydrolase family 3
  misc_feature (28)..(768): Homolog of NCBI NO: 18025340 NR Description: alpha-L-arabinofuranosidase/beta-D-xylosidase
  misc_feature (13)..(762): Homolog of NCBI NO: 15230897 NR Description: glycosyl hydrolase family 3; protein id:
  misc_feature (16)..(770): Homolog of NCBI NO: 15218202 NR Description: glycosyl hydrolase family 3
  misc_feature (1)..(768): Homolog of NCBI NO: 15242492 NR Description: glycosyl hydrolase family 3
  misc_feature (11)..(768): Homolog of NCBI NO: 38344900 NR Description: OSJNBb0079B02.3 [Oryza sativa (japonica
  misc_feature (14)..(771): Homolog of NCBI NO: 15237736 NR Description: glycosyl hydrolase family 3; protein id:
  misc_feature (14)..(771): Homolog of NCBI NO: 25518461 NR Description: hypothetical protein T14P4.8 - Arabidopsis
  misc_feature (9)..(771): Homolog of NCBI NO: 18378991 NR Description: glycosyl hydrolase family 3
MSCYNKALLIGNKVVVILVFLLCLVHSSESLRPLFACDPANGLTRTLRFCRANVPIHVRVQDLLGRLTLQEKIRNLVNNAAAVPRLGIGGYEWWSEALHGISDVGPGAKFGGAFPGATSFPQVITTAASFNQSLWEEIGRVVSDEARAMYNGGVAGLTYWSPNVNILRDPRWGRGQETPGEDPIVAAKYAASYVRGLQGTAAGNRLKVAACCKHYTAYDLDNWNGVDRFHFNAKVTQQDLEDTYNVPFKSCVYEGKVASVMCSYNQVNGKPTCADENLLKNTIRGQWRLNGYIVSDCDSVDVFFNQQHYTSTPEEAAARSIKAGLDLDCGPFLAIFTEGAVKKGLLTENDINLALANTLTVQMRLGMFDGNLGPYANLGPRDVCTPAHKHLALEAAHQGIVLLKNSARSLPLSPRRHRTVAVIGPNSDVTETMIGNYAGKACAYTSPLQGISRYARTLHQAGCAGVACKGNQGFGAAEAAAREADATVLVMGLDQSIEAETRDRTGLLLPGYQQDLVTRVAQASRGPVILVLMSGGPIDVTFAKNDPRVAAIIWAGYPGQAGGAAIANIIFGAANPGGKLPMTWYPQDYVAKVPMTVMAMRASGNYPGRTYRFYKGPVVFPFGFGLSYTTFTHSLAKSPLAQLSVSLSNLNSANTILNSSSHSIKVSHTNCNSFPKMPLHVEVSNTGEFDGTHTVFVFAEPPINGIKGLGVNKQLIAFEKVHVMAGAKQTVQVDVDACKHLGVVDEYGKRRIPMGEHKLHIGDLKHTILVQPQL

SEQ ID NO: 46446 - protein, 626 aa, Arabidopsis thaliana
  peptide (1)..(626): Ceres Seq. ID no. 12600670
  misc_feature (252)..(482): Pfam Name: Glycosyl hydrolase family 3 C terminal domain Pfam Description: Glycosyl hydrolase family 3 C terminal domain
  misc_feature (252)..(482): Pfam Name: Glycosyl hydrolase family 3 C terminal domain Pfam Description: Glycosyl hydrolase family 3 C terminal domain
  misc_feature (252)..(482): Pfam Name: Glycosyl hydrolase family 3 C terminal domain Pfam Description: Glycosyl hydrolase family 3 C terminal domain
  misc_feature (54)..(623): Homolog of NCBI NO: 15238197 NR Description: glycosyl hydrolase family 3
  misc_feature (1)..(622): Homolog of NCBI NO: 15218202 NR Description: glycosyl hydrolase family 3
  misc_feature (1)..(614): Homolog of NCBI NO: 25453520 NR Description: beta-1,4-xylosidase [imported] - Arabidopsis
  misc_feature (1)..(614): Homolog of NCBI NO: 15230897 NR Description: glycosyl hydrolase family 3; protein id:
  misc_feature (1)..(620): Homolog of NCBI NO: 18025340 NR Description: alpha-L-arabinofuranosidase/beta-D-xylosidase
  misc_feature (54)..(623): Homolog of NCBI NO: 15238197 NR Description: glycosyl hydrolase family 3
  misc_feature (1)..(614): Homolog of NCBI NO: 25453520 NR Description: beta-1,4-xylosidase [imported] - Arabidopsis
  misc_feature (1)..(620): Homolog of NCBI NO: 18025340 NR Description: alpha-L-arabinofuranosidase/beta-D-xylosidase
  misc_feature (1)..(614): Homolog of NCBI NO: 15230897 NR Description: glycosyl hydrolase family 3; protein id:
  misc_feature (1)..(614): Homolog of NCBI NO: 25453520 NR Description: beta-1,4-xylosidase [imported] - Arabidopsis
  misc_feature (1)..(622): Homolog of NCBI NO: 15218202 NR Description: glycosyl hydrolase family 3
  misc_feature (54)..(623): Homolog of NCBI NO: 15238197 NR Description: glycosyl hydrolase family 3
  misc_feature (1)..(623): Homolog of NCBI NO: 18378991 NR Description: glycosyl hydrolase family 3
  misc_feature (1)..(623): Homolog of NCBI NO: 25518461 NR Description: hypothetical protein T14P4.8 - Arabidopsis
  misc_feature (1)..(623): Homolog of NCBI NO: 15237736 NR Description: glycosyl hydrolase family 3; protein id:
  misc_feature (1)..(620): Homolog of NCBI NO: 38344900 NR Description: OSJNBb0079B02.3 [Oryza sativa (japonica
  misc_feature (1)..(620): Homolog of NCBI NO: 15242492 NR Description: glycosyl hydrolase family 3
  misc_feature (1)..(623): Homolog of NCBI NO: 18378991 NR Description: glycosyl hydrolase family 3
  misc_feature (1)..(623): Homolog of NCBI NO: 25518461 NR Description: hypothetical protein T14P4.8 - Arabidopsis
  misc_feature (1)..(623): Homolog of NCBI NO: 15237736 NR Description: glycosyl hydrolase family 3; protein id:
  misc_feature (1)..(620): Homolog of NCBI NO: 38344900 NR Description: OSJNBb0079B02.3 [Oryza sativa (japonica
  misc_feature (1)..(620): Homolog of NCBI NO: 15242492 NR Description: glycosyl hydrolase family 3
  misc_feature (1)..(620): Homolog of NCBI NO: 18025340 NR Description: alpha-L-arabinofuranosidase/beta-D-xylosidase
  misc_feature (1)..(614): Homolog of NCBI NO: 15230897 NR Description: glycosyl hydrolase family 3; protein id:
  misc_feature (1)..(622): Homolog of NCBI NO: 15218202 NR Description: glycosyl hydrolase family 3
  misc_feature (1)..(620): Homolog of NCBI NO: 15242492 NR Description: glycosyl hydrolase family 3
  misc_feature (1)..(620): Homolog of NCBI NO: 38344900 NR Description: OSJNBb0079B02.3 [Oryza sativa (japonica
  misc_feature (1)..(623): Homolog of NCBI NO: 15237736 NR Description: glycosyl hydrolase family 3; protein id:
  misc_feature (1)..(623): Homolog of NCBI NO: 25518461 NR Description: hypothetical protein T14P4.8 - Arabidopsis
  misc_feature (1)..(623): Homolog of NCBI NO: 18378991 NR Description: glycosyl hydrolase family 3
MYNGGVAGLTYWSPNVNILRDPRWGRGQETPGEDPIVAAKYAASYVRGLQGTAAGNRLKVAACCKHYTAYDLDNWNGVDRFHFNAKVTQQDLEDTYNVPFKSCVYEGKVASVMCSYNQVNGKPTCADENLLKNTIRGQWRLNGYIVSDCDSVDVFFNQQHYTSTPEEAAARSIKAGLDLDCGPFLAIFTEGAVKKGLLTENDINLALANTLTVQMRLGMFDGNLGPYANLGPRDVCTPAHKHLALEAAHQGIVLLKNSARSLPLSPRRHRTVAVIGPNSDVTETMIGNYAGKACAYTSPLQGISRYARTLHQAGCAGVACKGNQGFGAAEAAAREADATVLVMGLDQSIEAETRDRTGLLLPGYQQDLVTRVAQASRGPVILVLMSGGPIDVTFAKNDPRVAAIIWAGYPGQAGGAAIANIIFGAANPGGKLPMTWYPQDYVAKVPMTVMAMRASGNYPGRTYRFYKGPVVFPFGFGLSYTTFTHSLAKSPLAQLSVSLSNLNSANTILNSSSHSIKVSHTNCNSFPKMPLHVEVSNTGEFDGTHTVFVFAEPPINGIKGLGVNKQLIAFEKVHVMAGAKQTVQVDVDACKHLGVVDEYGKRRIPMGEHKLHIGDLKHTILVQPQL

SEQ ID NO: 46447 - DNA, 1488 bp, Arabidopsis thaliana
  misc_feature (1)..(1488): Ceres Seq. ID no. 13592020
  misc_feature: MA Experiment ID: 20000227 Result: Up-regulated in Transcription
  misc_feature: MA Experiment 20000227 PARAMETER Experiment Name: At_Root-Tips-vs-Tops_P Parameter: Tissue Value: Root Tips vs. Root Tops
  misc_feature: MA Experiment ID: 20000234 Result: Up-regulated in Transcription
  misc_feature: MA Experiment 20000234 PARAMETER Experiment Name: At_Siliques_P Parameter: Age (day) Value: 21
  misc_feature: MA Experiment 20000234 PARAMETER Experiment Name: At_Siliques_P Parameter: Organism Value: A. thaliana
  misc_feature: MA Experiment 20000234 PARAMETER Experiment Name: At_Siliques_P Parameter: Plant Line Value: WS
  misc_feature: MA Experiment 20000234 PARAMETER Experiment Name: At_Siliques_P Parameter: Tissue Value: Less Than 5mm Siliques vs. Whole Plant
  misc_feature: MA Experiment ID: 20000437 Result: Down-regulated in Transcription
  misc_feature: MA Experiment 20000437 PARAMETER Experiment Name: At_Drought_P Parameter: Age (day) Value: 8
  misc_feature: MA Experiment 20000437 PARAMETER Experiment Name: At_Drought_P Parameter: Organism Value: A. thaliana
  misc_feature: MA Experiment 20000437 PARAMETER Experiment Name: At_Drought_P Parameter: Plant Line Value: WS
  misc_feature: MA Experiment 20000437 PARAMETER Experiment Name: At_Drought_P Parameter: Timepoint (hr) Value: 24
  misc_feature: MA Experiment 20000437 PARAMETER Experiment Name: At_Drought_P Parameter: Tissue Value: Whole Plant
  misc_feature: MA Experiment 20000437 PARAMETER Experiment Name: At_Drought_P Parameter: Treatment Value: Drought vs. No Drought
  misc_feature: MA Experiment ID: 20000443 Result: Up-regulated in Transcription
  misc_feature: MA Experiment 20000443 PARAMETER Experiment Name: At_1uM_BR-BRZ__P Parameter: Tissue Value: Shoot Apices
  misc_feature: MA Experiment 20000443 PARAMETER Experiment Name: At_1uM_BR-BRZ__P Parameter: Treatment Value: 1uM BRZ vs. No Treatment
  misc_feature: MA Experiment ID: 20000495 Result: Up-regulated in Transcription
  misc_feature: MA Experiment 20000495 PARAMETER Experiment Name: At_Guard_Cells_P Parameter: Harvest Date Value: 8/2/2002
  misc_feature: MA Experiment 20000495 PARAMETER Experiment Name: At_Guard_Cells_P Parameter: Organism Value: A. thaliana
  misc_feature: MA Experiment 20000495 PARAMETER Experiment Name: At_Guard_Cells_P Parameter: Tissue Value: Guard Cells vs. Leaves
  misc_feature: MA Experiment ID: 20000794 Result: Down-regulated in Transcription
  misc_feature: MA Experiment 20000794 PARAMETER Experiment Name: At_Petals_P Parameter: Age (day) Value: 23-25 days
  misc_feature: MA Experiment 20000794 PARAMETER Experiment Name: At_Petals_P Parameter: Plant Line Value: WS
  misc_feature: MA Experiment 20000794 PARAMETER Experiment Name: At_Petals_P Parameter: Tissue Value: Petals vs. Whole plant
  misc_feature: MA Experiment ID: 20001248 Result: Down-regulated in Transcription
  misc_feature: MA Experiment 20001248 PARAMETER Experiment Name: At_Far-red-induction_P Parameter: Age (day) Value: 7
  misc_feature: MA Experiment 20001248 PARAMETER Experiment Name: At_Far-red-induction_P Parameter: Light Value: Far-red vs. White
  misc_feature: MA Experiment 20001248 PARAMETER Experiment Name: At_Far-red-induction_P Parameter: Organism Value: A. thaliana
  misc_feature: MA Experiment 20001248 PARAMETER Experiment Name: At_Far-red-induction_P Parameter: Plant Line Value: Columbia
  misc_feature: MA Experiment 20001248 PARAMETER Experiment Name: At_Far-red-induction_P Parameter: Timepoint (hr) Value: 4
  misc_feature: MA Experiment 20001248 PARAMETER Experiment Name: At_Far-red-induction_P Parameter: Tissue Value: Whole Plant
  misc_feature: MA Experiment ID: 20001560 Result: Up-regulated in Transcription
  misc_feature: MA Experiment 20001560 PARAMETER Experiment Name: At_Drought_Soil_Dry_P Parameter: Age (day) Value: 28
  misc_feature: MA Experiment 20001560 PARAMETER Experiment Name: At_Drought_Soil_Dry_P Parameter: Organism Value: A. thaliana
  misc_feature: MA Experiment 20001560 PARAMETER Experiment Name: At_Drought_Soil_Dry_P Parameter: Plant Line Value: WS
  misc_feature: MA Experiment 20001560 PARAMETER Experiment Name: At_Drought_Soil_Dry_P Parameter: Post Timepoint (hr) Value: None
  misc_feature: MA Experiment 20001560 PARAMETER Experiment Name: At_Drought_Soil_Dry_P Parameter: Post-Treatment Value: None
  misc_feature: MA Experiment 20001560 PARAMETER Experiment Name: At_Drought_Soil_Dry_P Parameter: Timepoint (day) Value: 14
  misc_feature: MA Experiment 20001560 PARAMETER Experiment Name: At_Drought_Soil_Dry_P Parameter: Treatment Value: Drought vs. No Drought
ggtgaagctccgatctgagtttttagcaatggcgaaactaaaccctaaattcatctctttgattcttttcgctctcgtggtgatcgtctctgctgaagttatcttcgaggagaaattcgaagatggatgggagaagagatgggtaaaatctgactggaagaaagatgataatactgctggggaatggaaacacacagctggaaattggtctggtgatgctaacgataaaggtatccaaactagcgaggactacagattctacgctatatcagctgaattccctgagtttagcaacaaggataagaccttagtcttccaattctctgtcaagcatgagcagaagcttgactgtggtggtggctacatgaagttgctaagtgatgatgttgaccagacgaaattcggaggagacactccttacagcattatgtttgggccagatatttgtggctacagcactaagaaagtacatgctatccttacttacaatggaaccaaccatttgatcaagaaggaggtcccatgtgagactgatcagcttactcacgtgtacaccttcgtcctccgtccagatgctacttacagtattttgattgataatgttgagaagcaaactggtagcctttactctgactgggatcttctcccagcaaagaagattaaggatccaagtgctaagaagcctgaggactgggatgacaaagagtacattccagatccagaagacactaagccagcgggatatgatgacatcccaaaggagattccagacactgacgcaaagaagcctgaggactgggatgatgaagaagatggtgagtggactgcccctaccattcccaaccccgagtacaatggtgaatggaagcccaagaaaattaagaaccccgcttacaagggcaagtggaaggctccaatgatcgacaaccctgaattcaaggatgacccagaactctatgtcttccccaaattgaagtatgttggagttgagttgtggcaggtgaaatctggttccttgttcgacaatgtcttggtcagcgatgacccagagtacgctaagaagttggccgaggaaacctggggaaagcacaaggatgcggagaaagcagcatttgacgaagctgagaagaagagagaggaagaggaatcaaaggatgctcctgctgaatccgacgctgaggaagaagcagaagatgatgacaatgaaggagatgactcagacaatgaatcaaagtctgaggaaaccaaggaggccgaggaaaccaaggaagccgaggaaaccgatgccgcccatgacgagctctaagcaaaggtggaggattaaaaagttttcagagtcttaattgttcttttaaacttttcttttaaaaggaattctttagctctagtttggttggaatgtagaactttttagctattattatggtgaaatggttgtggtaactttgttttagactttgagaaaatcctgactttctccttctcttt

SEQ ID NO: 46448 - protein, 434 aa, Arabidopsis thaliana
  peptide (1)..(434): Ceres Seq. ID no. 13592021
  misc_feature (33)..(345): Pfam Name: Calreticulin family Pfam Description: Calreticulin family
  misc_feature (33)..(345): Pfam Name: Calreticulin family Pfam Description: Calreticulin family
  misc_feature (12)..(420): Homolog of NCBI NO: 11131769 NR Description: Calreticulin precursor
  misc_feature (14)..(434): Homolog of NCBI NO: 11131904 NR Description: Calreticulin precursor
  misc_feature (14)..(434): Homolog of NCBI NO: 11131745 NR Description: Calreticulin precursor
  misc_feature (30)..(434): Homolog of NCBI NO: 1009712 NR Description: calreticulin
  misc_feature (10)..(431): Homolog of NCBI NO: 25295763 NR Description: hypothetical protein [imported] - Arabidopsis
  misc_feature (12)..(420): Homolog of NCBI NO: 11131769 NR Description: Calreticulin precursor
  misc_feature (14)..(434): Homolog of NCBI NO: 11131745 NR Description: Calreticulin precursor
  misc_feature (10)..(431): Homolog of NCBI NO: 25295763 NR Description: hypothetical protein [imported] - Arabidopsis
  misc_feature (10)..(434): Homolog of NCBI NO: 15223517 NR Description: calreticulin 1 (CRT1) [Arabidopsis thaliana]
  misc_feature (10)..(424): Homolog of NCBI NO: 24417462 NR Description: unknown [Arabidopsis thaliana]
  misc_feature (10)..(434): Homolog of NCBI NO: 12643243 NR Description: CALRETICULIN 2 PRECURSOR
  misc_feature (10)..(434): Homolog of NCBI NO: 21555174 NR Description: putative calcium-binding protein, calreticulin
  misc_feature (10)..(434): Homolog of NCBI NO: 15217459 NR Description: calreticulin 2 (CRT2) [Arabidopsis thaliana]
  misc_feature (30)..(434): Homolog of NCBI NO: 1009712 NR Description: calreticulin
  misc_feature (14)..(434): Homolog of NCBI NO: 11131904 NR Description: Calreticulin precursor
  misc_feature (10)..(434): Homolog of NCBI NO: 15217459 NR Description: calreticulin 2 (CRT2) [Arabidopsis thaliana]
  misc_feature (10)..(434): Homolog of NCBI NO: 21555174 NR Description: putative calcium-binding protein, calreticulin
  misc_feature (10)..(434): Homolog of NCBI NO: 12643243 NR Description: CALRETICULIN 2 PRECURSOR
  misc_feature (10)..(424): Homolog of NCBI NO: 24417462 NR Description: unknown [Arabidopsis thaliana]
  misc_feature (10)..(434): Homolog of NCBI NO: 15223517 NR Description: calreticulin 1 (CRT1) [Arabidopsis thaliana]
VKLRSEFLAMAKLNPKFISLILFALVVIVSAEVIFEEKFEDGWEKRWVKSDWKKDDNTAGEWKHTAGNWSGDANDKGIQTSEDYRFYAISAEFPEFSNKDKTLVFQFSVKHEQKLDCGGGYMKLLSDDVDQTKFGGDTPYSIMFGPDICGYSTKKVHAILTYNGTNHLIKKEVPCETDQLTHVYTFVLRPDATYSILIDNVEKQTGSLYSDWDLLPAKKIKDPSAKKPEDWDDKEYIPDPEDTKPAGYDDIPKEIPDTDAKKPEDWDDEEDGEWTAPTIPNPEYNGEWKPKKIKNPAYKGKWKAPMIDNPEFKDDPELYVFPKLKYVGVELWQVKSGSLFDNVLVSDDPEYAKKLAEETWGKHKDAEKAAFDEAEKKREEEESKDAPAESDAEEEAEDDDNEGDDSDNESKSEETKEAEETKEAEETDAAHDEL

SEQ ID NO: 46449 - protein, 425 aa, Arabidopsis thaliana
  peptide (1)..(425): Ceres Seq. ID no. 13592022
  misc_feature (24)..(336): Pfam Name: Calreticulin family Pfam Description: Calreticulin family
  misc_feature (24)..(336): Pfam Name: Calreticulin family Pfam Description: Calreticulin family
  misc_feature (3)..(411): Homolog of NCBI NO: 11131769 NR Description: Calreticulin precursor
  misc_feature (5)..(425): Homolog of NCBI NO: 11131904 NR Description: Calreticulin precursor
  misc_feature (5)..(425): Homolog of NCBI NO: 11131745 NR Description: Calreticulin precursor
  misc_feature (21)..(425): Homolog of NCBI NO: 1009712 NR Description: calreticulin
  misc_feature (1)..(422): Homolog of NCBI NO: 25295763 NR Description: hypothetical protein [imported] - Arabidopsis
  misc_feature (3)..(411): Homolog of NCBI NO: 11131769 NR Description: Calreticulin precursor
  misc_feature (5)..(425): Homolog of NCBI NO: 11131745 NR Description: Calreticulin precursor
  misc_feature (1)..(422): Homolog of NCBI NO: 25295763 NR Description: hypothetical protein [imported] - Arabidopsis
  misc_feature (1)..(425): Homolog of NCBI NO: 15223517 NR Description: calreticulin 1 (CRT1) [Arabidopsis thaliana]
  misc_feature (1)..(415): Homolog of NCBI NO: 24417462 NR Description: unknown [Arabidopsis thaliana]
  misc_feature (1)..(425): Homolog of NCBI NO: 12643243 NR Description: CALRETICULIN 2 PRECURSOR
  misc_feature (1)..(425): Homolog of NCBI NO: 21555174 NR Description: putative calcium-binding protein, calreticulin
  misc_feature (1)..(425): Homolog of NCBI NO: 15217459 NR Description: calreticulin 2 (CRT2) [Arabidopsis thaliana]
  misc_feature (21)..(425): Homolog of NCBI NO: 1009712 NR Description: calreticulin
  misc_feature (5)..(425): Homolog of NCBI NO: 11131904 NR Description: Calreticulin precursor
  misc_feature (1)..(425): Homolog of NCBI NO: 15217459 NR Description: calreticulin 2 (CRT2) [Arabidopsis thaliana]
  misc_feature (1)..(425): Homolog of NCBI NO: 21555174 NR Description: putative calcium-binding protein, calreticulin
  misc_feature (1)..(425): Homolog of NCBI NO: 12643243 NR Description: CALRETICULIN 2 PRECURSOR
  misc_feature (1)..(415): Homolog of NCBI NO: 24417462 NR Description: unknown [Arabidopsis thaliana]
  misc_feature (1)..(425): Homolog of NCBI NO: 15223517 NR Description: calreticulin 1 (CRT1) [Arabidopsis thaliana]
MAKLNPKFISLILFALVVIVSAEVIFEEKFEDGWEKRWVKSDWKKDDNTAGEWKHTAGNWSGDANDKGIQTSEDYRFYAISAEFPEFSNKDKTLVFQFSVKHEQKLDCGGGYMKLLSDDVDQTKFGGDTPYSIMFGPDICGYSTKKVHAILTYNGTNHLIKKEVPCETDQLTHVYTFVLRPDATYSILIDNVEKQTGSLYSDWDLLPAKKIKDPSAKKPEDWDDKEYIPDPEDTKPAGYDDIPKEIPDTDAKKPEDWDDEEDGEWTAPTIPNPEYNGEWKPKKIKNPAYKGKWKAPMIDNPEFKDDPELYVFPKLKYVGVELWQVKSGSLFDNVLVSDDPEYAKKLAEETWGKHKDAEKAAFDEAEKKREEEESKDAPAESDAEEEAEDDDNEGDDSDNESKSEETKEAEETKEAEETDAAHDEL

SEQ ID NO: 46450 - protein, 313 aa, Arabidopsis thaliana
  peptide (1)..(313): Ceres Seq. ID no. 13592023
  misc_feature (1)..(224): Pfam Name: Calreticulin family Pfam Description: Calreticulin family
  misc_feature (1)..(224): Pfam Name: Calreticulin family Pfam Description: Calreticulin family
  misc_feature (1)..(299): Homolog of NCBI NO: 11131769 NR Description: Calreticulin precursor
  misc_feature (1)..(313): Homolog of NCBI NO: 11131904 NR Description: Calreticulin precursor
  misc_feature (1)..(313): Homolog of NCBI NO: 11131745 NR Description: Calreticulin precursor
  misc_feature (1)..(313): Homolog of NCBI NO: 1009712 NR Description: calreticulin
  misc_feature (1)..(310): Homolog of NCBI NO: 25295763 NR Description: hypothetical protein [imported] - Arabidopsis
  misc_feature (1)..(299): Homolog of NCBI NO: 11131769 NR Description: Calreticulin precursor
  misc_feature (1)..(313): Homolog of NCBI NO: 11131745 NR Description: Calreticulin precursor
  misc_feature (1)..(310): Homolog of NCBI NO: 25295763 NR Description: hypothetical protein [imported] - Arabidopsis
  misc_feature (1)..(313): Homolog of NCBI NO: 15223517 NR Description: calreticulin 1 (CRT1) [Arabidopsis thaliana]
  misc_feature (1)..(303): Homolog of NCBI NO: 24417462 NR Description: unknown [Arabidopsis thaliana]
  misc_feature (1)..(313): Homolog of NCBI NO: 12643243 NR Description: CALRETICULIN 2 PRECURSOR
  misc_feature (1)..(313): Homolog of NCBI NO: 21555174 NR Description: putative calcium-binding protein, calreticulin
  misc_feature (1)..(313): Homolog of NCBI NO: 15217459 NR Description: calreticulin 2 (CRT2) [Arabidopsis thaliana]
  misc_feature (1)..(313): Homolog of NCBI NO: 1009712 NR Description: calreticulin
  misc_feature (1)..(313): Homolog of NCBI NO: 11131904 NR Description: Calreticulin precursor
  misc_feature (1)..(313): Homolog of NCBI NO: 15217459 NR Description: calreticulin 2 (CRT2) [Arabidopsis thaliana]
  misc_feature (1)..(313): Homolog of NCBI NO: 21555174 NR Description: putative calcium-binding protein, calreticulin
  misc_feature (1)..(313): Homolog of NCBI NO: 12643243 NR Description: CALRETICULIN 2 PRECURSOR
  misc_feature (1)..(303): Homolog of NCBI NO: 24417462 NR Description: unknown [Arabidopsis thaliana]
  misc_feature (1)..(313): Homolog of NCBI NO: 15223517 NR Description: calreticulin 1 (CRT1) [Arabidopsis thaliana]
MKLLSDDVDQTKFGGDTPYSIMFGPDICGYSTKKVHAILTYNGTNHLIKKEVPCETDQLTHVYTFVLRPDATYSILIDNVEKQTGSLYSDWDLLPAKKIKDPSAKKPEDWDDKEYIPDPEDTKPAGYDDIPKEIPDTDAKKPEDWDDEEDGEWTAPTIPNPEYNGEWKPKKIKNPAYKGKWKAPMIDNPEFKDDPELYVFPKLKYVGVELWQVKSGSLFDNVLVSDDPEYAKKLAEETWGKHKDAEKAAFDEAEKKREEEESKDAPAESDAEEEAEDDDNEGDDSDNESKSEETKEAEETKEAEETDAAHDEL

SEQ ID NO: 46451 - DNA, 750 bp, Arabidopsis thaliana
  misc_feature (1)..(750): Ceres Seq. ID no. 13578557
  misc_feature: MA Experiment ID: 20000184 Result: Up-regulated in Transcription
  misc_feature: MA Experiment 20000184 PARAMETER Experiment Name: At_Shoots__P Parameter: Age (day) Value: 7
  misc_feature: MA Experiment 20000184 PARAMETER Experiment Name: At_Shoots__P Parameter: Tissue Value: Shoots vs. Whole Plant
  misc_feature: MA Experiment ID: 20000185 Result: Down-regulated in Transcription
  misc_feature: MA Experiment 20000185 PARAMETER Experiment Name: At_Roots__P Parameter: Age (day) Value: 7 vs. 21
  misc_feature: MA Experiment 20000185 PARAMETER Experiment Name: At_Roots__P Parameter: Organism Value: A. thaliana
  misc_feature: MA Experiment 20000185 PARAMETER Experiment Name: At_Roots__P Parameter: Tissue Value: Roots vs. Whole Plant
  misc_feature: MA Experiment ID: 20000227 Result: Down-regulated in Transcription
  misc_feature: MA Experiment 20000227 PARAMETER Experiment Name: At_Root-Tips-vs-Tops_P Parameter: Tissue Value: Root Tips vs. Root Tops
  misc_feature: MA Experiment ID: 20000264 Result: Up-regulated in Transcription
  misc_feature: MA Experiment 20000264 PARAMETER Experiment Name: At_Open_Flower_P Parameter: Age (day) Value: 21
  misc_feature: MA Experiment 20000264 PARAMETER Experiment Name: At_Open_Flower_P Parameter: Plant Line Value: WS
  misc_feature: MA Experiment 20000264 PARAMETER Experiment Name: At_Open_Flower_P Parameter: Tissue Value: Open Flower vs. Whole Plant
  misc_feature: MA Experiment ID: 20000438 Result: Up-regulated in Transcription
  misc_feature: MA Experiment 20000438 PARAMETER Experiment Name: At_Shoots__P Parameter: Age (day) Value: 14
  misc_feature: MA Experiment 20000438 PARAMETER Experiment Name: At_Shoots__P Parameter: Tissue Value: Shoots vs. Whole Plant
  misc_feature: MA Experiment ID: 20000451 Result: Down-regulated in Transcription
  misc_feature: MA Experiment 20000451 PARAMETER Experiment Name: At_CS6879_Shoots-Roots_P Parameter: Age (day) Value: 14
  misc_feature: MA Experiment 20000451 PARAMETER Experiment Name: At_CS6879_Shoots-Roots_P Parameter: Organism Value: A. thaliana
  misc_feature: MA Experiment 20000451 PARAMETER Experiment Name: At_CS6879_Shoots-Roots_P Parameter: Plant Line Value: CS6879 vs. WS
  misc_feature: MA Experiment 20000451 PARAMETER Experiment Name: At_CS6879_Shoots-Roots_P Parameter: Tissue Value: Roots
  misc_feature: MA Experiment ID: 20000794 Result: Up-regulated in Transcription
  misc_feature: MA Experiment 20000794 PARAMETER Experiment Name: At_Petals_P Parameter: Age (day) Value: 23-25 days
  misc_feature: MA Experiment 20000794 PARAMETER Experiment Name: At_Petals_P Parameter: Plant Line Value: WS
  misc_feature: MA Experiment 20000794 PARAMETER Experiment Name: At_Petals_P Parameter: Tissue Value: Petals vs. Whole plant
  misc_feature: MA Experiment ID: 20001248 Result: Down-regulated in Transcription
  misc_feature: MA Experiment 20001248 PARAMETER Experiment Name: At_Far-red-induction_P Parameter: Age (day) Value: 7
  misc_feature: MA Experiment 20001248 PARAMETER Experiment Name: At_Far-red-induction_P Parameter: Light Value: Far-red vs. White
  misc_feature: MA Experiment 20001248 PARAMETER Experiment Name: At_Far-red-induction_P Parameter: Organism Value: A. thaliana
  misc_feature: MA Experiment 20001248 PARAMETER Experiment Name: At_Far-red-induction_P Parameter: Plant Line Value: Columbia
  misc_feature: MA Experiment 20001248 PARAMETER Experiment Name: At_Far-red-induction_P Parameter: Timepoint (hr) Value: 4
  misc_feature: MA Experiment 20001248 PARAMETER Experiment Name: At_Far-red-induction_P Parameter: Tissue Value: Whole Plant
  misc_feature: MA Experiment ID: 20001450 Result: Down-regulated in Transcription
  misc_feature: MA Experiment 20001450 PARAMETER Experiment Name: At_Far-red-induction_P Parameter: Age (day) Value: 7
  misc_feature: MA Experiment 20001450 PARAMETER Experiment Name: At_Far-red-induction_P Parameter: Light Value: Far-red vs. White
  misc_feature: MA Experiment 20001450 PARAMETER Experiment Name: At_Far-red-induction_P Parameter: Organism Value: A. thaliana
  misc_feature: MA Experiment 20001450 PARAMETER Experiment Name: At_Far-red-induction_P Parameter: Plant Line Value: Columbia
  misc_feature: MA Experiment 20001450 PARAMETER Experiment Name: At_Far-red-induction_P Parameter: Timepoint (hr) Value: 8
  misc_feature: MA Experiment 20001450 PARAMETER Experiment Name: At_Far-red-induction_P Parameter: Tissue Value: Whole Plant
  misc_feature: MA Experiment ID: 20001557 Result: Down-regulated in Transcription
  misc_feature: MA Experiment 20001557 PARAMETER Experiment Name: At_Drought_Soil_Dry_P Parameter: Age (day) Value: 27
  misc_feature: MA Experiment 20001557 PARAMETER Experiment Name: At_Drought_Soil_Dry_P Parameter: Organism Value: A. thaliana
  misc_feature: MA Experiment 20001557 PARAMETER Experiment Name: At_Drought_Soil_Dry_P Parameter: Plant Line Value: WS
  misc_feature: MA Experiment 20001557 PARAMETER Experiment Name: At_Drought_Soil_Dry_P Parameter: Post Timepoint (hr) Value: 3
  misc_feature: MA Experiment 20001557 PARAMETER Experiment Name: At_Drought_Soil_Dry_P Parameter: Post-Treatment Value: Re-Water vs. No Drought
  misc_feature: MA Experiment 20001557 PARAMETER Experiment Name: At_Drought_Soil_Dry_P Parameter: Timepoint (day) Value: 13
  misc_feature: MA Experiment 20001557 PARAMETER Experiment Name: At_Drought_Soil_Dry_P Parameter: Treatment Value: Drought vs. No Drought
  misc_feature: MA Experiment ID: 20001558 Result: Down-regulated in Transcription
  misc_feature: MA Experiment 20001558 PARAMETER Experiment Name: At_Drought_Soil_Dry_P Parameter: Age (day) Value: 27
  misc_feature: MA Experiment 20001558 PARAMETER Experiment Name: At_Drought_Soil_Dry_P Parameter: Organism Value: A. thaliana
  misc_feature: MA Experiment 20001558 PARAMETER Experiment Name: At_Drought_Soil_Dry_P Parameter: Plant Line Value: WS
  misc_feature: MA Experiment 20001558 PARAMETER Experiment Name: At_Drought_Soil_Dry_P Parameter: Post Timepoint (hr) Value: 6
  misc_feature: MA Experiment 20001558 PARAMETER Experiment Name: At_Drought_Soil_Dry_P Parameter: Post-Treatment Value: Re-Water vs. No Drought
  misc_feature: MA Experiment 20001558 PARAMETER Experiment Name: At_Drought_Soil_Dry_P Parameter: Timepoint (day) Value: 13
  misc_feature: MA Experiment 20001558 PARAMETER Experiment Name: At_Drought_Soil_Dry_P Parameter: Treatment Value: Drought vs. No Drought
  misc_feature: MA Experiment ID: 20001905 Result: Down-regulated in Transcription
  misc_feature: MA Experiment 20001905 PARAMETER Experiment Name: At_Drought_Reproduction_P Parameter: Age (day) Value: 40
  misc_feature: MA Experiment 20001905 PARAMETER Experiment Name: At_Drought_Reproduction_P Parameter: Organism Value: A. thaliana
  misc_feature: MA Experiment 20001905 PARAMETER Experiment Name: At_Drought_Reproduction_P Parameter: Plant Line Value: WS
  misc_feature: MA Experiment 20001905 PARAMETER Experiment Name: At_Drought_Reproduction_P Parameter: Timepoint (day) Value: 10
  misc_feature: MA Experiment 20001905 PARAMETER Experiment Name: At_Drought_Reproduction_P Parameter: Tissue Value: Rosettes
  misc_feature: MA Experiment 20001905 PARAMETER Experiment Name: At_Drought_Reproduction_P Parameter: Treatment Value: Drought vs. No Drought
tctctcttcgagtcggttcttaatctccgggataaaatggcgaccgaggacgtgaagctgatcggctcatgggcgagtgtttacgtcatgagggcgaggatcgctctccacctcaaatctattagctacgaattccttcaggagacgtatggttcaaagagcgaattgctcctcaaatcaaacccggttcacaagaagatgccggttctgattcacgctgacaaaccggtgtgcgagtccaacatcatcgttcattatatcgacgaggcttggaactcttctggaccttccattctcccgtcccatccatacgaccgggccattgctcggttttgggctgcctacatagacgatcagtggtttatctctgtgagaagtatcctaacagctcaaggagacgaagagaagaaagcagccatagctcaagttgaagaaaggaccaagcttctggagaaagcattcaacgattgtagccaaggaaaaccgttcttcaacggtgaccatatcggttacctcgacattgccttggggagcttcttaggttggtggagagtcgtcgagttggatgccaatcataaatttcttgatgagaccaaaactccctctctagtcaaatgggcagagcggttctgtgatgatcccgctgtgaaacctataatgcccgagattacaaagctcgctgaattcgcaaggaagctctttcctaagcggcaagcataaactggattactaggatgtaagttatataat

SEQ ID NO: 46452 - protein, 239 aa, Arabidopsis thaliana
  peptide (1)..(239): Ceres Seq. ID no. 13578558
  misc_feature (13)..(181): Homolog of NCBI NO: 15218518 NR Description: glutathione transferase, putative [Arabidopsis
  misc_feature (15)..(234): Homolog of NCBI NO: 6652874 NR Description: glutathione S-transferase 3 [Papaver somniferum]
  misc_feature (15)..(234): Homolog of NCBI NO: 6652870 NR Description: glutathione S-transferase 1 [Papaver somniferum]
  misc_feature (8)..(233): Homolog of NCBI NO: 6856103 NR Description: glutathione S-transferase [Gossypium hirsutum]
  misc_feature (13)..(239): Homolog of NCBI NO: 15375408 NR Description: glutathione S-transferase [Arabidopsis thaliana]
  misc_feature (13)..(239): Homolog of NCBI NO: 11096016 NR Description: glutathione S-transferase [Arabidopsis thaliana]
  misc_feature (13)..(239): Homolog of NCBI NO: 15218517 NR Description: glutathione transferase, putative [Arabidopsis
SLFESVLNLRDKMATEDVKLIGSWASVYVMRARIALHLKSISYEFLQETYGSKSELLLKSNPVHKKMPVLIHADKPVCESNIIVHYIDEAWNSSGPSILPSHPYDRAIARFWAAYIDDQWFISVRSILTAQGDEEKKAAIAQVEERTKLLEKAFNDCSQGKPFFNGDHIGYLDIALGSFLGWWRVVELDANHKFLDETKTPSLVKWAERFCDDPAVKPIMPEITKLAEFARKLFPKRQA

SEQ ID NO: 46453 - protein, 227 aa, Arabidopsis thaliana
  peptide (1)..(227): Ceres Seq. ID no. 13578559
  misc_feature (1)..(169): Homolog of NCBI NO: 15218518 NR Description: glutathione transferase, putative [Arabidopsis
  misc_feature (3)..(222): Homolog of NCBI NO: 6652874 NR Description: glutathione S-transferase 3 [Papaver somniferum]
  misc_feature (3)..(222): Homolog of NCBI NO: 6652870 NR Description: glutathione S-transferase 1 [Papaver somniferum]
  misc_feature (1)..(221): Homolog of NCBI NO: 6856103 NR Description: glutathione S-transferase [Gossypium hirsutum]
  misc_feature (1)..(227): Homolog of NCBI NO: 15375408 NR Description: glutathione S-transferase [Arabidopsis thaliana]
  misc_feature (1)..(227): Homolog of NCBI NO: 11096016 NR Description: glutathione S-transferase [Arabidopsis thaliana]
  misc_feature (1)..(227): Homolog of NCBI NO: 15218517 NR Description: glutathione transferase, putative [Arabidopsis
MATEDVKLIGSWASVYVMRARIALHLKSISYEFLQETYGSKSELLLKSNPVHKKMPVLIHADKPVCESNIIVHYIDEAWNSSGPSILPSHPYDRAIARFWAAYIDDQWFISVRSILTAQGDEEKKAAIAQVEERTKLLEKAFNDCSQGKPFFNGDHIGYLDIALGSFLGWWRVVELDANHKFLDETKTPSLVKWAERFCDDPAVKPIMPEITKLAEFARKLFPKRQA

SEQ ID NO: 46454 - protein, 210 aa, Arabidopsis thaliana
  peptide (1)..(210): Ceres Seq. ID no. 13578560
  misc_feature (1)..(152): Homolog of NCBI NO: 15218518 NR Description: glutathione transferase, putative [Arabidopsis
  misc_feature (1)..(205): Homolog of NCBI NO: 6652874 NR Description: glutathione S-transferase 3 [Papaver somniferum]
  misc_feature (1)..(205): Homolog of NCBI NO: 6652870 NR Description: glutathione S-transferase 1 [Papaver somniferum]
  misc_feature (1)..(204): Homolog of NCBI NO: 6856103 NR Description: glutathione S-transferase [Gossypium hirsutum]
  misc_feature (1)..(210): Homolog of NCBI NO: 15375408 NR Description: glutathione S-transferase [Arabidopsis thaliana]
  misc_feature (1)..(210): Homolog of NCBI NO: 11096016 NR Description: glutathione S-transferase [Arabidopsis thaliana]
  misc_feature (1)..(210): Homolog of NCBI NO: 15218517 NR Description: glutathione transferase, putative [Arabidopsis
MRARIALHLKSISYEFLQETYGSKSELLLKSNPVHKKMPVLIHADKPVCESNIIVHYIDEAWNSSGPSILPSHPYDRAIARFWAAYIDDQWFISVRSILTAQGDEEKKAAIAQVEERTKLLEKAFNDCSQGKPFFNGDHIGYLDIALGSFLGWWRVVELDANHKFLDETKTPSLVKWAERFCDDPAVKPIMPEITKLAEFARKLFPKRQA

SEQ ID NO: 46455 - DNA, 1035 bp, Arabidopsis thaliana; identical to SEQ ID NO: 43858
  misc_feature (1)..(1035): Ceres Seq. ID no. 13592062
  misc_feature: MA Experiment ID: 20000179 Result: Down-regulated in Transcription
  misc_feature: MA Experiment 20000179 PARAMETER Experiment Name: At_Germinating_Seeds_P Parameter: Age (hr) Value: 6 vs. 0
  misc_feature: MA Experiment 20000179 PARAMETER Experiment Name: At_Germinating_Seeds_P Parameter: Tissue Value: Germinating Seeds

SEQ ID NO: 46456 - protein, 267 aa, Arabidopsis thaliana [sequence omitted]

SEQ ID NO: 46457 - DNA, 1591 bp, Arabidopsis thaliana
  misc_feature (1)..(1591): Ceres Seq. ID no. 15168713
  misc_feature: MA Experiment ID: 20000227 Result: Down-regulated in Transcription
  misc_feature: MA Experiment 20000227 PARAMETER Experiment Name: At_Root-Tips-vs-Tops_P Parameter: Tissue Value: Root Tips vs. Root Tops
  misc_feature: MA Experiment ID: 20001451 Result: Down-regulated in Transcription
  misc_feature: MA Experiment 20001451 PARAMETER Experiment Name: At_Far-red-induction_P Parameter: Age (day) Value: 7
  misc_feature: MA Experiment 20001451 PARAMETER Experiment Name: At_Far-red-induction_P Parameter: Light Value: Far-red vs. White
  misc_feature: MA Experiment 20001451 PARAMETER Experiment Name: At_Far-red-induction_P Parameter: Organism Value: A. thaliana
  misc_feature: MA Experiment 20001451 PARAMETER Experiment Name: At_Far-red-induction_P Parameter: Plant Line Value: Columbia
  misc_feature: MA Experiment 20001451 PARAMETER Experiment Name: At_Far-red-induction_P Parameter: Timepoint (hr) Value: 24
  misc_feature: MA Experiment 20001451 PARAMETER Experiment Name: At_Far-red-induction_P Parameter: Tissue Value: Whole Plant
aaatttctccgatttggatctgtctccaactggcaagggtgacaatggctagctccaagggatcacagagtgttagaaacttgatgtacccgggaaagcatgctttgctcccaccaaaaataccgtttcctagtgtatcagcatcgtattccgagtatattcctactggtttgattggttcaagacatggtcagaagcttagtaatgagaaaacacatcaccagcgaacttcctccgagagccatttggtagaagagcttcccttttggcttgatgatcttctcaatgagcagccggaaagccctgctcgaaaatgtggtcatcggcgttcatcaagtgactcttacgcttatctagatgtggctaatgctacaaacataagtttgactctccaaaatgatttcagttataggaatactgttttatccactcaaagaggagtccaagagcttgaccggaataaaaatgctcaggatgctgccttctactctggtgctagttttctgaaacagaagagtcgtcagcgggattctttggtggcaactggggcttgtccttcttggttacctttcgctcgtgagaacggtggcggaaaaaacttgggagctttatatatgtctcaagatgcaacagtaatatcgtcagaaagaaagaactatgctgaacctttttctcatgacccaaaaatgttatcttctgaggaaaacaactccaatccttcgcctgtgacttatgaagctgacaacacaaaacgagccaaacagcaatttgcacaaagatcacgggtccgtaagctccagtacatatctgagctagaaagaaatgtacagacattgcaggcagaaggctccaaagtttcagctgaacttgattttctcaaccagaggaatcttattctgagtatggaaaataaagctctcaagaagcgtctcgaaagtatagctcaggagaagcttatcaaacaattggaacaagaagtgttggaaaaggagattgggagactacgagcgttgtatcagcaacaacaacaaactcaaaaaccatcagccagtcacggacgtgctactagcaaagatctcgactctcagttctccagtctttcactgaacaccaaagattccaactgtaggcgtgactctgtatctgtgatgggtcaattccacttttagtaaatgtctctctacccactggttcattagagatcttaagggcctggcgattcaccaagatcaggccctaatctaccacctcaccgcagacgtttttaactcccccgtcgttttttttatatttttcttatggttgacaagttaactcaccagtgcacctggaaaccctatattacttccaggagatggcttgcctgaggtggtttagttcgaagatcagacacctggacttcatttatctggtgattgttgtagcgacttgtaatatgttatgaatatattcgaacccggactcatttctggagttgtacaatgatctccactgctgtattttatgtttacttgtaaaatgatgcattcccttcgagtgaatgcttcatgtaaagaagttgacattttctgtagtactatccccaagcgtc

SEQ ID NO: 46458 - protein, 388 aa, Arabidopsis thaliana
  peptide (1)..(388): Ceres Seq. ID no. 15168714
  misc_feature (257)..(305): Pfam Name: bZIP transcription factor Pfam Description: bZIP transcription factor
  misc_feature (225)..(368): Homolog of NCBI NO: 25403436 NR Description: protein F15O4.49 [imported] - Arabidopsis
  misc_feature (225)..(368): Homolog of NCBI NO: 18399693 NR Description: bZIP family transcription factor [Arabidopsis
  misc_feature (64)..(355): Homolog of NCBI NO: 30689007 NR Description: bZIP protein [Arabidopsis thaliana]
  misc_feature (64)..(355): Homolog of NCBI NO: 18491297 NR Description: At2g42380/MHK10.10 [Arabidopsis thaliana]
  misc_feature (206)..(388): Homolog of NCBI NO: 30696210 NR Description: bZIP family transcription factor [Arabidopsis
  misc_feature (15)..(279): Homolog of NCBI NO: 27311723 NR Description: Unknown protein [Arabidopsis thaliana]
  misc_feature (10)..(279): Homolog of NCBI NO: 30680232 NR Description: bZIP transcriptional activator protein -related
  misc_feature (15)..(343): Homolog of NCBI NO: 30696210 NR Description: bZIP family transcription factor [Arabidopsis
  misc_feature (15)..(388): Homolog of NCBI NO: 25404190 NR Description: hypothetical protein T18I24.3 [imported] -
  misc_feature (15)..(388): Homolog of NCBI NO: 28393180 NR Description: putative bZIP family transcription factor
ISPIWICLQLARVTMASSKGSQSVRNLMYPGKHALLPPKIPFPSVSASYSEYIPTGLIGSRHGQKLSNEKTHHQRTSSESHLVEELPFWLDDLLNEQPESPARKCGHRRSSSDSYAYLDVANATNISLTLQNDFSYRNTVLSTQRGVQELDRNKNAQDAAFYSGASFLKQKSRQRDSLVATGACPSWLPFARENGGGKNLGALYMSQDATVISSERKNYAEPFSHDPKMLSSEENNSNPSPVTYEADNTKRAKQQFAQRSRVRKLQYISELERNVQTLQAEGSKVSAELDFLNQRNLILSMENKALKKRLESIAQEKLIKQLEQEVLEKEIGRLRALYQQQQQTQKPSASHGRATSKDLDSQFSSLSLNTKDSNCRRDSVSVMGQFHF

SEQ ID NO: 46459 - protein, 374 aa, Arabidopsis thaliana
  peptide (1)..(374): Ceres Seq. ID no. 15168715
  misc_feature (243)..(291): Pfam Name: bZIP transcription factor Pfam Description: bZIP transcription factor
  misc_feature (211)..(354): Homolog of NCBI NO: 25403436 NR Description: protein F15O4.49 [imported] - Arabidopsis
  misc_feature (211)..(354): Homolog of NCBI NO: 18399693 NR Description: bZIP family transcription factor [Arabidopsis
  misc_feature (50)..(341): Homolog of NCBI NO: 30689007 NR Description: bZIP protein [Arabidopsis thaliana]
  misc_feature (50)..(341): Homolog of NCBI NO: 18491297 NR Description: At2g42380/MHK10.10 [Arabidopsis thaliana]
  misc_feature (192)..(374): Homolog of NCBI NO: 30696210 NR Description: bZIP family transcription factor [Arabidopsis
  misc_feature (1)..(265): Homolog of NCBI NO: 27311723 NR Description: Unknown protein [Arabidopsis thaliana]
  misc_feature (1)..(265): Homolog of NCBI NO: 30680232 NR Description: bZIP transcriptional activator protein -related
  misc_feature (1)..(329): Homolog of NCBI NO: 30696210 NR Description: bZIP family transcription factor [Arabidopsis
  misc_feature (1)..(374): Homolog of NCBI NO: 25404190 NR Description: hypothetical protein T18I24.3 [imported] -
  misc_feature (1)..(374): Homolog of NCBI NO: 28393180 NR Description: putative bZIP family transcription factor
MASSKGSQSVRNLMYPGKHALLPPKIPFPSVSASYSEYIPTGLIGSRHGQKLSNEKTHHQRTSSESHLVEELPFWLDDLLNEQPESPARKCGHRRSSSDSYAYLDVANATNISLTLQNDFSYRNTVLSTQRGVQELDRNKNAQDAAFYSGASFLKQKSRQRDSLVATGACPSWLPFARENGGGKNLGALYMSQDATVISSERKNYAEPFSHDPKMLSSEENNSNPSPVTYEADNTKRAKQQFAQRSRVRKLQYISELERNVQTLQAEGSKVSAELDFLNQRNLILSMENKALKKRLESIAQEKLIKQLEQEVLEKEIGRLRALYQQQQQTQKPSASHGRATSKDLDSQFSSLSLNTKDSNCRRDSVSVMGQFHF

SEQ ID NO: 46460 - protein, 361 aa, Arabidopsis thaliana
  peptide (1)..(361): Ceres Seq. ID no. 15168716
  misc_feature (230)..(278): Pfam Name: bZIP transcription factor Pfam Description: bZIP transcription factor
  misc_feature (198)..(341): Homolog of NCBI NO: 25403436 NR Description: protein F15O4.49 [imported] - Arabidopsis
  misc_feature (198)..(341): Homolog of NCBI NO: 18399693 NR Description: bZIP family transcription factor [Arabidopsis
  misc_feature (37)..(328): Homolog of NCBI NO: 30689007 NR Description: bZIP protein [Arabidopsis thaliana]
  misc_feature (37)..(328): Homolog of NCBI NO: 18491297 NR Description: At2g42380/MHK10.10 [Arabidopsis thaliana]
  misc_feature (179)..(361): Homolog of NCBI NO: 30696210 NR Description: bZIP family transcription factor [Arabidopsis
  misc_feature (1)..(252): Homolog of NCBI NO: 27311723 NR Description: Unknown protein [Arabidopsis thaliana]
  misc_feature (1)..(252): Homolog of NCBI NO: 30680232 NR Description: bZIP transcriptional activator protein -related
  misc_feature (1)..(316): Homolog of NCBI NO: 30696210 NR Description: bZIP family transcription factor [Arabidopsis
  misc_feature (1)..(361): Homolog of NCBI NO: 25404190 NR Description: hypothetical protein T18I24.3 [imported] -
  misc_feature (1)..(361): Homolog of NCBI NO: 28393180 NR Description: putative bZIP family transcription factor
MYPGKHALLPPKIPFPSVSASYSEYIPTGLIGSRHGQKLSNEKTHHQRTSSESHLVEELPFWLDDLLNEQPESPARKCGHRRSSSDSYAYLDVANATNISLTLQNDFSYRNTVLSTQRGVQELDRNKNAQDAAFYSGASFLKQKSRQRDSLVATGACPSWLPFARENGGGKNLGALYMSQDATVISSERKNYAEPFSHDPKMLSSEENNSNPSPVTYEADNTKRAKQQFAQRSRVRKLQYISELERNVQTLQAEGSKVSAELDFLNQRNLILSMENKALKKRLESIAQEKLIKQLEQEVLEKEIGRLRALYQQQQQTQKPSASHGRATSKDLDSQFSSLSLNTKDSNCRRDSVSVMGQFHF

SEQ ID NO: 46461 - DNA, 2234 bp, Arabidopsis thaliana; identical to SEQ ID NO: 46268
  misc_feature (1)..(2234): Ceres Seq. ID no. 14310012
  misc_feature: MA Experiment ID: 20000173 Result: Down-regulated in Transcription
  misc_feature: MA Experiment 20000173 PARAMETER Experiment Name: At_42deg_Heat_P Parameter: Age (day) Value: 14
  misc_feature: MA Experiment 20000173 PARAMETER Experiment Name: At_42deg_Heat_P Parameter: Organism Value: A. thaliana
  misc_feature: MA Experiment 20000173 PARAMETER Experiment Name: At_42deg_Heat_P Parameter: Plant Line Value: WS
  misc_feature: MA Experiment 20000173 PARAMETER Experiment Name: At_42deg_Heat_P Parameter: Temperature (deg C) Value: 42 vs. 22
  misc_feature: MA Experiment 20000173 PARAMETER Experiment Name: At_42deg_Heat_P Parameter: Timepoint (hr) Value: 6
  misc_feature: MA Experiment 20000173 PARAMETER Experiment Name: At_42deg_Heat_P Parameter: Tissue Value: Aerial
  misc_feature: MA Experiment ID: 20000180 Result: Down-regulated in Transcription
  misc_feature: MA Experiment 20000180 PARAMETER Experiment Name: At_Germinating_Seeds_P Parameter: Age (hr) Value: 24 vs. 0
  misc_feature: MA Experiment 20000180 PARAMETER Experiment Name: At_Germinating_Seeds_P Parameter: Tissue Value: Germinating Seeds
  misc_feature: MA Experiment ID: 20000184 Result: Down-regulated in Transcription
  misc_feature: MA Experiment 20000184 PARAMETER Experiment Name: At_Shoots__P Parameter: Age (day) Value: 7
  misc_feature: MA Experiment 20000184 PARAMETER Experiment Name: At_Shoots__P Parameter: Tissue Value: Shoots vs. Whole Plant

SEQ ID NO: 46462 - protein, 640 aa, Arabidopsis thaliana; identical to SEQ ID NO: 46269
  peptide (1)..(640): Ceres Seq. ID no. 14310013
  misc_feature (4)..(103): Pfam Name: Replication factor-A protein 1, N-terminal domain Pfam Description: Replication factor-A protein 1, N-terminal
  misc_feature (4)..(103): Pfam Name: Replication factor-A protein 1, N-terminal domain Pfam Description: Replication factor-A protein 1, N-terminal
  misc_feature (21)..(123): Homolog of NCBI NO: 40742813 NR Description: hypothetical protein AN7423.2 [Aspergillus
  misc_feature (180)..(638): Homolog of NCBI NO: 40742813 NR Description: hypothetical protein AN7423.2 [Aspergillus
  misc_feature (436)..(635): Homolog of NCBI NO: 33086646 NR Description: Cb1-727 [Rattus norvegicus]
  misc_feature (13)..(441): Homolog of NCBI NO: 33086646 NR Description: Cb1-727 [Rattus norvegicus]
  misc_feature (5)..(635): Homolog of NCBI NO: 18390321 NR Description: replication protein A1
  misc_feature (21)..(123): Homolog of NCBI NO: 40742813 NR Description: hypothetical protein AN7423.2 [Aspergillus
  misc_feature (436)..(635): Homolog of NCBI NO: 33086646 NR Description: Cb1-727 [Rattus norvegicus]
  misc_feature (5)..(635): Homolog of NCBI NO: 18390321 NR Description: replication protein A1
  misc_feature (5)..(638): Homolog of NCBI NO: 13536993 NR Description: replication protein A 70kDa
  misc_feature (193)..(640): Homolog of NCBI NO: 7488291 NR Description: replication protein A1 homolog T18B16.100 -
  misc_feature (1)..(116): Homolog of NCBI NO: 7488291 NR Description: replication protein A1 homolog T18B16.100 -
  misc_feature (50)..(638): Homolog of NCBI NO: 15242405 NR Description: replication protein, putative [Arabidopsis
  misc_feature (294)..(640): Homolog of NCBI NO: 18415246 NR Description: replication protein A, putative [Arabidopsis
  misc_feature (13)..(441): Homolog of NCBI NO: 33086646 NR Description: Cb1-727 [Rattus norvegicus]
  misc_feature (180)..(638): Homolog of NCBI NO: 40742813 NR Description: hypothetical protein AN7423.2 [Aspergillus
  misc_feature (294)..(640): Homolog of NCBI NO: 18415246 NR Description: replication protein A, putative [Arabidopsis
  misc_feature (50)..(638): Homolog of NCBI NO: 15242405 NR Description: replication protein, putative [Arabidopsis
  misc_feature (1)..(116): Homolog of NCBI NO: 7488291 NR Description: replication protein A1 homolog T18B16.100 -
  misc_feature (193)..(640): Homolog of NCBI NO: 7488291 NR Description: replication protein A1 homolog T18B16.100 -
  misc_feature (5)..(638): Homolog of NCBI NO: 13536993 NR Description: replication protein A 70kDa

SEQ ID NO: 46463 - protein, 610 aa, Arabidopsis thaliana; identical to SEQ ID NO: 46270
  peptide (1)..(610): Ceres Seq. ID no. 14310014
  misc_feature (1)..(73): Pfam Name: Replication factor-A protein 1, N-terminal domain Pfam Description: Replication factor-A protein 1, N-terminal
  misc_feature (1)..(73): Pfam Name: Replication factor-A protein 1, N-terminal domain Pfam Description: Replication factor-A protein 1, N-terminal
  misc_feature (1)..(93): Homolog of NCBI NO: 40742813 NR Description: hypothetical protein AN7423.2 [Aspergillus
  misc_feature (150)..(608): Homolog of NCBI NO: 40742813 NR Description: hypothetical protein AN7423.2 [Aspergillus
  misc_feature (406)..(605): Homolog of NCBI NO: 33086646 NR Description: Cb1-727 [Rattus norvegicus]
  misc_feature (1)..(411): Homolog of NCBI NO: 33086646 NR Description: Cb1-727 [Rattus norvegicus]
  misc_feature (1)..(605): Homolog of NCBI NO: 18390321 NR Description: replication protein A1
  misc_feature (1)..(93): Homolog of NCBI NO: 40742813 NR Description: hypothetical protein AN7423.2 [Aspergillus
  misc_feature (406)..(605): Homolog of NCBI NO: 33086646 NR Description: Cb1-727 [Rattus norvegicus]
  misc_feature (1)..(605): Homolog of NCBI NO: 18390321 NR Description: replication protein A1
  misc_feature (1)..(608): Homolog of NCBI NO: 13536993 NR Description: replication protein A 70kDa
  misc_feature (163)..(610): Homolog of NCBI NO: 7488291 NR Description: replication protein A1 homolog T18B16.100 -
  misc_feature (1)..(86): Homolog of NCBI NO: 7488291 NR Description: replication protein A1 homolog T18B16.100 -
  misc_feature (20)..(608): Homolog of NCBI NO: 15242405 NR Description: replication protein, putative [Arabidopsis
  misc_feature (264)..(610): Homolog of NCBI NO: 18415246 NR Description: replication protein A, putative [Arabidopsis
  misc_feature (1)..(411): Homolog of NCBI NO: 33086646 NR Description: Cb1-727 [Rattus norvegicus]
  misc_feature (150)..(608): Homolog of NCBI NO: 40742813 NR Description: hypothetical protein AN7423.2 [Aspergillus
  misc_feature (264)..(610): Homolog of NCBI NO: 18415246 NR Description: replication protein A, putative [Arabidopsis
  misc_feature (20)..(608): Homolog of NCBI NO: 15242405 NR Description: replication protein, putative [Arabidopsis
  misc_feature (1)..(86): Homolog of NCBI NO: 7488291 NR Description: replication protein A1 homolog T18B16.100 -
  misc_feature (163)..(610): Homolog of NCBI NO: 7488291 NR Description: replication protein A1 homolog T18B16.100 -
  misc_feature (1)..(608): Homolog of NCBI NO: 13536993 NR Description: replication protein A 70kDa

SEQ ID NO: 46464 - protein, 584 aa, Arabidopsis thaliana; identical to SEQ ID NO: 46271
  peptide (1)..(584): Ceres Seq. ID no. 14310015
  misc_feature (154)..(244): Pfam Name: OB-fold nucleic acid binding domain Pfam Description: OB-fold nucleic acid binding domain
  misc_feature (154)..(244): Pfam Name: OB-fold nucleic acid binding domain Pfam Description: OB-fold nucleic acid binding domain
  misc_feature (1)..(67): Homolog of NCBI NO: 40742813 NR Description: hypothetical protein AN7423.2 [Aspergillus
  misc_feature (124)..(582): Homolog of NCBI NO: 40742813 NR Description: hypothetical protein AN7423.2 [Aspergillus
  misc_feature (380)..(579): Homolog of NCBI NO: 33086646 NR Description: Cb1-727 [Rattus norvegicus]
  misc_feature (1)..(385): Homolog of NCBI NO: 33086646 NR Description: Cb1-727 [Rattus norvegicus]
  misc_feature (1)..(579): Homolog of NCBI NO: 18390321 NR Description: replication protein A1
  misc_feature (1)..(67): Homolog of NCBI NO: 40742813 NR Description: hypothetical protein AN7423.2 [Aspergillus
  misc_feature (380)..(579): Homolog of NCBI NO: 33086646 NR Description: Cb1-727 [Rattus norvegicus]
  misc_feature (1)..(579): Homolog of NCBI NO: 18390321 NR Description: replication protein A1
  misc_feature (1)..(582): Homolog of NCBI NO: 13536993 NR Description: replication protein A 70kDa
  misc_feature (137)..(584): Homolog of NCBI NO: 7488291 NR Description: replication protein A1 homolog T18B16.100 -
  misc_feature (1)..(60): Homolog of NCBI NO: 7488291 NR Description: replication protein A1 homolog T18B16.100 -
  misc_feature (1)..(582): Homolog of NCBI NO: 15242405 NR Description: replication protein, putative [Arabidopsis
  misc_feature (238)..(584): Homolog of NCBI NO: 18415246 NR Description: replication protein A, putative [Arabidopsis
  misc_feature (1)..(385): Homolog of NCBI NO: 33086646 NR Description: Cb1-727 [Rattus norvegicus]
  misc_feature (124)..(582): Homolog of NCBI NO: 40742813 NR Description: hypothetical protein AN7423.2 [Aspergillus
  misc_feature (238)..(584): Homolog of NCBI NO: 18415246 NR Description: replication protein A, putative [Arabidopsis
  misc_feature (1)..(582): Homolog of NCBI NO: 15242405 NR Description: replication protein, putative [Arabidopsis
  misc_feature (1)..(60): Homolog of NCBI NO: 7488291 NR Description: replication protein A1 homolog T18B16.100 -
  misc_feature (137)..(584): Homolog of NCBI NO: 7488291 NR Description: replication protein A1 homolog T18B16.100 -
  misc_feature (1)..(582): Homolog of NCBI NO: 13536993 NR Description: replication protein A 70kDa

SEQ ID NO: 46465 - DNA, 2529 bp, Arabidopsis thaliana
  misc_feature (1)..(2529): Ceres Seq. ID no. 15168709
  misc_feature: MA Experiment ID: 20000185 Result: Up-regulated in Transcription
  misc_feature: MA Experiment 20000185 PARAMETER Experiment Name: At_Roots__P Parameter: Age (day) Value: 7 vs. 21
  misc_feature: MA Experiment 20000185 PARAMETER Experiment Name: At_Roots__P Parameter: Organism Value: A. thaliana
  misc_feature: MA Experiment 20000185 PARAMETER Experiment Name: At_Roots__P Parameter: Tissue Value: Roots vs. Whole Plant
  misc_feature: MA Experiment ID: 20000234 Result: Up-regulated in Transcription
  misc_feature: MA Experiment 20000234 PARAMETER Experiment Name: At_Siliques_P Parameter: Age (day) Value: 21
  misc_feature: MA Experiment 20000234 PARAMETER Experiment Name: At_Siliques_P Parameter: Organism Value: A. thaliana
  misc_feature: MA Experiment 20000234 PARAMETER Experiment Name: At_Siliques_P Parameter: Plant Line Value: WS
  misc_feature: MA Experiment 20000234 PARAMETER Experiment Name: At_Siliques_P Parameter: Tissue Value: Less Than 5mm Siliques vs. Whole Plant
  misc_feature: MA Experiment ID: 20000235 Result: Up-regulated in Transcription
  misc_feature: MA Experiment 20000235 PARAMETER Experiment Name: At_Siliques_P Parameter: Age (day) Value: 21
  misc_feature: MA Experiment 20000235 PARAMETER Experiment Name: At_Siliques_P Parameter: Organism Value: A. thaliana
  misc_feature: MA Experiment 20000235 PARAMETER Experiment Name: At_Siliques_P Parameter: Plant Line Value: WS
  misc_feature: MA Experiment 20000235 PARAMETER Experiment Name: At_Siliques_P Parameter: Tissue Value: 5-10mm Siliques vs. Whole Plant
  misc_feature: MA Experiment ID: 20000264 Result: Up-regulated in Transcription
  misc_feature: MA Experiment 20000264 PARAMETER Experiment Name: At_Open_Flower_P Parameter: Age (day) Value: 21
  misc_feature: MA Experiment 20000264 PARAMETER Experiment Name: At_Open_Flower_P Parameter: Plant Line Value: WS
  misc_feature: MA Experiment 20000264 PARAMETER Experiment Name: At_Open_Flower_P Parameter: Tissue Value: Open Flower vs. Whole Plant
  misc_feature: MA Experiment ID: 20000265 Result: Up-regulated in Transcription
  misc_feature: MA Experiment 20000265 PARAMETER Experiment Name: At_Open_Flower_P Parameter: Age (day) Value: 21
  misc_feature: MA Experiment 20000265 PARAMETER Experiment Name: At_Open_Flower_P Parameter: Plant Line Value: WS
  misc_feature: MA Experiment 20000265 PARAMETER Experiment Name: At_Open_Flower_P Parameter: Tissue Value: Closed Flower vs. Whole Plant
  misc_feature: MA Experiment ID: 20000286 Result: Up-regulated in Transcription
  misc_feature: MA Experiment 20000286 PARAMETER Experiment Name: At_Open_Flower_P Parameter: Age (day) Value: 21
  misc_feature: MA Experiment 20000286 PARAMETER Experiment Name: At_Open_Flower_P Parameter: Plant Line Value: WS
  misc_feature: MA Experiment 20000286 PARAMETER Experiment Name: At_Open_Flower_P Parameter: Tissue Value: Half Open vs. Whole Plant
  misc_feature: MA Experiment ID: 20000439 Result: Up-regulated in Transcription
  misc_feature: MA Experiment 20000439 PARAMETER Experiment Name: At_Roots__P Parameter: Age (day) Value: 14 vs. 21
  misc_feature: MA Experiment 20000439 PARAMETER Experiment Name: At_Roots__P Parameter: Organism Value: A. thaliana
  misc_feature: MA Experiment 20000439 PARAMETER Experiment Name: At_Roots__P Parameter: Tissue Value: Roots vs. Whole Plant
gaacgtgattcgcccttttctctttgcccaagagctatacgacaatacctccaccacaccccacacacacacacgagagacagagagagagagaggaaatttgctactgagagatacattcagtgagtgtgtgtctgtcaccgtggaggagaaacggaaggaggatagatgaaaccgaccggagaaggaggaggggaagtcgccggagcggtggcggaaggttcggcgttgttaattgtaggagtaaagccagatgaatggagtagagaggttcttacatggtctttggtgaatgtagcgcgtcctggagatcgaatcgttgctcttcatgttctcgattactctctagagggctcaacgtcgcttatttcgttggttaggaattttgatactatgcttggtgtttatgaaagcttctgcaacttaaaacaggtagatttgaagttgaaggttttcagagggaagtcagctaggaaagttcttgtacaagaagttaaatcgtgtggagctacaagtttaatcgttggttcctctaggaaacatcacactatccgttcttcagcttctttagccaagtattgtgccaggaatcttgccaaggatgtctctgtttttgctgttaaaagtggcaagattatgttccgcagtgtacctaataccaatggtgcagatggtccacagatgaatattccctctttagtttgtggatcaccagatattgctattgaagcggcaaagattggaaacagttttagcccggctagaacgagctcacgctggacaagaactagtcgtagttcgtcattgcagtctcctgacagcttaggtgtagacaatttgttggctttagtgccagtacaaacaaatgagactgattctggttcccttgagtcaggaccaggttggcattttcttcgcgggctttacggtaataatcgaaaaagctggaccaaagtttctgctaagaaggctgtacttcagtgggtttcgaggctgcgaggtcggcattcagaaactgtaatctatctggataggaaacggagtgactctggttgtgatgaagaatgctcttctagtattgatggtgaagatgtttctatatcacggtttggttctgagcttatgcagtcacctctttctcctttcattggatcaaacaacattccagaagagctggaaggtctacatgaaaagtactcttccacatgtagattattcacatacgaggaagtcttgtcaattacctcaaactttgcatctgagaacttggttggagaaggtggtaatagttatgtttatagaggagatctaccagatggcagggaattagctgtcaaaatattgaaaccttgtctggatgtgttgaaggaatttatactggaaattgaagtcattaccagtgtacatcacaaaaatatagtatctctctttggtttctgtttcgagaataataatttgatgctggtatacgattatctaccacgaggaagccttgaagagaaccttcatggcaatagaaaggatgcaaagaaatttggctggatggagagatataaggtggcagtgggtgttgccgaggcgttagactatctgcataatactcatgatccagaagtaattcaccgggatgtcaaatcttctaatgttcttttggcagatgattttgagccacagctctcagatttcggattcgccagcttggcttcaagtacctcacagcatgtagcgggtggggatattgccgggacatttggttacctagcaccagagtacttcatgcacggtaaagtaaccgacaagattgatgtctatgcttttggtgttgtattgctcgagctcatatcgggtagaaaaccaatctgcgtcgaccagtctaaaggccaggagagccttgtcttgtgggcaaacccaattctagatagtggaaagtttgctcagttactggatcccagtctagaaaatgataacagtaacgatctaatcgagaaactattgttagctgccacgctatgcatcaaacgcacacctcatgaccgtccgcaaattggccttgtcctaaagatattacaaggggaagaagaagcaacagagtggggaaagcaacaagtgagagcctcagaagacgtgagcgcatatttgacaaatatagaatcacacataaacctcgcattgcttgatttggaagatgatgcagcttctgatagcagccctgaagctagtagtatctctgttgaggaatacttgaaagggcgatggagccgcactgctagcttcaacttcaactaataatttttactagtttaaccccgaaaatcccaaaatttgacgatattgtaagttgtgtaaattgaatcgattttctgagattctcaagctttaagttgtgtcaatttaggaagagtgaatagctcttgtagagaggacttaagttggaatttgttttctttgttttgtcagagcagaaaatgtttcaagtgttccactttcatatcggttttaaaagtttaaaaatgtataagtgttccggtt

SEQ ID NO: 46466 - protein, 705 aa, Arabidopsis thaliana
  peptide (1)..(705): Ceres Seq. ID no. 15168710
  misc_feature (18)..(150): Pfam Name: Universal stress protein family Pfam Description: Universal stress protein family
  misc_feature (1)..(187): Homolog of NCBI NO: 28376688 NR Description: putative serine/threonine kinase
  misc_feature (123)..(703): Homolog of NCBI NO: 28376688 NR Description: putative serine/threonine kinase
  misc_feature (13)..(159): Homolog of NCBI NO: 25518708 NR Description: hypothetical protein F24J8.18 - Arabidopsis
  misc_feature (208)..(383): Homolog of NCBI NO: 25518708 NR Description: hypothetical protein F24J8.18 - Arabidopsis
  misc_feature (404)..(703): Homolog of NCBI NO: 25518708 NR Description: hypothetical protein F24J8.18 - Arabidopsis
  misc_feature (13)..(159): Homolog of NCBI NO: 22329713 NR Description: expressed protein [Arabidopsis thaliana]
  misc_feature (208)..(703): Homolog of NCBI NO: 22329713 NR Description: expressed protein [Arabidopsis thaliana]
  misc_feature (579)..(703): Homolog of NCBI NO: 15223890 NR Description: hypothetical protein [Arabidopsis thaliana]
  misc_feature (6)..(159): Homolog of NCBI NO: 15223890 NR Description: hypothetical protein [Arabidopsis thaliana]
  misc_feature (327)..(592): Homolog of NCBI NO: 15223890 NR Description: hypothetical protein [Arabidopsis thaliana]
MKPTGEGGGEVAGAVAEGSALLIVGVKPDEWSREVLTWSLVNVARPGDRIVALHVLDYSLEGSTSLISLVRNFDTMLGVYESFCNLKQVDLKLKVFRGKSARKVLVQEVKSCGATSLIVGSSRKHHTIRSSASLAKYCARNLAKDVSVFAVKSGKIMFRSVPNTNGADGPQMNIPSLVCGSPDIAIEAAKIGNSFSPARTSSRWTRTSRSSSLQSPDSLGVDNLLALVPVQTNETDSGSLESGPGWHFLRGLYGNNRKSWTKVSAKKAVLQWVSRLRGRHSETVIYLDRKRSDSGCDEECSSSIDGEDVSISRFGSELMQSPLSPFIGSNNIPEELEGLHEKYSSTCRLFTYEEVLSITSNFASENLVGEGGNSYVYRGDLPDGRELAVKILKPCLDVLKEFILEIEVITSVHHKNIVSLFGFCFENNNLMLVYDYLPRGSLEENLHGNRKDAKKFGWMERYKVAVGVAEALDYLHNTHDPEVIHRDVKSSNVLLADDFEPQLSDFGFASLASSTSQHVAGGDIAGTFGYLAPEYFMHGKVTDKIDVYAFGVVLLELISGRKPICVDQSKGQESLVLWANPILDSGKFAQLLDPSLENDNSNDLIEKLLLAATLCIKRTPHDRPQIGLVLKILQGEEEATEWGKQQVRASEDVSAYLTNIESHINLALLDLEDDAASDSSPEASSISVEEYLKGRWSRTASFNFN

SEQ ID NO: 46467 - protein, 630 aa, Arabidopsis thaliana
  peptide (1)..(630): Ceres Seq. ID no. 15168711
  misc_feature (1)..(75): Pfam Name: Universal stress protein family Pfam Description: Universal stress protein family
  misc_feature (1)..(112): Homolog of NCBI NO: 28376688 NR Description: putative serine/threonine kinase
  misc_feature (48)..(628): Homolog of NCBI NO: 28376688 NR Description: putative serine/threonine kinase
  misc_feature (1)..(84): Homolog of NCBI NO: 25518708 NR Description: hypothetical protein F24J8.18 - Arabidopsis
  misc_feature (133)..(308): Homolog of NCBI NO: 25518708 NR Description: hypothetical protein F24J8.18 - Arabidopsis
  misc_feature (329)..(628): Homolog of NCBI NO: 25518708 NR Description: hypothetical protein F24J8.18 - Arabidopsis
  misc_feature (1)..(84): Homolog of NCBI NO: 22329713 NR Description: expressed protein [Arabidopsis thaliana]
  misc_feature (133)..(628): Homolog of NCBI NO: 22329713 NR Description: expressed protein [Arabidopsis thaliana]
  misc_feature (504)..(628): Homolog of NCBI NO: 15223890 NR Description: hypothetical protein [Arabidopsis thaliana]
  misc_feature (1)..(84): Homolog of NCBI NO: 15223890 NR Description: hypothetical protein [Arabidopsis thaliana]
  misc_feature (252)..(517): Homolog of NCBI NO: 15223890 NR Description: hypothetical protein [Arabidopsis thaliana]
MLGVYESFCNLKQVDLKLKVFRGKSARKVLVQEVKSCGATSLIVGSSRKHHTIRSSASLAKYCARNLAKDVSVFAVKSGKIMFRSVPNTNGADGPQMNIPSLVCGSPDIAIEAAKIGNSFSPARTSSRWTRTSRSSSLQSPDSLGVDNLLALVPVQTNETDSGSLESGPGWHFLRGLYGNNRKSWTKVSAKKAVLQWVSRLRGRHSETVIYLDRKRSDSGCDEECSSSIDGEDVSISRFGSELMQSPLSPFIGSNNIPEELEGLHEKYSSTCRLFTYEEVLSITSNFASENLVGEGGNSYVYRGDLPDGRELAVKILKPCLDVLKEFILEIEVITSVHHKNIVSLFGFCFENNNLMLVYDYLPRGSLEENLHGNRKDAKKFGWMERYKVAVGVAEALDYLHNTHDPEVIHRDVKSSNVLLADDFEPQLSDFGFASLASSTSQHVAGGDIAGTFGYLAPEYFMHGKVTDKIDVYAFGVVLLELISGRKPICVDQSKGQESLVLWANPILDSGKFAQLLDPSLENDNSNDLIEKLLLAATLCIKRTPHDRPQIGLVLKILQGEEEATEWGKQQVRASEDVSAYLTNIESHINLALLDLEDDAASDSSPEASSISVEEYLKGRWSRTASFNFN

SEQ ID NO: 46468 - protein, 549 aa, Arabidopsis thaliana
  peptide (1)..(549): Ceres Seq. ID no. 15168712
  misc_feature (194)..(545): Homolog of NCBI NO: 15236248 NR Description: protein kinase - like [Arabidopsis thaliana]
  misc_feature (142)..(500): Homolog of NCBI NO: 40253745 NR Description: SERK1 protein-like [Oryza sativa (japonica
  misc_feature (192)..(532): Homolog of NCBI NO: 15227291 NR Description: protein kinase -related [Arabidopsis thaliana]
  misc_feature (1)..(31): Homolog of NCBI NO: 28376688 NR Description: putative serine/threonine kinase
  misc_feature (1)..(547): Homolog of NCBI NO: 28376688 NR Description: putative serine/threonine kinase
  misc_feature (52)..(227): Homolog of NCBI NO: 25518708 NR Description: hypothetical protein F24J8.18 - Arabidopsis
  misc_feature (248)..(547): Homolog of NCBI NO: 25518708 NR Description: hypothetical protein F24J8.18 - Arabidopsis
  misc_feature (52)..(547): Homolog of NCBI NO: 22329713 NR Description: expressed protein [Arabidopsis thaliana]
  misc_feature (423)..(547): Homolog of NCBI NO: 15223890 NR Description: hypothetical protein [Arabidopsis thaliana]
  misc_feature (171)..(436): Homolog of NCBI NO: 15223890 NR Description: hypothetical protein [Arabidopsis thaliana]
MFRSVPNTNGADGPQMNIPSLVCGSPDIAIEAAKIGNSFSPARTSSRWTRTSRSSSLQSPDSLGVDNLLALVPVQTNETDSGSLESGPGWHFLRGLYGNNRKSWTKVSAKKAVLQWVSRLRGRHSETVIYLDRKRSDSGCDEECSSSIDGEDVSISRFGSELMQSPLSPFIGSNNIPEELEGLHEKYSSTCRLFTYEEVLSITSNFASENLVGEGGNSYVYRGDLPDGRELAVKILKPCLDVLKEFILEIEVITSVHHKNIVSLFGFCFENNNLMLVYDYLPRGSLEENLHGNRKDAKKFGWMERYKVAVGVAEALDYLHNTHDPEVIHRDVKSSNVLLADDFEPQLSDFGFASLASSTSQHVAGGDIAGTFGYLAPEYFMHGKVTDKIDVYAFGVVLLELISGRKPICVDQSKGQESLVLWANPILDSGKFAQLLDPSLENDNSNDLIEKLLLAATLCIKRTPHDRPQIGLVLKILQGEEEATEWGKQQVRASEDVSAYLTNIESHINLALLDLEDDAASDSSPEASSISVEEYLKGRWSRTASFNFN

SEQ ID NO: 46469 - DNA, 2416 bp, Arabidopsis thaliana
  misc_feature (1)..(2416): Ceres Seq. ID no. 15168717
  misc_feature: MA Experiment ID: 20000173 Result: Down-regulated in Transcription
  misc_feature: MA Experiment 20000173 PARAMETER Experiment Name: At_42deg_Heat_P Parameter: Age (day) Value: 14
  misc_feature: MA Experiment 20000173 PARAMETER Experiment Name: At_42deg_Heat_P Parameter: Organism Value: A. thaliana
  misc_feature: MA Experiment 20000173 PARAMETER Experiment Name: At_42deg_Heat_P Parameter: Plant Line Value: WS
  misc_feature: MA Experiment 20000173 PARAMETER Experiment Name: At_42deg_Heat_P Parameter: Temperature (deg C) Value: 42 vs. 22
  misc_feature: MA Experiment 20000173 PARAMETER Experiment Name: At_42deg_Heat_P Parameter: Timepoint (hr) Value: 6
  misc_feature: MA Experiment 20000173 PARAMETER Experiment Name: At_42deg_Heat_P Parameter: Tissue Value: Aerial
tcactagtccccccccccccccatttgtttatttcatcgtccaaatttttgacagtatttttttgtttgttagagaagggcgagagagagtgactttttttgtttgcctttgttaatggcttgtgtgtgagattcattgaattttttgaaaattctgacgaataaaaaccctatctaccaatcacaaaccctagatttttgttatcttcttcatccgaagattctctttgatctgtgtctccttccttctgattctcccatttcatttcattgattcttttgattcgattctattcgagctcaattttgtagatcagaacccagaatcgaatttgggataacttgaacaatatccttggtaacttgttgatctgaatttgagtgaagaagacatcgaattcaagtttggtgtgggagattttttttaatggagtgatgatgatttaaagaggaagataaagggaacgatgactggattgggtgttcgatccagtagctatggttccttggagaagacgggacttaacggcgtcgttttacctatccagatcactaccacgacgcgtaccaaaccatctaagatgcagaaagatagagaaggtattgtacattggatctgcaaattcgctggtcgtaagaaggttggcatgttgcttctcttcttaatctccgccgtcgtcttccttcgcgtcctttacgtcggaaaaggtgaagatagtcaggaaggtcaaggtcctccgagtcttcatttcaatggcagttcaggcgtaaattattcaaatatgttacaaacaaatgaagagctaaacatgaatattggaaatatatcgttcaaggcaaaagaagttattgtgttccctcctcctcctatacattttcttggttattcgcttcctcaaggtcatccttgtaacagtttcactttacctcccccaccagcagacaggaaaagaacaggaccacgcccatgcccggtatgttaccttccagtagaagaagcagttgccttgatgccaaatgccccatcattttcccctgttcttaagaacttaacgtatatatatgaagaaccgttaaacagagagacagagtttggagggtcagattttggtggttatcctactttgaaacataggaatgattcttttgacattaaagaaacaatgagtgtacattgtgggtttgtcaaaggacctcaacctggtcgaaatacaggatttgacattgatgaggcagatcttcttgaaatgaagcagtgtcgtgggatagttgttgcttcagcagtatttgatgcttttgatgatgtaaaagccccacaaaatatcagtaaatatgcggaggaaacagtttgcttctacatgtttgttgatgaagagactgaatcaattttgaagagagaacgaggccttgatggcaataagaaagtagggatatggagagttgttgttgttcataatctcccctattcagatggaaggcgcaatggaaaggtgcccaagcttcttgtccataggatgtttccaaatgctcgctattctttatggattgacggaaaactagaacttgtcgtcgatccatatcaaattcttgaaagattcttgtggaggaaaaatgctacttttgctatttctagacattacaaacgatttgatgtcttagtggaagccgaagcaaataaagctgctggtaaatatgataatgcttctatcgactttcaagtggatttttacaagaacgaagggttaaccccttattctgtcgcaaagctcccaatcacaagcgacgtacccgagggttgtgtcattttaagagagcatgttcccataagcaacctcttcacttgtctttggttcaacgaagttgaccgattcacttctagagatcaaatcagtttctcaacagtaagagataagatcgcagcaaaaacaaactggacagtaagcatgttccttgattgtgaaagacgcaattttgtagttcagagatatcaccgagcagaacaagaaagatttgcaaggcaacgacctccggtgcctaattttcctcctccaccaccttcgccgcctccaccagttttaatcagcagcgatttgcctagaaaaatgtcaagtggaagagcggttagcacaacgccgcctagaagacgaggaagagacagacggtctggtcaaaggggtcacaggaaagctaacttgccagtaagattaccagattcagcttaagagttggcgtccgtcttcttcttcttcttcatggtcactctcatcaccaacatcacattccaattttaccacacagtatgtttattttttttgtttctctatttgattctaaggattcaaaatcaattttttaatgtatatatatacacgaacattttgtacttggataataaattatagtgttcgaatttttg

SEQ ID NO: 46470 - protein, 584 aa, Arabidopsis thaliana
  peptide (1)..(584): Ceres Seq. ID no. 15168718
  misc_feature (194)..(508): Pfam Name: Protein of unknown function (DUF616) Pfam Description: Protein of unknown function (DUF616)
  misc_feature (194)..(483): Homolog of NCBI NO: 15218687 NR Description: hypothetical protein [Arabidopsis thaliana]
  misc_feature (167)..(498): Homolog of NCBI NO: 7452444 NR Description: hypothetical protein F20M13.60 - Arabidopsis
  misc_feature (165)..(498): Homolog of NCBI NO: 18420250 NR Description: expressed protein [Arabidopsis thaliana]
  misc_feature (149)..(511): Homolog of NCBI NO: 15227062 NR Description: hypothetical protein [Arabidopsis thaliana]
  misc_feature (194)..(514): Homolog of NCBI NO: 15233955 NR Description: expressed protein [Arabidopsis thaliana]
  misc_feature (194)..(514): Homolog of NCBI NO: 25403429 NR Description: protein F12K21.12 [imported] - Arabidopsis
  misc_feature (126)..(575): Homolog of NCBI NO: 25405617 NR Description: hypothetical protein F8L10.10 [imported] -
  misc_feature (41)..(575): Homolog of NCBI NO: 30695403 NR Description: expressed protein [Arabidopsis thaliana]
  misc_feature (324)..(572): Homolog of NCBI NO: 34905662 NR Description: P0475H04.14 [Oryza sativa (japonica
  misc_feature (72)..(345): Homolog of NCBI NO: 34905662 NR Description: P0475H04.14 [Oryza sativa (japonica
MTGLGVRSSSYGSLEKTGLNGVVLPIQITTTTRTKPSKMQKDREGIVHWICKFAGRKKVGMLLLFLISAVVFLRVLYVGKGEDSQEGQGPPSLHFNGSSGVNYSNMLQTNEELNMNIGNISFKAKEVIVFPPPPIHFLGYSLPQGHPCNSFTLPPPPADRKRTGPRPCPVCYLPVEEAVALMPNAPSFSPVLKNLTYIYEEPLNRETEFGGSDFGGYPTLKHRNDSFDIKETMSVHCGFVKGPQPGRNTGFDIDEADLLEMKQCRGIVVASAVFDAFDDVKAPQNISKYAEETVCFYMFVDEETESILKRERGLDGNKKVGIWRVVVVHNLPYSDGRRNGKVPKLLVHRMFPNARYSLWIDGKLELVVDPYQILERFLWRKNATFAISRHYKRFDVLVEAEANKAAGKYDNASIDFQVDFYKNEGLTPYSVAKLPITSDVPEGCVILREHVPISNLFTCLWFNEVDRFTSRDQISFSTVRDKIAAKTNWTVSMFLDCERRNFVVQRYHRAEQERFARQRPPVPNFPPPPPSPPPPVLISSDLPRKMSSGRAVSTTPPRRRGRDRRSGQRGHRKANLPVRLPDSA

SEQ ID NO: 46471 - protein, 546 aa, Arabidopsis thaliana
  peptide (1)..(546): Ceres Seq. ID no. 15168719
  misc_feature (156)..(470): Pfam Name: Protein of unknown function (DUF616) Pfam Description: Protein of unknown function (DUF616)
  misc_feature (156)..(445): Homolog of NCBI NO: 15218687 NR Description: hypothetical protein [Arabidopsis thaliana]
  misc_feature (129)..(460): Homolog of NCBI NO: 7452444 NR Description: hypothetical protein F20M13.60 - Arabidopsis
  misc_feature (127)..(460): Homolog of NCBI NO: 18420250 NR Description: expressed protein [Arabidopsis thaliana]
  misc_feature (111)..(473): Homolog of NCBI NO: 15227062 NR Description: hypothetical protein [Arabidopsis thaliana]
  misc_feature (156)..(476): Homolog of NCBI NO: 15233955 NR Description: expressed protein [Arabidopsis thaliana]
  misc_feature (156)..(476): Homolog of NCBI NO: 25403429 NR Description: protein F12K21.12 [imported] - Arabidopsis
  misc_feature (88)..(537): Homolog of NCBI NO: 25405617 NR Description: hypothetical protein F8L10.10 [imported] -
  misc_feature (3)..(537): Homolog of NCBI NO: 30695403 NR Description: expressed protein [Arabidopsis thaliana]
  misc_feature (286)..(534): Homolog of NCBI NO: 34905662 NR Description: P0475H04.14 [Oryza sativa (japonica
  misc_feature (34)..(307): Homolog of NCBI NO: 34905662 NR Description: P0475H04.14 [Oryza sativa (japonica
MQKDREGIVHWICKFAGRKKVGMLLLFLISAVVFLRVLYVGKGEDSQEGQGPPSLHFNGSSGVNYSNMLQTNEELNMNIGNISFKAKEVIVFPPPPIHFLGYSLPQGHPCNSFTLPPPPADRKRTGPRPCPVCYLPVEEAVALMPNAPSFSPVLKNLTYIYEEPLNRETEFGGSDFGGYPTLKHRNDSFDIKETMSVHCGFVKGPQPGRNTGFDIDEADLLEMKQCRGIVVASAVFDAFDDVKAPQNISKYAEETVCFYMFVDEETESILKRERGLDGNKKVGIWRVVVVHNLPYSDGRRNGKVPKLLVHRMFPNARYSLWIDGKLELVVDPYQILERFLWRKNATFAISRHYKRFDVLVEAEANKAAGKYDNASIDFQVDFYKNEGLTPYSVAKLPITSDVPEGCVILREHVPISNLFTCLWFNEVDRFTSRDQISFSTVRDKIAAKTNWTVSMFLDCERRNFVVQRYHRAEQERFARQRPPVPNFPPPPPSPPPPVLISSDLPRKMSSGRAVSTTPPRRRGRDRRSGQRGHRKANLPVRLPDSA

SEQ ID NO: 46472 - protein, 524 aa, Arabidopsis thaliana
  peptide (1)..(524): Ceres Seq. ID no. 15168720
  misc_feature (134)..(448): Pfam Name: Protein of unknown function (DUF616) Pfam Description: Protein of unknown function (DUF616)
  misc_feature (134)..(423): Homolog of NCBI NO: 15218687 NR Description: hypothetical protein [Arabidopsis thaliana]
  misc_feature (107)..(438): Homolog of NCBI NO: 7452444 NR Description: hypothetical protein F20M13.60 - Arabidopsis
  misc_feature (105)..(438): Homolog of NCBI NO: 18420250 NR Description: expressed protein [Arabidopsis thaliana]
  misc_feature (89)..(451): Homolog of NCBI NO: 15227062 NR Description: hypothetical protein [Arabidopsis thaliana]
  misc_feature (134)..(454): Homolog of NCBI NO: 15233955 NR Description: expressed protein [Arabidopsis thaliana]
  misc_feature (134)..(454): Homolog of NCBI NO: 25403429 NR Description: protein F12K21.12 [imported] - Arabidopsis
  misc_feature (66)..(515): Homolog of NCBI NO: 25405617 NR Description: hypothetical protein F8L10.10 [imported] -
  misc_feature (1)..(515): Homolog of NCBI NO: 30695403 NR Description: expressed protein [Arabidopsis thaliana]
  misc_feature (264)..(512): Homolog of NCBI NO: 34905662 NR Description: P0475H04.14 [Oryza sativa (japonica
  misc_feature (12)..(285): Homolog of NCBI NO: 34905662 NR Description: P0475H04.14 [Oryza sativa (japonica
MLLLFLISAVVFLRVLYVGKGEDSQEGQGPPSLHFNGSSGVNYSNMLQTNEELNMNIGNISFKAKEVIVFPPPPIHFLGYSLPQGHPCNSFTLPPPPADRKRTGPRPCPVCYLPVEEAVALMPNAPSFSPVLKNLTYIYEEPLNRETEFGGSDFGGYPTLKHRNDSFDIKETMSVHCGFVKGPQPGRNTGFDIDEADLLEMKQCRGIVVASAVFDAFDDVKAPQNISKYAEETVCFYMFVDEETESILKRERGLDGNKKVGIWRVVVVHNLPYSDGRRNGKVPKLLVHRMFPNARYSLWIDGKLELVVDPYQILERFLWRKNATFAISRHYKRFDVLVEAEANKAAGKYDNASIDFQVDFYKNEGLTPYSVAKLPITSDVPEGCVILREHVPISNLFTCLWFNEVDRFTSRDQISFSTVRDKIAAKTNWTVSMFLDCERRNFVVQRYHRAEQERFARQRPPVPNFPPPPPSPPPPVLISSDLPRKMSSGRAVSTTPPRRRGRDRRSGQRGHRKANLPVRLPDSA

SEQ ID NO: 46473 - DNA, 1852 bp, Arabidopsis thaliana
  misc_feature (1)..(1852): Ceres Seq. ID no. 12574781
  misc_feature: MA Experiment ID: 20000184 Result: Down-regulated in Transcription
  misc_feature: MA Experiment 20000184 PARAMETER Experiment Name: At_Shoots__P Parameter: Age (day) Value: 7
  misc_feature: MA Experiment 20000184 PARAMETER Experiment Name: At_Shoots__P Parameter: Tissue Value: Shoots vs. Whole Plant
gggagagaatctcgatcaaaggcttcgaagctctctcttttttttttggtgtgtctaaatctctcacgcacgacgttgagagagctctttcctttgcgatcttgttgtcttcctctgctccgatcgaattcacaaccagctttaataagcattgtagttcaacttgaatttattggcggttgttgaagctgtgtagctattaacaattggggctatgcattcaacgattttctgctcgtgaagaaggaatataacttatttataaggtttcagtcttagacatgtcgtgtttcgattgcagtggttatgatgtctcaagttgtcttattcatctcgctgaatggcatcctttggaatagtcaagttctccgggcttgaagccctcgaaaccccttttatcgcggggttcctcagttaacttgaggattttatatttcatcatacatttgaggagcaatttgtttttttattttatttttgagaaggagatcatgtttcgtgatagttttttgtttgcccgtaccatcggttgctttggatgctttggcagttctggtagtagaaaccaacaatcgcctaagccctacgatgatgatacacattcctgtgatagtgatgtaactagcactgcaagaggagaagaagaagaagatgaagaagaagtagagcagaagagccgctctaaacgatctgaggaaattttgaaatatagattagataatggattaatctgcagacacattccagtgagagaaactaatgaacttatacgtggagaggatgaaaatggtgacaagacaatcaatgagtatgttcgcgtgtgtaaaattggatccggtagctatggtaaagtggttttatatcgaagcactttagacggccagtattatgctatcaaggcatttcacaagtcgcatttattaaggctaagggtggcaccgtcagagactgctatgagtgatgttcttcgtgaggttatgattatgaaaattttggagcatcctaacatcgttaacctcattgaggtgatagatgaccctgaaactgatcatttttacatggttcttgaatacgttgatggaaaatgggtgtatgacggttctggaccgccgggtgctctcggagagaaaactgctagaaagtatttgcgggatattgttactggactgatgtatcttcatgctcatgatgttattcacggggacattaaacccgacaatttgctggttactagtagcggtacagtgaagataggagatttcagtgtcagccaagttttcaaggatgatgacgatcagctgcgccgatctcccgggactcctgtcttcactgctccagaatgttgtttagtatcaggtataacgtatagtggcagagctgcggatacatgggcagtgggagttacattgtattgtatgatattgggacaatacccgtttcttgcggatactcttcaggacacctacgacaagattgttaacaaccctctgataatcccggatggattgaatcctcttctcagagatttgatcgaaggtctcctttgcaaagatccgagccagagaatgacactgaagaatgtgtcggagcatccatgggtcattggagaagacgggcatgtcccggagtatttttgttggtgcaaacgcaatgctgcctcaaagattgaagaaggagaagctaatgggatctctgaaacctcagatcctaactaaaaaaactttgatgcttttgatcgttttaagaaatgtacaagctttgaagaatagatgcatctacttaaccgtacaagtttgacctcgcttggggtcattgtttttctttttatttaattctagatcattttcatgtt

SEQ ID NO: 46474 - protein, 407 aa, Arabidopsis thaliana
  peptide (1)..(407): Ceres Seq. ID no. 12574782
  misc_feature (107)..(370): Pfam Name: Protein kinase domain Pfam Description: Protein kinase domain
  misc_feature (104)..(378): Homolog of NCBI NO: 25152919 NR Description: Calcium calmodulin-dependent protein kinase
  misc_feature (85)..(378): Homolog of NCBI NO: 23491819 NR Description: calcium/calmodulin-dependent protein kinase
  misc_feature (82)..(370): Homolog of NCBI NO: 31197975 NR Description: ENSANGP00000009937 [Anopheles gambiae]
  misc_feature (86)..(398): Homolog of NCBI NO: 19075860 NR Description: serine/threonine-protein kinase ssp1
  misc_feature (65)..(384): Homolog of NCBI NO: 13324784 NR Description: putative protein kinase [Oryza sativa]
  misc_feature (12)..(397): Homolog of NCBI NO: 11358840 NR Description: serine/threonine-protein kinase-like protein -
  misc_feature (1)..(397): Homolog of NCBI NO: 30692568 NR Description: protein kinase family [Arabidopsis thaliana]
  misc_feature (1)..(407): Homolog of NCBI NO: 9757757 NR Description: serine/threonine-protein kinase-like protein
  misc_feature (1)..(407): Homolog of NCBI NO: 20466760 NR Description: serine/threonine-protein kinase-like protein
  misc_feature (1)..(407): Homolog of NCBI NO: 22327987 NR Description: serine/threonine-protein kinase - like protein
MFRDSFLFARTIGCFGCFGSSGSRNQQSPKPYDDDTHSCDSDVTSTARGEEEEDEEEVEQKSRSKRSEEILKYRLDNGLICRHIPVRETNELIRGEDENGDKTINEYVRVCKIGSGSYGKVVLYRSTLDGQYYAIKAFHKSHLLRLRVAPSETAMSDVLREVMIMKILEHPNIVNLIEVIDDPETDHFYMVLEYVDGKWVYDGSGPPGALGEKTARKYLRDIVTGLMYLHAHDVIHGDIKPDNLLVTSSGTVKIGDFSVSQVFKDDDDQLRRSPGTPVFTAPECCLVSGITYSGRAADTWAVGVTLYCMILGQYPFLADTLQDTYDKIVNNPLIIPDGLNPLLRDLIEGLLCKDPSQRMTLKNVSEHPWVIGEDGHVPEYFCWCKRNAASKIEEGEANGISETSDPN

SEQ ID NO: 46475 - protein, 253 aa, Arabidopsis thaliana
  peptide (1)..(253): Ceres Seq. ID no. 12574783
  misc_feature (1)..(216): Pfam Name: Protein kinase domain Pfam Description: Protein kinase domain
  misc_feature (1)..(224): Homolog of NCBI NO: 25152919 NR Description: Calcium calmodulin-dependent protein kinase
  misc_feature (1)..(224): Homolog of NCBI NO: 23491819 NR Description: calcium/calmodulin-dependent protein kinase
  misc_feature (1)..(216): Homolog of NCBI NO: 31197975 NR Description: ENSANGP00000009937 [Anopheles gambiae]
  misc_feature (1)..(244): Homolog of NCBI NO: 19075860 NR Description: serine/threonine-protein kinase ssp1
  misc_feature (1)..(230): Homolog of NCBI NO: 13324784 NR Description: putative protein kinase [Oryza sativa]
  misc_feature (1)..(243): Homolog of NCBI NO: 11358840 NR Description: serine/threonine-protein kinase-like protein -
  misc_feature (1)..(243): Homolog of NCBI NO: 30692568 NR Description: protein kinase family [Arabidopsis thaliana]
  misc_feature (1)..(253): Homolog of NCBI NO: 9757757 NR Description: serine/threonine-protein kinase-like protein
  misc_feature (1)..(253): Homolog of NCBI NO: 20466760 NR Description: serine/threonine-protein kinase-like protein
  misc_feature (1)..(253): Homolog of NCBI NO: 22327987 NR Description: serine/threonine-protein kinase - like protein
MSDVLREVMIMKILEHPNIVNLIEVIDDPETDHFYMVLEYVDGKWVYDGSGPPGALGEKTARKYLRDIVTGLMYLHAHDVIHGDIKPDNLLVTSSGTVKIGDFSVSQVFKDDDDQLRRSPGTPVFTAPECCLVSGITYSGRAADTWAVGVTLYCMILGQYPFLADTLQDTYDKIVNNPLIIPDGLNPLLRDLIEGLLCKDPSQRMTLKNVSEHPWVIGEDGHVPEYFCWCKRNAASKIEEGEANGISETSDPN

SEQ ID NO: 46476 - protein, 245 aa, Arabidopsis thaliana
  peptide (1)..(245): Ceres Seq. ID no. 12574784
  misc_feature (1)..(208): Pfam Name: Protein kinase domain Pfam Description: Protein kinase domain
  misc_feature (1)..(216): Homolog of NCBI NO: 25152919 NR Description: Calcium calmodulin-dependent protein kinase
  misc_feature (1)..(216): Homolog of NCBI NO: 23491819 NR Description: calcium/calmodulin-dependent protein kinase
  misc_feature (1)..(208): Homolog of NCBI NO: 31197975 NR Description: ENSANGP00000009937 [Anopheles gambiae]
  misc_feature (1)..(236): Homolog of NCBI NO: 19075860 NR Description: serine/threonine-protein kinase ssp1
  misc_feature (1)..(222): Homolog of NCBI NO: 13324784 NR Description: putative protein kinase [Oryza sativa]
  misc_feature (1)..(235): Homolog of NCBI NO: 11358840 NR Description: serine/threonine-protein kinase-like protein -
  misc_feature (1)..(235): Homolog of NCBI NO: 30692568 NR Description: protein kinase family [Arabidopsis thaliana]
  misc_feature (1)..(245): Homolog of NCBI NO: 9757757 NR Description: serine/threonine-protein kinase-like protein
  misc_feature (1)..(245): Homolog of NCBI NO: 20466760 NR Description: serine/threonine-protein kinase-like protein
  misc_feature (1)..(245): Homolog of NCBI NO: 22327987 NR Description: serine/threonine-protein kinase - like protein
MIMKILEHPNIVNLIEVIDDPETDHFYMVLEYVDGKWVYDGSGPPGALGEKTARKYLRDIVTGLMYLHAHDVIHGDIKPDNLLVTSSGTVKIGDFSVSQVFKDDDDQLRRSPGTPVFTAPECCLVSGITYSGRAADTWAVGVTLYCMILGQYPFLADTLQDTYDKIVNNPLIIPDGLNPLLRDLIEGLLCKDPSQRMTLKNVSEHPWVIGEDGHVPEYFCWCKRNAASKIEEGEANGISETSDPN

SEQ ID NO: 46477 - DNA, 1965 bp, Arabidopsis thaliana
  misc_feature (1)..(1965): Ceres Seq. ID no. 14310049
  misc_feature: MA Experiment ID: 20000307 Result: Down-regulated in Transcription
  misc_feature: MA Experiment 20000307 PARAMETER Experiment Name: At_Germinating_Seeds_Sub_P Parameter: Age (hr) Value: 24 vs. 0
  misc_feature: MA Experiment 20000307 PARAMETER Experiment Name: At_Germinating_Seeds_Sub_P Parameter: Organism Value: A. thaliana
  misc_feature: MA Experiment 20000307 PARAMETER Experiment Name: At_Germinating_Seeds_Sub_P Parameter: Plant Line Value: WS
  misc_feature: MA Experiment 20000307 PARAMETER Experiment Name: At_Germinating_Seeds_Sub_P Parameter: Tissue Value: Germinating Seeds
  misc_feature: MA Experiment ID: 20000355 Result: Up-regulated in Transcription
  misc_feature: MA Experiment 20000355 PARAMETER Experiment Name: At_Siliques_Sub_P Parameter: Age (day) Value: 21
  misc_feature: MA Experiment 20000355 PARAMETER Experiment Name: At_Siliques_Sub_P Parameter: Organism Value: A. thaliana
  misc_feature: MA Experiment 20000355 PARAMETER Experiment Name: At_Siliques_Sub_P Parameter: Plant Line Value: WS
  misc_feature: MA Experiment 20000355 PARAMETER Experiment Name: At_Siliques_Sub_P Parameter: Tissue Value: Less Than 5mm Siliques vs. Whole Plant
  misc_feature: MA Experiment ID: 20000440 Result: Up-regulated in Transcription
  misc_feature: MA Experiment 20000440 PARAMETER Experiment Name: At_Closed-Flower__Sub_P Parameter: Tissue Value: Closed Flower vs. Whole Plant
attctcctcaaaaccctaatttctcacatctgtaaagaaaaattctccctaaacttaaccctcctgtagaaaaaaaaaaaaaccctggtaattatgagtgttttaggagaaattcttctgaaattaagattccgccatggaagcttttgatctttctcttcactagttttacttaattttcaacacacaataacaaaaacaaaaaaatctctttgccccttttctctgaatcttacgtcctctggatctttcttctctctctctctctcttgtctatactttaagtgtctgtctgaagaagcttgaatctgtcgtgatcatcaagattcaagttctgtctttttgagtctttttcttctacttctattgagtttctcttccttaattgtcggaatcagaatcttttcagatggaggagagagaaggaactaacatcaacaacatcccaaccagttttggtctgaaacaacatgaaactcctcttcctcctcctggttacccaccacggtctgaaaaccctaatctttttccggtgggtcaatccagcacttcctccgccgccgccgcggtgaaaccttctgagaatgttgctcctccttttagcttaacaatgccggtggagaattcttcttctgagttgaagaagaagagagggagaccaagaaagtataaccctgatggctcactcgctgtgactctctctcctatgcctatctcatcctccgttccgttgacgtcggagtttggttctcggaaacgaggaagaggtcgaggaagaggcagaggaagaggacgaggacgtggacaaggacaaggaagcagagagcccaataacaacaacaacgacaacaattggctcaagaatcctcagatgttcgaatttaacaacaacactcctacttctggtggaggaggacctgctgaaattgtcagtccaagttttacacctcatgtgctcacagtaaatgccggtgaggatgtgacaatgaagataatgacattctctcaacaaggctcgcgtgctatttgtattctttcagcgaacggtcccatatccaatgttacacttcgtcaatctatgacatctggtggtactctcacttatgagggtcattttgagattctttctttgacgggttcgtttataccaagcgagagtggaggaacccgaagcagagctggtgggatgagtgtctctcttgcaggacaagatggtcgtgtctttggtggtggacttgctggtctctttattgccgctggtcctgttcaggtaatggtagggagttttatagcgggtcaggaggaatcgcagcagcagcagcagcagataaagaagcaaagaagggaaagactcgggatcccgacaacaacacaagcttctaatatctcattcggtggctcagcggaagatcctaaggctagatacgggctcaacaagcctgttgttattcagccaccaccggtgtctgcaccacctgtgtccttttcgcatgaaccaagtactaacaccgtccatggttactatgcaaataacacagctaaccatatcaaggatctcttctcttccctccctggagaagatggggaagaagatgaggatgatttagaaggtgaagatgatgaagaattcggaggccatagcgaatctgacaccgaggttccaagctgatgatcgatggaaagaatccgacatatatgtgttatgaatcttgagttgttttatttcggtgtcttcagatttttttagagcgtaatggtattttttttctttcagattgttagttgttaaagtcttaaacagagatatttcactaaaagttagggtttactagaggatgtaatctttagggttctttgacttgtgtctttcttttaatcctcagatggttgttgtaggcttgtagccaatcttagtgtgtgttcaaactctctccttcaatcaaactccccaatgacttcattttg

SEQ ID NO: 46478 - protein, 419 aa, Arabidopsis thaliana
  peptide (1)..(419): Ceres Seq. ID no. 14310050
  misc_feature (166)..(327): Homolog of NCBI NO: 15235790 NR Description: DNA binding protein -related [Arabidopsis
  misc_feature (163)..(398): Homolog of NCBI NO: 15241763 NR Description: expressed protein [Arabidopsis thaliana]
  misc_feature (53)..(139): Homolog of NCBI NO: 37537056 NR Description: putative AT-Hook DNA-binding protein
  misc_feature (177)..(334): Homolog of NCBI NO: 37537056 NR Description: putative AT-Hook DNA-binding protein
  misc_feature (33)..(345): Homolog of NCBI NO: 7485570 NR Description: hypothetical protein F16J13.150 - Arabidopsis
  misc_feature (32)..(398): Homolog of NCBI NO: 8809639 NR Description: contains similarity to DNA-binding
  misc_feature (33)..(105): Homolog of NCBI NO: 22328578 NR Description: DNA-binding protein -related [Arabidopsis
  misc_feature (157)..(345): Homolog of NCBI NO: 22328578 NR Description: DNA-binding protein -related [Arabidopsis
  misc_feature (1)..(419): Homolog of NCBI NO: 15235023 NR Description: expressed protein [Arabidopsis thaliana]
  misc_feature (1)..(419): Homolog of NCBI NO: 15242131 NR Description: expressed protein [Arabidopsis thaliana]
MEEREGTNINNIPTSFGLKQHETPLPPPGYPPRSENPNLFPVGQSSTSSAAAAVKPSENVAPPFSLTMPVENSSSELKKKRGRPRKYNPDGSLAVTLSPMPISSSVPLTSEFGSRKRGRGRGRGRGRGRGRGQGQGSREPNNNNNDNNWLKNPQMFEFNNNTPTSGGGGPAEIVSPSFTPHVLTVNAGEDVTMKIMTFSQQGSRAICILSANGPISNVTLRQSMTSGGTLTYEGHFEILSLTGSFIPSESGGTRSRAGGMSVSLAGQDGRVFGGGLAGLFIAAGPVQVMVGSFIAGQEESQQQQQQIKKQRRERLGIPTTTQASNISFGGSAEDPKARYGLNKPVVIQPPPVSAPPVSFSHEPSTNTVHGYYANNTANHIKDLFSSLPGEDGEEDEDDLEGEDDEEFGGHSESDTEVPS

SEQ ID NO: 46479 - protein, 352 aa, Arabidopsis thaliana
  peptide (1)..(352): Ceres Seq. ID no. 14310051
  misc_feature (99)..(260): Homolog of NCBI NO: 15235790 NR Description: DNA binding protein -related [Arabidopsis
  misc_feature (96)..(331): Homolog of NCBI NO: 15241763 NR Description: expressed protein [Arabidopsis thaliana]
  misc_feature (1)..(72): Homolog of NCBI NO: 37537056 NR Description: putative AT-Hook DNA-binding protein
  misc_feature (110)..(267): Homolog of NCBI NO: 37537056 NR Description: putative AT-Hook DNA-binding protein
  misc_feature (1)..(278): Homolog of NCBI NO: 7485570 NR Description: hypothetical protein F16J13.150 - Arabidopsis
  misc_feature (1)..(331): Homolog of NCBI NO: 8809639 NR Description: contains similarity to DNA-binding
  misc_feature (1)..(38): Homolog of NCBI NO: 22328578 NR Description: DNA-binding protein -related [Arabidopsis
  misc_feature (90)..(278): Homolog of NCBI NO: 22328578 NR Description: DNA-binding protein -related [Arabidopsis
  misc_feature (1)..(352): Homolog of NCBI NO: 15235023 NR Description: expressed protein [Arabidopsis thaliana]
  misc_feature (1)..(352): Homolog of NCBI NO: 15242131 NR Description: expressed protein [Arabidopsis thaliana]
MPVENSSSELKKKRGRPRKYNPDGSLAVTLSPMPISSSVPLTSEFGSRKRGRGRGRGRGRGRGRGQGQGSREPNNNNNDNNWLKNPQMFEFNNNTPTSGGGGPAEIVSPSFTPHVLTVNAGEDVTMKIMTFSQQGSRAICILSANGPISNVTLRQSMTSGGTLTYEGHFEILSLTGSFIPSESGGTRSRAGGMSVSLAGQDGRVFGGGLAGLFIAAGPVQVMVGSFIAGQEESQQQQQQIKKQRRERLGIPTTTQASNISFGGSAEDPKARYGLNKPVVIQPPPVSAPPVSFSHEPSTNTVHGYYANNTANHIKDLFSSLPGEDGEEDEDDLEGEDDEEFGGHSESDTEVPS

SEQ ID NO: 46480 - protein, 320 aa, Arabidopsis thaliana
  peptide (1)..(320): Ceres Seq. ID no. 14310052
  misc_feature (78)..(197): Homolog of NCBI NO: 2213534 NR Description: DNA-binding PD1-like protein [Pisum sativum]
  misc_feature (67)..(228): Homolog of NCBI NO: 15235790 NR Description: DNA binding protein -related [Arabidopsis
  misc_feature (64)..(299): Homolog of NCBI NO: 15241763 NR Description: expressed protein [Arabidopsis thaliana]
  misc_feature (1)..(40): Homolog of NCBI NO: 37537056 NR Description: putative AT-Hook DNA-binding protein
  misc_feature (78)..(235): Homolog of NCBI NO: 37537056 NR Description: putative AT-Hook DNA-binding protein
  misc_feature (1)..(246): Homolog of NCBI NO: 7485570 NR Description: hypothetical protein F16J13.150 - Arabidopsis
  misc_feature (1)..(299): Homolog of NCBI NO: 8809639 NR Description: contains similarity to DNA-binding
  misc_feature (58)..(246): Homolog of NCBI NO: 22328578 NR Description: DNA-binding protein -related [Arabidopsis
  misc_feature (1)..(320): Homolog of NCBI NO: 15235023 NR Description: expressed protein [Arabidopsis thaliana]
  misc_feature (1)..(320): Homolog of NCBI NO: 15242131 NR Description: expressed protein [Arabidopsis thaliana]
MPISSSVPLTSEFGSRKRGRGRGRGRGRGRGRGQGQGSREPNNNNNDNNWLKNPQMFEFNNNTPTSGGGGPAEIVSPSFTPHVLTVNAGEDVTMKIMTFSQQGSRAICILSANGPISNVTLRQSMTSGGTLTYEGHFEILSLTGSFIPSESGGTRSRAGGMSVSLAGQDGRVFGGGLAGLFIAAGPVQVMVGSFIAGQEESQQQQQQIKKQRRERLGIPTTTQASNISFGGSAEDPKARYGLNKPVVIQPPPVSAPPVSFSHEPSTNTVHGYYANNTANHIKDLFSSLPGEDGEEDEDDLEGEDDEEFGGHSESDTEVPS

SEQ ID NO: 46481 - DNA, 1151 bp, Arabidopsis thaliana
  misc_feature (1)..(1151): Ceres Seq. ID no. 12600794
  misc_feature: MA Experiment ID: 20000439 Result: Down-regulated in Transcription
  misc_feature: MA Experiment 20000439 PARAMETER Experiment Name: At_Roots__P Parameter: Age (day) Value: 14 vs. 21
  misc_feature: MA Experiment 20000439 PARAMETER Experiment Name: At_Roots__P Parameter: Organism Value: A. thaliana
  misc_feature: MA Experiment 20000439 PARAMETER Experiment Name: At_Roots__P Parameter: Tissue Value: Roots vs. Whole Plant
  misc_feature: MA Experiment ID: 20001905 Result: Down-regulated in Transcription
  misc_feature: MA Experiment 20001905 PARAMETER Experiment Name: At_Drought_Reproduction_P Parameter: Age (day) Value: 40
  misc_feature: MA Experiment 20001905 PARAMETER Experiment Name: At_Drought_Reproduction_P Parameter: Organism Value: A. thaliana
  misc_feature: MA Experiment 20001905 PARAMETER Experiment Name: At_Drought_Reproduction_P Parameter: Plant Line Value: WS
  misc_feature: MA Experiment 20001905 PARAMETER Experiment Name: At_Drought_Reproduction_P Parameter: Timepoint (day) Value: 10
  misc_feature: MA Experiment 20001905 PARAMETER Experiment Name: At_Drought_Reproduction_P Parameter: Tissue Value: Rosettes
  misc_feature: MA Experiment 20001905 PARAMETER Experiment Name: At_Drought_Reproduction_P Parameter: Treatment Value: Drought vs. No Drought
accaccacaggctcattgacagaaagagagtgggagagagacatgacgggctgtgtgaattctatttctccgccgccggtgactttataccggcatcgtgcctctccgtcacggtcgtccttctcattatccggcgatgccttacactctctttaccggcaccgacgtgtatcaagatctccgtcgattatcgctcccaaatttcagattgtggcggctgaaaaatcggagcctctgaaaattatgatatcaggagctcctgcttctggtaaaggtacacaatgcgagctgattactcacaaatatggtttggtgcatatctctgctggagatttgctgagggctgaaatcgcttctggaagtgaaaatggaagacgtgctaaagaacatatggagaaaggacaattggtccctgatgaaatagttgtaatgatggtaaaagatcgtttatcacagacagattcagagcaaaaaggatggcttttggatggatatccaaggagtgcatcacaggcaacagctctcaagggatttggattccagcctgatctattcattgtcctcgaagttcctgaagaaattctaattgaaagagttgttgggcgtcgattggatcctgtcacaggaaagatctaccacttgaagtattcgcctccagagacagaagagattgctgttagactcacccaacgttttgatgataccgaagagaaggcaaaactgcggctgaagactcataaccaaaatgtgagtgatgtgctttctatgtacgacgatataacaattaagatcgagggaaaccgctcaaaagaggaagtgtttgcccagatcgattcttctctgtccgaattgcttcaagagaggaacactgctccaagttcacttttaagttgattcgttcttggtacaaacctgatgaagtgcttacccagatcgacactactatgtccaaattgcttcaacagaggaactctgcttcaagttcacttgtaagttgaatcattcttagcaaggacctaaccagcggtaaatatcctttcttgcatttatcacactcgattgatatctcttgtatcgcaataacgggttgttttgtcgccagtaagacaatgtacctcacacctcagaaatatgcagaccttcttcttatt

SEQ ID NO: 46482 - protein, 297 aa, Arabidopsis thaliana
  peptide (1)..(297): Ceres Seq. ID no. 12600795
  misc_feature (83)..(262): Pfam Name: Adenylate kinase Pfam Description: Adenylate kinase
  misc_feature (79)..(281): Homolog of NCBI NO: 24111857 NR Description: adenylate kinase [Shigella flexneri 2a str. 301]
  misc_feature (79)..(281): Homolog of NCBI NO: 16123283 NR Description: adenylate kinase [Yersinia pestis]
  misc_feature (79)..(282): Homolog of NCBI NO: 23467738 NR Description: hypothetical protein [Haemophilus somnus 129PT]
  misc_feature (131)..(286): Homolog of NCBI NO: 38175634 NR Description: putative Adenylate kinase, chloroplast
  misc_feature (78)..(291): Homolog of NCBI NO: 7687936 NR Description: possible adenylate kinase [Leishmania major]
  misc_feature (74)..(269): Homolog of NCBI NO: 37727511 NR Description: adenylate kinase [Trypanosoma cruzi]
  misc_feature (82)..(267): Homolog of NCBI NO: 10176815 NR Description: adenylate kinase-like [Arabidopsis thaliana]
  misc_feature (35)..(288): Homolog of NCBI NO: 22327339 NR Description: adenylate kinase -like protein
  misc_feature (76)..(294): Homolog of NCBI NO: 1170606 NR Description: ADENYLATE KINASE, CHLOROPLAST (ATP-AMP
  misc_feature (15)..(297): Homolog of NCBI NO: 15238822 NR Description: putative protein
TTTGSLTEREWERDMTGCVNSISPPPVTLYRHRASPSRSSFSLSGDALHSLYRHRRVSRSPSIIAPKFQIVAAEKSEPLKIMISGAPASGKGTQCELITHKYGLVHISAGDLLRAEIASGSENGRRAKEHMEKGQLVPDEIVVMMVKDRLSQTDSEQKGWLLDGYPRSASQATALKGFGFQPDLFIVLEVPEEILIERVVGRRLDPVTGKIYHLKYSPPETEEIAVRLTQRFDDTEEKAKLRLKTHNQNVSDVLSMYDDITIKIEGNRSKEEVFAQIDSSLSELLQERNTAPSSLLS

SEQ ID NO: 46483 - protein, 283 aa, Arabidopsis thaliana
  peptide (1)..(283): Ceres Seq. ID no. 12600796
  misc_feature (69)..(248): Pfam Name: Adenylate kinase Pfam Description: Adenylate kinase
  misc_feature (65)..(267): Homolog of NCBI NO: 24111857 NR Description: adenylate kinase [Shigella flexneri 2a str. 301]
  misc_feature (65)..(267): Homolog of NCBI NO: 16123283 NR Description: adenylate kinase [Yersinia pestis]
  misc_feature (65)..(268): Homolog of NCBI NO: 23467738 NR Description: hypothetical protein [Haemophilus somnus 129PT]
  misc_feature (117)..(272): Homolog of NCBI NO: 38175634 NR Description: putative Adenylate kinase, chloroplast
  misc_feature (64)..(277): Homolog of NCBI NO: 7687936 NR Description: possible adenylate kinase [Leishmania major]
  misc_feature (60)..(255): Homolog of NCBI NO: 37727511 NR Description: adenylate kinase [Trypanosoma cruzi]
  misc_feature (68)..(253): Homolog of NCBI NO: 10176815 NR Description: adenylate kinase-like [Arabidopsis thaliana]
  misc_feature (21)..(274): Homolog of NCBI NO: 22327339 NR Description: adenylate kinase -like protein
  misc_feature (62)..(280): Homolog of NCBI NO: 1170606 NR Description: ADENYLATE KINASE, CHLOROPLAST (ATP-AMP
  misc_feature (1)..(283): Homolog of NCBI NO: 15238822 NR Description: putative protein
MTGCVNSISPPPVTLYRHRASPSRSSFSLSGDALHSLYRHRRVSRSPSIIAPKFQIVAAEKSEPLKIMISGAPASGKGTQCELITHKYGLVHISAGDLLRAEIASGSENGRRAKEHMEKGQLVPDEIVVMMVKDRLSQTDSEQKGWLLDGYPRSASQATALKGFGFQPDLFIVLEVPEEILIERVVGRRLDPVTGKIYHLKYSPPETEEIAVRLTQRFDDTEEKAKLRLKTHNQNVSDVLSMYDDITIKIEGNRSKEEVFAQIDSSLSELLQERNTAPSSLLS

SEQ ID NO: 46484 - protein, 216 aa, Arabidopsis thaliana
  peptide (1)..(216): Ceres Seq. ID no. 12600797
  misc_feature (2)..(181): Pfam Name: Adenylate kinase Pfam Description: Adenylate kinase
  misc_feature (1)..(200): Homolog of NCBI NO: 24111857 NR Description: adenylate kinase [Shigella flexneri 2a str. 301]
  misc_feature (1)..(200): Homolog of NCBI NO: 16123283 NR Description: adenylate kinase [Yersinia pestis]
  misc_feature (1)..(201): Homolog of NCBI NO: 23467738 NR Description: hypothetical protein [Haemophilus somnus 129PT]
  misc_feature (50)..(205): Homolog of NCBI NO: 38175634 NR Description: putative Adenylate kinase, chloroplast
  misc_feature (1)..(210): Homolog of NCBI NO: 7687936 NR Description: possible adenylate kinase [Leishmania major]
  misc_feature (1)..(188): Homolog of NCBI NO: 37727511 NR Description: adenylate kinase [Trypanosoma cruzi]
  misc_feature (1)..(186): Homolog of NCBI NO: 10176815 NR Description: adenylate kinase-like [Arabidopsis thaliana]
  misc_feature (1)..(207): Homolog of NCBI NO: 22327339 NR Description: adenylate kinase -like protein
  misc_feature (1)..(213): Homolog of NCBI NO: 1170606 NR Description: ADENYLATE KINASE, CHLOROPLAST (ATP-AMP
  misc_feature (1)..(216): Homolog of NCBI NO: 15238822 NR Description: putative protein
MISGAPASGKGTQCELITHKYGLVHISAGDLLRAEIASGSENGRRAKEHMEKGQLVPDEIVVMMVKDRLSQTDSEQKGWLLDGYPRSASQATALKGFGFQPDLFIVLEVPEEILIERVVGRRLDPVTGKIYHLKYSPPETEEIAVRLTQRFDDTEEKAKLRLKTHNQNVSDVLSMYDDITIKIEGNRSKEEVFAQIDSSLSELLQERNTAPSSLLS

SEQ ID NO: 46485 - DNA, 2608 bp, Arabidopsis thaliana
  misc_feature (1)..(2608): Ceres Seq. ID no. 12576083
  misc_feature: MA Experiment ID: 20000171 Result: Down-regulated in Transcription
  misc_feature: MA Experiment 20000171 PARAMETER Experiment Name: At_42deg_Heat_P Parameter: Age (day) Value: 14
  misc_feature: MA Experiment 20000171 PARAMETER Experiment Name: At_42deg_Heat_P Parameter: Organism Value: A. thaliana
  misc_feature: MA Experiment 20000171 PARAMETER Experiment Name: At_42deg_Heat_P Parameter: Plant Line Value: WS
  misc_feature: MA Experiment 20000171 PARAMETER Experiment Name: At_42deg_Heat_P Parameter: Temperature (deg C) Value: 42 vs. 22
  misc_feature: MA Experiment 20000171 PARAMETER Experiment Name: At_42deg_Heat_P Parameter: Timepoint (hr) Value: 1
  misc_feature: MA Experiment 20000171 PARAMETER Experiment Name: At_42deg_Heat_P Parameter: Tissue Value: Aerial
  misc_feature: MA Experiment ID: 20000173 Result: Down-regulated in Transcription
  misc_feature: MA Experiment 20000173 PARAMETER Experiment Name: At_42deg_Heat_P Parameter: Age (day) Value: 14
  misc_feature: MA Experiment 20000173 PARAMETER Experiment Name: At_42deg_Heat_P Parameter: Organism Value: A. thaliana
  misc_feature: MA Experiment 20000173 PARAMETER Experiment Name: At_42deg_Heat_P Parameter: Plant Line Value: WS
  misc_feature: MA Experiment 20000173 PARAMETER Experiment Name: At_42deg_Heat_P Parameter: Temperature (deg C) Value: 42 vs. 22
  misc_feature: MA Experiment 20000173 PARAMETER Experiment Name: At_42deg_Heat_P Parameter: Timepoint (hr) Value: 6
  misc_feature: MA Experiment 20000173 PARAMETER Experiment Name: At_42deg_Heat_P Parameter: Tissue Value: Aerial
  misc_feature: MA Experiment ID: 20000182 Result: Down-regulated in Transcription
  misc_feature: MA Experiment 20000182 PARAMETER Experiment Name: At_2mM_SA_P Parameter: Age (day) Value: 14
  misc_feature: MA Experiment 20000182 PARAMETER Experiment Name: At_2mM_SA_P Parameter: Organism Value: A. thaliana
  misc_feature: MA Experiment 20000182 PARAMETER Experiment Name: At_2mM_SA_P Parameter: Plant Line Value: WS
  misc_feature: MA Experiment 20000182 PARAMETER Experiment Name: At_2mM_SA_P Parameter: Timepoint (hr) Value: 6
  misc_feature: MA Experiment 20000182 PARAMETER Experiment Name: At_2mM_SA_P Parameter: Tissue Value: Aerial
  misc_feature: MA Experiment 20000182 PARAMETER Experiment Name: At_2mM_SA_P Parameter: Treatment Value: 2mM SA vs. No Treatment
  misc_feature: MA Experiment ID: 20000184 Result: Down-regulated in Transcription
  misc_feature: MA Experiment 20000184 PARAMETER Experiment Name: At_Shoots__P Parameter: Age (day) Value: 7
  misc_feature: MA Experiment 20000184 PARAMETER Experiment Name: At_Shoots__P Parameter: Tissue Value: Shoots vs. Whole Plant
  misc_feature: MA Experiment ID: 20000185 Result: Down-regulated in Transcription
  misc_feature: MA Experiment 20000185 PARAMETER Experiment Name: At_Roots__P Parameter: Age (day) Value: 7 vs. 21
  misc_feature: MA Experiment 20000185 PARAMETER Experiment Name: At_Roots__P Parameter: Organism Value: A. thaliana
  misc_feature: MA Experiment 20000185 PARAMETER Experiment Name: At_Roots__P Parameter: Tissue Value: Roots vs. Whole Plant
  misc_feature: MA Experiment ID: 20000438 Result: Down-regulated in Transcription
  misc_feature: MA Experiment 20000438 PARAMETER Experiment Name: At_Shoots__P Parameter: Age (day) Value: 14
  misc_feature: MA Experiment 20000438 PARAMETER Experiment Name: At_Shoots__P Parameter: Tissue Value: Shoots vs. Whole Plant
  misc_feature: MA Experiment ID: 20000439 Result: Down-regulated in Transcription
  misc_feature: MA Experiment 20000439 PARAMETER Experiment Name: At_Roots__P Parameter: Age (day) Value: 14 vs. 21
  misc_feature: MA Experiment 20000439 PARAMETER Experiment Name: At_Roots__P Parameter: Organism Value: A. thaliana
  misc_feature: MA Experiment 20000439 PARAMETER Experiment Name: At_Roots__P Parameter: Tissue Value: Roots vs. Whole Plant
  misc_feature: MA Experiment ID: 20000451 Result: Down-regulated in Transcription
  misc_feature: MA Experiment 20000451 PARAMETER Experiment Name: At_CS6879_Shoots-Roots_P Parameter: Age (day) Value: 14
  misc_feature: MA Experiment 20000451 PARAMETER Experiment Name: At_CS6879_Shoots-Roots_P Parameter: Organism Value: A. thaliana
  misc_feature: MA Experiment 20000451 PARAMETER Experiment Name: At_CS6879_Shoots-Roots_P Parameter: Plant Line Value: CS6879 vs. WS
  misc_feature: MA Experiment 20000451 PARAMETER Experiment Name: At_CS6879_Shoots-Roots_P Parameter: Tissue Value: Roots
  misc_feature: MA Experiment ID: 20000495 Result: Up-regulated in Transcription
  misc_feature: MA Experiment 20000495 PARAMETER Experiment Name: At_Guard_Cells_P Parameter: Harvest Date Value: 8/2/2002
  misc_feature: MA Experiment 20000495 PARAMETER Experiment Name: At_Guard_Cells_P Parameter: Organism Value: A. thaliana
  misc_feature: MA Experiment 20000495 PARAMETER Experiment Name: At_Guard_Cells_P Parameter: Tissue Value: Guard Cells vs. Leaves
  misc_feature: MA Experiment ID: 20000794 Result: Up-regulated in Transcription
  misc_feature: MA Experiment 20000794 PARAMETER Experiment Name: At_Petals_P Parameter: Age (day) Value: 23-25 days
  misc_feature: MA Experiment 20000794 PARAMETER Experiment Name: At_Petals_P Parameter: Plant Line Value: WS
  misc_feature: MA Experiment 20000794 PARAMETER Experiment Name: At_Petals_P Parameter: Tissue Value: Petals vs. Whole plant
  misc_feature: MA Experiment ID: 20001248 Result: Up-regulated in Transcription
  misc_feature: MA Experiment 20001248 PARAMETER Experiment Name: At_Far-red-induction_P Parameter: Age (day) Value: 7
  misc_feature: MA Experiment 20001248 PARAMETER Experiment Name: At_Far-red-induction_P Parameter: Light Value: Far-red vs. White
  misc_feature: MA Experiment 20001248 PARAMETER Experiment Name: At_Far-red-induction_P Parameter: Organism Value: A. thaliana
  misc_feature: MA Experiment 20001248 PARAMETER Experiment Name: At_Far-red-induction_P Parameter: Plant Line Value: Columbia
  misc_feature: MA Experiment 20001248 PARAMETER Experiment Name: At_Far-red-induction_P Parameter: Timepoint (hr) Value: 4
  misc_feature: MA Experiment 20001248 PARAMETER Experiment Name: At_Far-red-induction_P Parameter: Tissue Value: Whole Plant
  misc_feature: MA Experiment ID: 20001450 Result: Up-regulated in Transcription
  misc_feature: MA Experiment 20001450 PARAMETER Experiment Name: At_Far-red-induction_P Parameter: Age (day) Value: 7
  misc_feature: MA Experiment 20001450 PARAMETER Experiment Name: At_Far-red-induction_P Parameter: Light Value: Far-red vs. White
  misc_feature: MA Experiment 20001450 PARAMETER Experiment Name: At_Far-red-induction_P Parameter: Organism Value: A. thaliana
  misc_feature: MA Experiment 20001450 PARAMETER Experiment Name: At_Far-red-induction_P Parameter: Plant Line Value: Columbia
  misc_feature: MA Experiment 20001450 PARAMETER Experiment Name: At_Far-red-induction_P Parameter: Timepoint (hr) Value: 8
  misc_feature: MA Experiment 20001450 PARAMETER Experiment Name: At_Far-red-induction_P Parameter: Tissue Value: Whole Plant
  misc_feature: MA Experiment ID: 20001451 Result: Up-regulated in Transcription
  misc_feature: MA Experiment 20001451 PARAMETER Experiment Name: At_Far-red-induction_P Parameter: Age (day) Value: 7
  misc_feature: MA Experiment 20001451 PARAMETER Experiment Name: At_Far-red-induction_P Parameter: Light Value: Far-red vs. White
  misc_feature: MA Experiment 20001451 PARAMETER Experiment Name: At_Far-red-induction_P Parameter: Organism Value: A. thaliana
  misc_feature: MA Experiment 20001451 PARAMETER Experiment Name: At_Far-red-induction_P Parameter: Plant Line Value: Columbia
  misc_feature: MA Experiment 20001451 PARAMETER Experiment Name: At_Far-red-induction_P Parameter: Timepoint (hr) Value: 24
  misc_feature: MA Experiment 20001451 PARAMETER Experiment Name: At_Far-red-induction_P Parameter: Tissue Value: Whole Plant
  misc_feature: MA Experiment ID: 20001557 Result: Down-regulated in Transcription
  misc_feature: MA Experiment 20001557 PARAMETER Experiment Name: At_Drought_Soil_Dry_P Parameter: Age (day) Value: 27
  misc_feature: MA Experiment 20001557 PARAMETER Experiment Name: At_Drought_Soil_Dry_P Parameter: Organism Value: A. thaliana
  misc_feature: MA Experiment 20001557 PARAMETER Experiment Name: At_Drought_Soil_Dry_P Parameter: Plant Line Value: WS
  misc_feature: MA Experiment 20001557 PARAMETER Experiment Name: At_Drought_Soil_Dry_P Parameter: Post Timepoint (hr) Value: 3
  misc_feature: MA Experiment 20001557 PARAMETER Experiment Name: At_Drought_Soil_Dry_P Parameter: Post-Treatment Value: Re-Water vs. No Drought
  misc_feature: MA Experiment 20001557 PARAMETER Experiment Name: At_Drought_Soil_Dry_P Parameter: Timepoint (day) Value: 13
  misc_feature: MA Experiment 20001557 PARAMETER Experiment Name: At_Drought_Soil_Dry_P Parameter: Treatment Value: Drought vs. No Drought
  misc_feature: MA Experiment ID: 20001558 Result: Down-regulated in Transcription
  misc_feature: MA Experiment 20001558 PARAMETER Experiment Name: At_Drought_Soil_Dry_P Parameter: Age (day) Value: 27
  misc_feature: MA Experiment 20001558 PARAMETER Experiment Name: At_Drought_Soil_Dry_P Parameter: Organism Value: A. thaliana
  misc_feature: MA Experiment 20001558 PARAMETER Experiment Name: At_Drought_Soil_Dry_P Parameter: Plant Line Value: WS
  misc_feature: MA Experiment 20001558 PARAMETER Experiment Name: At_Drought_Soil_Dry_P Parameter: Post Timepoint (hr) Value: 6
  misc_feature: MA Experiment 20001558 PARAMETER Experiment Name: At_Drought_Soil_Dry_P Parameter: Post-Treatment Value: Re-Water vs. No Drought
  misc_feature: MA Experiment 20001558 PARAMETER Experiment Name: At_Drought_Soil_Dry_P Parameter: Timepoint (day) Value: 13
  misc_feature: MA Experiment 20001558 PARAMETER Experiment Name: At_Drought_Soil_Dry_P Parameter: Treatment Value: Drought vs. No Drought
  misc_feature: MA Experiment ID: 20001757 Result: Up-regulated in Transcription
  misc_feature: MA Experiment 20001757 PARAMETER Experiment Name: At_50mM_NH4NO3_L-to-H_P Parameter: Timepoint (hr) Value: 6
  misc_feature: MA Experiment 20001757 PARAMETER Experiment Name: At_50mM_NH4NO3_L-to-H_P Parameter: Tissue Value: Leaf
  misc_feature: MA Experiment 20001757 PARAMETER Experiment Name: At_50mM_NH4NO3_L-to-H_P Parameter: Treatment Value: 50mM NH4NO3 vs 100mM Mannitol
  misc_feature: MA Experiment ID: 20001904 Result: Down-regulated in Transcription
  misc_feature: MA Experiment 20001904 PARAMETER Experiment Name: At_Drought_Reproduction_P Parameter: Age (day) Value: 37
  misc_feature: MA Experiment 20001904 PARAMETER Experiment Name: At_Drought_Reproduction_P Parameter: Organism Value: A. thaliana
  misc_feature: MA Experiment 20001904 PARAMETER Experiment Name: At_Drought_Reproduction_P Parameter: Plant Line Value: WS
  misc_feature: MA Experiment 20001904 PARAMETER Experiment Name: At_Drought_Reproduction_P Parameter: Timepoint (day) Value: 7
  misc_feature: MA Experiment 20001904 PARAMETER Experiment Name: At_Drought_Reproduction_P Parameter: Tissue Value: Rosettes
  misc_feature: MA Experiment 20001904 PARAMETER Experiment Name: At_Drought_Reproduction_P Parameter: Treatment Value: Drought vs. No Drought
  misc_feature: MA Experiment ID: 20001905 Result: Down-regulated in Transcription
  misc_feature: MA Experiment 20001905 PARAMETER Experiment Name: At_Drought_Reproduction_P Parameter: Age (day) Value: 40
  misc_feature: MA Experiment 20001905 PARAMETER Experiment Name: At_Drought_Reproduction_P Parameter: Organism Value: A. thaliana
  misc_feature: MA Experiment 20001905 PARAMETER Experiment Name: At_Drought_Reproduction_P Parameter: Plant Line Value: WS
  misc_feature: MA Experiment 20001905 PARAMETER Experiment Name: At_Drought_Reproduction_P Parameter: Timepoint (day) Value: 10
  misc_feature: MA Experiment 20001905 PARAMETER Experiment Name: At_Drought_Reproduction_P Parameter: Tissue Value: Rosettes
  misc_feature: MA Experiment 20001905 PARAMETER Experiment Name: At_Drought_Reproduction_P Parameter: Treatment Value: Drought vs. No Drought
  misc_feature: MA Experiment ID: 20001906 Result: Down-regulated in Transcription
  misc_feature: MA Experiment 20001906 PARAMETER Experiment Name: At_Drought_Reproduction_P Parameter: Age (day) Value: 35
  misc_feature: MA Experiment 20001906 PARAMETER Experiment Name: At_Drought_Reproduction_P Parameter: Organism Value: A. thaliana
  misc_feature: MA Experiment 20001906 PARAMETER Experiment Name: At_Drought_Reproduction_P Parameter: Plant Line Value: WS
  misc_feature: MA Experiment 20001906 PARAMETER Experiment Name: At_Drought_Reproduction_P Parameter: Timepoint (day) Value: 5
  misc_feature: MA Experiment 20001906 PARAMETER Experiment Name: At_Drought_Reproduction_P Parameter: Tissue Value: Siliques
  misc_feature: MA Experiment 20001906 PARAMETER Experiment Name: At_Drought_Reproduction_P Parameter: Treatment Value: Drought vs. No Drought
  misc_feature: MA Experiment ID: 20001911 Result: Down-regulated in Transcription
  misc_feature: MA Experiment 20001911 PARAMETER Experiment Name: At_Drought_Reproduction_P Parameter: Age (day) Value: 40
  misc_feature: MA Experiment 20001911 PARAMETER Experiment Name: At_Drought_Reproduction_P Parameter: Organism Value: A. thaliana
  misc_feature: MA Experiment 20001911 PARAMETER Experiment Name: At_Drought_Reproduction_P Parameter: Plant Line Value: WS
  misc_feature: MA Experiment 20001911 PARAMETER Experiment Name: At_Drought_Reproduction_P Parameter: Timepoint (day) Value: 10
  misc_feature: MA Experiment 20001911 PARAMETER Experiment Name: At_Drought_Reproduction_P Parameter: Tissue Value: Flowers
  misc_feature: MA Experiment 20001911 PARAMETER Experiment Name: At_Drought_Reproduction_P Parameter: Treatment Value: Drought vs. No Drought
ggagagtgatttggtcacactcaaacaagcacacaaaacaagaaagatatttggaagctctaaaaagataaatcttgtttttccctcctaattgtaaagaagagggctttagacttttagaacaacactcgagggaagtacgacgacgaagaagagctaacaacgataatgaatcgggttactactgaaagcattgcgtctacggcgatactggtggtgatggtgtttctcttctcgtggagatctatcgaggcggcgaatgtatcctacgaccaccgttctctcaccatcggcaatcgccgtcagctcattatctccgccgccattcactatcccagaagcgtccctgctatgtggccatctcttgttcaaacagcaaaagaaggaggctgcaacgcaatcgagtcttatgtcttctggaatggccatgagccatctcctggaaagtattattttggtggccggtataatatagtgaagtttatcaagattgttcaacaagctggaatgcatatgattctacgaattggtccttttgttgccgccgagtggaattacgggggagtcccggtttggctgcattacgtgccaggaacagtcttcagagcggataatgagccatggaagcattacatggagagtttcacgacgtatatagtaaacctgttgaaacaagagaagctttttgcacctcagggcggtccaataatcttgtctcaggtggaaaacgagtacgggtattatgaaaaggattacggagaaggagggaaaaggtatgctcaatggtctgcttctatggctgtttcacagaatattggtgttccatggatgatgtgccagcaatgggatgctcctcccactgtgattagtacctgcaatggcttttactgtgaccaattcacacctaatacaccagataaacccaagatttggactgagaactggcctggatggtttaaaacttttggaggcagagaccctcacagaccagcagaggatgtagcctactctgttgctcggtttttcgggaaaggtggaagtgttcacaactactacatgtatcacggaggaactaattttggacgtacttcaggaggaccttttatcactacaagctatgactatgaagctcccatcgatgagtatggattgcctagattaccaaaatggggacaccttaaggatctccacaaagctataatgctctctgaaaacttgctgataagtggcgagcatcaaaattttacattaggccattcactcgaggctgatgtgtacacagactcttcgggaacttgtgctgcgtttctgtcaaacttggatgataaaaatgacaaggcggtgatgtttcgaaacacatcataccacttgcctgcttggtcagttagcattctacctgactgcaagaccgaggttttcaacacagcaaaggtaacttcgaagtcctccaaggttgaaatgctacctgaagatttgaaatcttcatcaggtcttaaatgggaagtattctcggagaaaccgggtatttggggcgcagcagattttgtgaaaaatgaacttgttgaccacatcaacaccacaaaggacacaactgactatctttggtacacaacaagtataacagtcagtgaaaatgaagcgttcttgaagaaaggaagctccccggttctgtttattgaatcaaaagggcatactcttcatgttttcatcaacaaagagtacttaggaactgcgacagggaatgggactcatgtgcctttcaaactcaagaaaccagttgctctcaaagcgggcgaaaacaatattgatttgcttagcatgactgttggtctagcgaatgcaggatccttttacgaatgggttggagctggacttacaagcgtctcaatcaaaggtttcaacaagggcacattgaatttgacaaacagcaaatggtcctacaagctcggcgtggaaggagagcatctagaactgttcaagccaggtaactccggggctgtgaaatggacggtgactacgaaacctcccaagaaacagcctctgacttggtataaggttgtgatagagccaccttctgggagtgagccggttgggcttgatatgatcagtatggggaaaggaatggcatggttaaatggtgaagagataggaagatattggcccaggattgctagaaagaacagcccgaacgacgagtgcgtaaaagaatgcgattacagaggcaaattcatgccggataaatgcctaactggatgtggagagccatctcagagatggtatcatgttccaagatcatggtttaagtcttccgggaatgagctggtgatcttcgaggagaaaggcggcaatcccatgaagataaagttgtccaaaaggaaagtatcggtggtgtaagcaagtagaacaagttaaagatgatgatgcaaaacgtgagattgcaatcaagaaagacgagattttgtttgtgttgtatttgtttgttacaacaagtcggaactcgaaaaacgatgaaacaaaatccccaattttatgaacttaacacagtttttcatcatcacaagctgtaactgggccaccgaccactgatatttgttacagtttatgggct

SEQ ID NO: 46486 - protein, 741 aa, Arabidopsis thaliana
  peptide (1)..(741): Ceres Seq. ID no. 12576084
  misc_feature (30)..(93): Homolog of NCBI NO: 34907312 NR Description: putative beta-D-galactosidase
  misc_feature (627)..(741): Homolog of NCBI NO: 34907312 NR Description: putative beta-D-galactosidase
  misc_feature (94)..(297): Homolog of NCBI NO: 34907312 NR Description: putative beta-D-galactosidase
  misc_feature (359)..(596): Homolog of NCBI NO: 34907312 NR Description: putative beta-D-galactosidase
  misc_feature (1)..(737): Homolog of NCBI NO: 6686888 NR Description: putative beta-galactosidase [Arabidopsis thaliana]
  misc_feature (15)..(737): Homolog of NCBI NO: 25326167 NR Description: probable beta-galactosidase [imported] -
  misc_feature (1)..(737): Homolog of NCBI NO: 30683905 NR Description: glycosyl hydrolase family 35 (beta-galactosidase)
  misc_feature (9)..(741): Homolog of NCBI NO: 20260596 NR Description: galactosidase, putative [Arabidopsis thaliana]
  misc_feature (9)..(741): Homolog of NCBI NO: 15231354 NR Description: glycosyl hydrolase family 35 (beta-galactosidase)
  misc_feature (9)..(739): Homolog of NCBI NO: 7939621 NR Description: beta-galactosidase [Lycopersicon esculentum]
MNRVTTESIASTAILVVMVFLFSWRSIEAANVSYDHRSLTIGNRRQLIISAAIHYPRSVPAMWPSLVQTAKEGGCNAIESYVFWNGHEPSPGKYYFGGRYNIVKFIKIVQQAGMHMILRIGPFVAAEWNYGGVPVWLHYVPGTVFRADNEPWKHYMESFTTYIVNLLKQEKLFAPQGGPIILSQVENEYGYYEKDYGEGGKRYAQWSASMAVSQNIGVPWMMCQQWDAPPTVISTCNGFYCDQFTPNTPDKPKIWTENWPGWFKTFGGRDPHRPAEDVAYSVARFFGKGGSVHNYYMYHGGTNFGRTSGGPFITTSYDYEAPIDEYGLPRLPKWGHLKDLHKAIMLSENLLISGEHQNFTLGHSLEADVYTDSSGTCAAFLSNLDDKNDKAVMFRNTSYHLPAWSVSILPDCKTEVFNTAKVTSKSSKVEMLPEDLKSSSGLKWEVFSEKPGIWGAADFVKNELVDHINTTKDTTDYLWYTTSITVSENEAFLKKGSSPVLFIESKGHTLHVFINKEYLGTATGNGTHVPFKLKKPVALKAGENNIDLLSMTVGLANAGSFYEWVGAGLTSVSIKGFNKGTLNLTNSKWSYKLGVEGEHLELFKPGNSGAVKWTVTTKPPKKQPLTWYKVVIEPPSGSEPVGLDMISMGKGMAWLNGEEIGRYWPRIARKNSPNDECVKECDYRGKFMPDKCLTGCGEPSQRWYHVPRSWFKSSGNELVIFEEKGGNPMKIKLSKRKVSVV

SEQ ID NO: 46487 - protein, 724 aa, Arabidopsis thaliana
  peptide (1)..(724): Ceres Seq. ID no. 12576085
  misc_feature (13)..(76): Homolog of NCBI NO: 34907312 NR Description: putative beta-D-galactosidase
  misc_feature (610)..(724): Homolog of NCBI NO: 34907312 NR Description: putative beta-D-galactosidase
  misc_feature (77)..(280): Homolog of NCBI NO: 34907312 NR Description: putative beta-D-galactosidase
  misc_feature (342)..(579): Homolog of NCBI NO: 34907312 NR Description: putative beta-D-galactosidase
  misc_feature (1)..(720): Homolog of NCBI NO: 6686888 NR Description: putative beta-galactosidase [Arabidopsis thaliana]
  misc_feature (1)..(720): Homolog of NCBI NO: 25326167 NR Description: probable beta-galactosidase [imported] -
  misc_feature (1)..(720): Homolog of NCBI NO: 30683905 NR Description: glycosyl hydrolase family 35 (beta-galactosidase)
  misc_feature (1)..(724): Homolog of NCBI NO: 20260596 NR Description: galactosidase, putative [Arabidopsis thaliana]
  misc_feature (1)..(724): Homolog of NCBI NO: 15231354 NR Description: glycosyl hydrolase family 35 (beta-galactosidase)
  misc_feature (1)..(722): Homolog of NCBI NO: 7939621 NR Description: beta-galactosidase [Lycopersicon esculentum]
MVFLFSWRSIEAANVSYDHRSLTIGNRRQLIISAAIHYPRSVPAMWPSLVQTAKEGGCNAIESYVFWNGHEPSPGKYYFGGRYNIVKFIKIVQQAGMHMILRIGPFVAAEWNYGGVPVWLHYVPGTVFRADNEPWKHYMESFTTYIVNLLKQEKLFAPQGGPIILSQVENEYGYYEKDYGEGGKRYAQWSASMAVSQNIGVPWMMCQQWDAPPTVISTCNGFYCDQFTPNTPDKPKIWTENWPGWFKTFGGRDPHRPAEDVAYSVARFFGKGGSVHNYYMYHGGTNFGRTSGGPFITTSYDYEAPIDEYGLPRLPKWGHLKDLHKAIMLSENLLISGEHQNFTLGHSLEADVYTDSSGTCAAFLSNLDDKNDKAVMFRNTSYHLPAWSVSILPDCKTEVFNTAKVTSKSSKVEMLPEDLKSSSGLKWEVFSEKPGIWGAADFVKNELVDHINTTKDTTDYLWYTTSITVSENEAFLKKGSSPVLFIESKGHTLHVFINKEYLGTATGNGTHVPFKLKKPVALKAGENNIDLLSMTVGLANAGSFYEWVGAGLTSVSIKGFNKGTLNLTNSKWSYKLGVEGEHLELFKPGNSGAVKWTVTTKPPKKQPLTWYKVVIEPPSGSEPVGLDMISMGKGMAWLNGEEIGRYWPRIARKNSPNDECVKECDYRGKFMPDKCLTGCGEPSQRWYHVPRSWFKSSGNELVIFEEKGGNPMKIKLSKRKVSVV

SEQ ID NO: 46488 - protein, 680 aa, Arabidopsis thaliana
  peptide (1)..(680): Ceres Seq. ID no. 12576086
  misc_feature (1)..(32): Homolog of NCBI NO: 34907312 NR Description: putative beta-D-galactosidase
  misc_feature (566)..(680): Homolog of NCBI NO: 34907312 NR Description: putative beta-D-galactosidase
  misc_feature (33)..(236): Homolog of NCBI NO: 34907312 NR Description: putative beta-D-galactosidase
  misc_feature (298)..(535): Homolog of NCBI NO: 34907312 NR Description: putative beta-D-galactosidase
  misc_feature (1)..(676): Homolog of NCBI NO: 6686888 NR Description: putative beta-galactosidase [Arabidopsis thaliana]
  misc_feature (1)..(676): Homolog of NCBI NO: 25326167 NR Description: probable beta-galactosidase [imported] -
  misc_feature (1)..(676): Homolog of NCBI NO: 30683905 NR Description: glycosyl hydrolase family 35 (beta-galactosidase)
  misc_feature (1)..(680): Homolog of NCBI NO: 20260596 NR Description: galactosidase, putative [Arabidopsis thaliana]
  misc_feature (1)..(680): Homolog of NCBI NO: 15231354 NR Description: glycosyl hydrolase family 35 (beta-galactosidase)
  misc_feature (1)..(678): Homolog of NCBI NO: 7939621 NR Description: beta-galactosidase [Lycopersicon esculentum]
MWPSLVQTAKEGGCNAIESYVFWNGHEPSPGKYYFGGRYNIVKFIKIVQQAGMHMILRIGPFVAAEWNYGGVPVWLHYVPGTVFRADNEPWKHYMESFTTYIVNLLKQEKLFAPQGGPIILSQVENEYGYYEKDYGEGGKRYAQWSASMAVSQNIGVPWMMCQQWDAPPTVISTCNGFYCDQFTPNTPDKPKIWTENWPGWFKTFGGRDPHRPAEDVAYSVARFFGKGGSVHNYYMYHGGTNFGRTSGGPFITTSYDYEAPIDEYGLPRLPKWGHLKDLHKAIMLSENLLISGEHQNFTLGHSLEADVYTDSSGTCAAFLSNLDDKNDKAVMFRNTSYHLPAWSVSILPDCKTEVFNTAKVTSKSSKVEMLPEDLKSSSGLKWEVFSEKPGIWGAADFVKNELVDHINTTKDTTDYLWYTTSITVSENEAFLKKGSSPVLFIESKGHTLHVFINKEYLGTATGNGTHVPFKLKKPVALKAGENNIDLLSMTVGLANAGSFYEWVGAGLTSVSIKGFNKGTLNLTNSKWSYKLGVEGEHLELFKPGNSGAVKWTVTTKPPKKQPLTWYKVVIEPPSGSEPVGLDMISMGKGMAWLNGEEIGRYWPRIARKNSPNDECVKECDYRGKFMPDKCLTGCGEPSQRWYHVPRSWFKSSGNELVIFEEKGGNPMKIKLSKRKVSVV

SEQ ID NO: 46489 - DNA, 1480 bp, Arabidopsis thaliana; identical to SEQ ID NO: 45927
  misc_feature (1)..(1480): Ceres Seq. ID no. 13591502
  misc_feature: MA Experiment ID: 20000180 Result: Up-regulated in Transcription
  misc_feature: MA Experiment 20000180 PARAMETER Experiment Name: At_Germinating_Seeds_P Parameter: Age (hr) Value: 24 vs. 0
  misc_feature: MA Experiment 20000180 PARAMETER Experiment Name: At_Germinating_Seeds_P Parameter: Tissue Value: Germinating Seeds
  misc_feature: MA Experiment ID: 20000185 Result: Down-regulated in Transcription
  misc_feature: MA Experiment 20000185 PARAMETER Experiment Name: At_Roots__P Parameter: Age (day) Value: 7 vs. 21
  misc_feature: MA Experiment 20000185 PARAMETER Experiment Name: At_Roots__P Parameter: Organism Value: A. thaliana
  misc_feature: MA Experiment 20000185 PARAMETER Experiment Name: At_Roots__P Parameter: Tissue Value: Roots vs. Whole Plant
  misc_feature: MA Experiment ID: 20000227 Result: Down-regulated in Transcription
  misc_feature: MA Experiment 20000227 PARAMETER Experiment Name: At_Root-Tips-vs-Tops_P Parameter: Tissue Value: Root Tips vs. Root Tops
  misc_feature: MA Experiment ID: 20000437 Result: Down-regulated in Transcription
  misc_feature: MA Experiment 20000437 PARAMETER Experiment Name: At_Drought_P Parameter: Age (day) Value: 8
  misc_feature: MA Experiment 20000437 PARAMETER Experiment Name: At_Drought_P Parameter: Organism Value: A. thaliana
  misc_feature: MA Experiment 20000437 PARAMETER Experiment Name: At_Drought_P Parameter: Plant Line Value: WS
  misc_feature: MA Experiment 20000437 PARAMETER Experiment Name: At_Drought_P Parameter: Timepoint (hr) Value: 24
  misc_feature: MA Experiment 20000437 PARAMETER Experiment Name: At_Drought_P Parameter: Tissue Value: Whole Plant
  misc_feature: MA Experiment 20000437 PARAMETER Experiment Name: At_Drought_P Parameter: Treatment Value: Drought vs. No Drought
  misc_feature: MA Experiment ID: 20000439 Result: Down-regulated in Transcription
  misc_feature: MA Experiment 20000439 PARAMETER Experiment Name: At_Roots__P Parameter: Age (day) Value: 14 vs. 21
  misc_feature: MA Experiment 20000439 PARAMETER Experiment Name: At_Roots__P Parameter: Organism Value: A. thaliana
  misc_feature: MA Experiment 20000439 PARAMETER Experiment Name: At_Roots__P Parameter: Tissue Value: Roots vs. Whole Plant
  misc_feature: MA Experiment ID: 20000794 Result: Down-regulated in Transcription
  misc_feature: MA Experiment 20000794 PARAMETER Experiment Name: At_Petals_P Parameter: Age (day) Value: 23-25 days
  misc_feature: MA Experiment 20000794 PARAMETER Experiment Name: At_Petals_P Parameter: Plant Line Value: WS
  misc_feature: MA Experiment 20000794 PARAMETER Experiment Name: At_Petals_P Parameter: Tissue Value: Petals vs. Whole plant
  misc_feature: MA Experiment ID: 20001451 Result: Down-regulated in Transcription
  misc_feature: MA Experiment 20001451 PARAMETER Experiment Name: At_Far-red-induction_P Parameter: Age (day) Value: 7
  misc_feature: MA Experiment 20001451 PARAMETER Experiment Name: At_Far-red-induction_P Parameter: Light Value: Far-red vs. White
  misc_feature: MA Experiment 20001451 PARAMETER Experiment Name: At_Far-red-induction_P Parameter: Organism Value: A. thaliana
  misc_feature: MA Experiment 20001451 PARAMETER Experiment Name: At_Far-red-induction_P Parameter: Plant Line Value: Columbia
  misc_feature: MA Experiment 20001451 PARAMETER Experiment Name: At_Far-red-induction_P Parameter: Timepoint (hr) Value: 24
  misc_feature: MA Experiment 20001451 PARAMETER Experiment Name: At_Far-red-induction_P Parameter: Tissue Value: Whole Plant
  misc_feature: MA Experiment ID: 20001557 Result: Down-regulated in Transcription
  misc_feature: MA Experiment 20001557 PARAMETER Experiment Name: At_Drought_Soil_Dry_P Parameter: Age (day) Value: 27
  misc_feature: MA Experiment 20001557 PARAMETER Experiment Name: At_Drought_Soil_Dry_P Parameter: Organism Value: A. thaliana
  misc_feature: MA Experiment 20001557 PARAMETER Experiment Name: At_Drought_Soil_Dry_P Parameter: Plant Line Value: WS
  misc_feature: MA Experiment 20001557 PARAMETER Experiment Name: At_Drought_Soil_Dry_P Parameter: Post Timepoint (hr) Value: 3
  misc_feature: MA Experiment 20001557 PARAMETER Experiment Name: At_Drought_Soil_Dry_P Parameter: Post-Treatment Value: Re-Water vs. No Drought
  misc_feature: MA Experiment 20001557 PARAMETER Experiment Name: At_Drought_Soil_Dry_P Parameter: Timepoint (day) Value: 13
  misc_feature: MA Experiment 20001557 PARAMETER Experiment Name: At_Drought_Soil_Dry_P Parameter: Treatment Value: Drought vs. No Drought
  misc_feature: MA Experiment ID: 20001757 Result: Up-regulated in Transcription
  misc_feature: MA Experiment 20001757 PARAMETER Experiment Name: At_50mM_NH4NO3_L-to-H_P Parameter: Timepoint (hr) Value: 6
  misc_feature: MA Experiment 20001757 PARAMETER Experiment Name: At_50mM_NH4NO3_L-to-H_P Parameter: Tissue Value: Leaf
  misc_feature: MA Experiment 20001757 PARAMETER Experiment Name: At_50mM_NH4NO3_L-to-H_P Parameter: Treatment Value: 50mM NH4NO3 vs 100mM Mannitol
  misc_feature: MA Experiment ID: 20001904 Result: Down-regulated in Transcription
  misc_feature: MA Experiment 20001904 PARAMETER Experiment Name: At_Drought_Reproduction_P Parameter: Age (day) Value: 37
  misc_feature: MA Experiment 20001904 PARAMETER Experiment Name: At_Drought_Reproduction_P Parameter: Organism Value: A. thaliana
  misc_feature: MA Experiment 20001904 PARAMETER Experiment Name: At_Drought_Reproduction_P Parameter: Plant Line Value: WS
  misc_feature: MA Experiment 20001904 PARAMETER Experiment Name: At_Drought_Reproduction_P Parameter: Timepoint (day) Value: 7
  misc_feature: MA Experiment 20001904 PARAMETER Experiment Name: At_Drought_Reproduction_P Parameter: Tissue Value: Rosettes
  misc_feature: MA Experiment 20001904 PARAMETER Experiment Name: At_Drought_Reproduction_P Parameter: Treatment Value: Drought vs. No Drought
  misc_feature: MA Experiment ID: 20001906 Result: Down-regulated in Transcription
  misc_feature: MA Experiment 20001906 PARAMETER Experiment Name: At_Drought_Reproduction_P Parameter: Age (day) Value: 35
  misc_feature: MA Experiment 20001906 PARAMETER Experiment Name: At_Drought_Reproduction_P Parameter: Organism Value: A. thaliana
  misc_feature: MA Experiment 20001906 PARAMETER Experiment Name: At_Drought_Reproduction_P Parameter: Plant Line Value: WS
  misc_feature: MA Experiment 20001906 PARAMETER Experiment Name: At_Drought_Reproduction_P Parameter: Timepoint (day) Value: 5
  misc_feature: MA Experiment 20001906 PARAMETER Experiment Name: At_Drought_Reproduction_P Parameter: Tissue Value: Siliques
  misc_feature: MA Experiment 20001906 PARAMETER Experiment Name: At_Drought_Reproduction_P Parameter: Treatment Value: Drought vs. No Drought

SEQ ID NO: 46490 - protein, 396 aa, Arabidopsis thaliana; identical to SEQ ID NO: 45928
  peptide (1)..(396): Ceres Seq. ID no. 13591503
  misc_feature (214)..(374): Pfam Name: Glyceraldehyde 3-phosphate dehydrogenase, Pfam Description: Glyceraldehyde 3-phosphate dehydrogenase,
  misc_feature (214)..(374): Pfam Name: Glyceraldehyde 3-phosphate dehydrogenase, Pfam Description: Glyceraldehyde 3-phosphate dehydrogenase,
  misc_feature (214)..(374): Pfam Name: Glyceraldehyde 3-phosphate dehydrogenase, Pfam Description: Glyceraldehyde 3-phosphate dehydrogenase,
  misc_feature (1)..(396): Homolog of NCBI NO: 20455487 NR Description: Glyceraldehyde 3-phosphate dehydrogenase A, precursor (NADP-dependent glyceraldehydephosphate dehydrogenase
  misc_feature (10)..(396): Homolog of NCBI NO: 120661 NR Description: Glyceraldehyde 3-phosphate dehydrogenase A, precursor (NADP-dependent glyceraldehydephosphate dehydrogenase
  misc_feature (14)..(396): Homolog of NCBI NO: 22240 NR Description: GADPH (383 AA) [Zea mays]
  misc_feature (1)..(396): Homolog of NCBI NO: 120657 NR Description: Glyceraldehyde 3-phosphate dehydrogenase A, precursor (NADP-dependent glyceraldehydephosphate dehydrogenase
  misc_feature (1)..(396): Homolog of NCBI NO: 20729 NR Description: precursor (AA -68 to 337) [Pisum sativum]
  misc_feature (1)..(396): Homolog of NCBI NO: 20455487 NR Description: Glyceraldehyde 3-phosphate dehydrogenase A, precursor (NADP-dependent glyceraldehydephosphate dehydrogenase
  misc_feature (14)..(396): Homolog of NCBI NO: 22240 NR Description: GADPH (383 AA) [Zea mays]
  misc_feature (1)..(396): Homolog of NCBI NO: 20729 NR Description: precursor (AA -68 to 337) [Pisum sativum]
  misc_feature (1)..(396): Homolog of NCBI NO: 120657 NR Description: Glyceraldehyde 3-phosphate dehydrogenase A, precursor (NADP-dependent glyceraldehydephosphate dehydrogenase
  misc_feature (14)..(396): Homolog of NCBI NO: 22240 NR Description: GADPH (383 AA) [Zea mays]
  misc_feature (10)..(396): Homolog of NCBI NO: 120661 NR Description: Glyceraldehyde 3-phosphate dehydrogenase A, precursor (NADP-dependent glyceraldehydephosphate dehydrogenase
  misc_feature (1)..(396): Homolog of NCBI NO: 20455487 NR Description: Glyceraldehyde 3-phosphate dehydrogenase A, precursor (NADP-dependent glyceraldehydephosphate dehydrogenase
  misc_feature (1)..(396): Homolog of NCBI NO: 30688425 NR Description: glyceraldehyde 3-phosphate dehydrogenase A
  misc_feature (1)..(396): Homolog of NCBI NO: 2117520 NR Description: glyceraldehyde-3-phosphate dehydrogenase (NADP)
  misc_feature (1)..(396): Homolog of NCBI NO: 15222111 NR Description: calcium-binding protein, calreticulin -related
  misc_feature (47)..(396): Homolog of NCBI NO: 166702 NR Description: glyceraldehyde 3-phosphate dehydrogenase A
  misc_feature (1)..(396): Homolog of NCBI NO: 120658 NR Description: Glyceraldehyde 3-phosphate dehydrogenase A, precursor (NADP-dependent glyceraldehydephosphate dehydrogenase
  misc_feature (1)..(396): Homolog of NCBI NO: 30688425 NR Description: glyceraldehyde 3-phosphate dehydrogenase A
  misc_feature (1)..(396): Homolog of NCBI NO: 2117520 NR Description: glyceraldehyde-3-phosphate dehydrogenase (NADP)
  misc_feature (1)..(396): Homolog of NCBI NO: 15222111 NR Description: calcium-binding protein, calreticulin -related
  misc_feature (47)..(396): Homolog of NCBI NO: 166702 NR Description: glyceraldehyde 3-phosphate dehydrogenase A
  misc_feature (1)..(396): Homolog of NCBI NO: 120658 NR Description: Glyceraldehyde 3-phosphate dehydrogenase A, precursor (NADP-dependent glyceraldehydephosphate dehydrogenase
  misc_feature (1)..(396): Homolog of NCBI NO: 20729 NR Description: precursor (AA -68 to 337) [Pisum sativum]
  misc_feature (1)..(396): Homolog of NCBI NO: 120657 NR Description: Glyceraldehyde 3-phosphate dehydrogenase A, precursor (NADP-dependent glyceraldehydephosphate dehydrogenase
  misc_feature (10)..(396): Homolog of NCBI NO: 120661 NR Description: Glyceraldehyde 3-phosphate dehydrogenase A, precursor (NADP-dependent glyceraldehydephosphate dehydrogenase
  misc_feature (1)..(396): Homolog of NCBI NO: 120658 NR Description: Glyceraldehyde 3-phosphate dehydrogenase A, precursor (NADP-dependent glyceraldehydephosphate dehydrogenase
  misc_feature (47)..(396): Homolog of NCBI NO: 166702 NR Description: glyceraldehyde 3-phosphate dehydrogenase A
  misc_feature (1)..(396): Homolog of NCBI NO: 15222111 NR Description: calcium-binding protein, calreticulin -related
  misc_feature (1)..(396): Homolog of NCBI NO: 2117520 NR Description: glyceraldehyde-3-phosphate dehydrogenase (NADP)
  misc_feature (1)..(396): Homolog of NCBI NO: 30688425 NR Description: glyceraldehyde 3-phosphate dehydrogenase A

SEQ ID NO: 46491 - protein, 350 aa, Arabidopsis thaliana; identical to SEQ ID NO: 45929
  peptide (1)..(350): Ceres Seq. ID no. 13591504
  misc_feature (168)..(328): Pfam Name: Glyceraldehyde 3-phosphate dehydrogenase, Pfam Description: Glyceraldehyde 3-phosphate dehydrogenase,
  misc_feature (168)..(328): Pfam Name: Glyceraldehyde 3-phosphate dehydrogenase, Pfam Description: Glyceraldehyde 3-phosphate dehydrogenase,
  misc_feature (168)..(328): Pfam Name: Glyceraldehyde 3-phosphate dehydrogenase, Pfam Description: Glyceraldehyde 3-phosphate dehydrogenase,
  misc_feature (1)..(350): Homolog of NCBI NO: 20455487 NR Description: Glyceraldehyde 3-phosphate dehydrogenase A, precursor (NADP-dependent glyceraldehydephosphate dehydrogenase
  misc_feature (1)..(350): Homolog of NCBI NO: 120661 NR Description: Glyceraldehyde 3-phosphate dehydrogenase A, precursor (NADP-dependent glyceraldehydephosphate dehydrogenase
  misc_feature (1)..(350): Homolog of NCBI NO: 22240 NR Description: GADPH (383 AA) [Zea mays]
  misc_feature (1)..(350): Homolog of NCBI NO: 120657 NR Description: Glyceraldehyde 3-phosphate dehydrogenase A, precursor (NADP-dependent glyceraldehydephosphate dehydrogenase
  misc_feature (1)..(350): Homolog of NCBI NO: 20729 NR Description: precursor (AA -68 to 337) [Pisum sativum]
  misc_feature (1)..(350): Homolog of NCBI NO: 20455487 NR Description: Glyceraldehyde 3-phosphate dehydrogenase A, precursor (NADP-dependent glyceraldehydephosphate dehydrogenase
  misc_feature (1)..(350): Homolog of NCBI NO: 22240 NR Description: GADPH (383 AA) [Zea mays]
  misc_feature (1)..(350): Homolog of NCBI NO: 20729 NR Description: precursor (AA -68 to 337) [Pisum sativum]
  misc_feature (1)..(350): Homolog of NCBI NO: 120657 NR Description: Glyceraldehyde 3-phosphate dehydrogenase A, precursor (NADP-dependent glyceraldehydephosphate dehydrogenase
  misc_feature (1)..(350): Homolog of NCBI NO: 22240 NR Description: GADPH (383 AA) [Zea mays]
  misc_feature (1)..(350): Homolog of NCBI NO: 120661 NR Description: Glyceraldehyde 3-phosphate dehydrogenase A, precursor (NADP-dependent glyceraldehydephosphate dehydrogenase
  misc_feature (1)..(350): Homolog of NCBI NO: 20455487 NR Description: Glyceraldehyde 3-phosphate dehydrogenase A, precursor (NADP-dependent glyceraldehydephosphate dehydrogenase
  misc_feature (1)..(350): Homolog of NCBI NO: 30688425 NR Description: glyceraldehyde 3-phosphate dehydrogenase A
  misc_feature (1)..(350): Homolog of NCBI NO: 2117520 NR Description: glyceraldehyde-3-phosphate dehydrogenase (NADP)
  misc_feature (1)..(350): Homolog of NCBI NO: 15222111 NR Description: calcium-binding protein, calreticulin -related
  misc_feature (1)..(350): Homolog of NCBI NO: 166702 NR Description: glyceraldehyde 3-phosphate dehydrogenase A
  misc_feature (1)..(350): Homolog of NCBI NO: 120658 NR Description: Glyceraldehyde 3-phosphate dehydrogenase A, precursor (NADP-dependent glyceraldehydephosphate dehydrogenase
  misc_feature (1)..(350): Homolog of NCBI NO: 30688425 NR Description: glyceraldehyde 3-phosphate dehydrogenase A
  misc_feature (1)..(350): Homolog of NCBI NO: 2117520 NR Description: glyceraldehyde-3-phosphate dehydrogenase (NADP)
  misc_feature (1)..(350): Homolog of NCBI NO: 15222111 NR Description: calcium-binding protein, calreticulin -related
  misc_feature (1)..(350): Homolog of NCBI NO: 166702 NR Description: glyceraldehyde 3-phosphate dehydrogenase A
  misc_feature (1)..(350): Homolog of NCBI NO: 120658 NR Description: Glyceraldehyde 3-phosphate dehydrogenase A, precursor (NADP-dependent glyceraldehydephosphate dehydrogenase
  misc_feature (1)..(350): Homolog of NCBI NO: 20729 NR Description: precursor (AA -68 to 337) [Pisum sativum]
  misc_feature (1)..(350): Homolog of NCBI NO: 120657 NR Description: Glyceraldehyde 3-phosphate dehydrogenase A, precursor (NADP-dependent glyceraldehydephosphate dehydrogenase
  misc_feature (1)..(350): Homolog of NCBI NO: 120661 NR Description: Glyceraldehyde 3-phosphate dehydrogenase A, precursor (NADP-dependent glyceraldehydephosphate dehydrogenase
  misc_feature (1)..(350): Homolog of NCBI NO: 120658 NR Description: Glyceraldehyde 3-phosphate dehydrogenase A, precursor (NADP-dependent glyceraldehydephosphate dehydrogenase
  misc_feature (1)..(350): Homolog of NCBI NO: 166702 NR Description: glyceraldehyde 3-phosphate dehydrogenase A
  misc_feature (1)..(350): Homolog of NCBI NO: 15222111 NR Description: calcium-binding protein, calreticulin -related
  misc_feature (1)..(350): Homolog of NCBI NO: 2117520 NR Description: glyceraldehyde-3-phosphate dehydrogenase (NADP)
  misc_feature (1)..(350): Homolog of NCBI NO: 30688425 NR Description: glyceraldehyde 3-phosphate dehydrogenase A

SEQ ID NO: 46492 - DNA, 1010 bp, Arabidopsis thaliana
  misc_feature (1)..(1010): Ceres Seq. ID no. 15168836
  misc_feature: MA Experiment ID: 20000180 Result: Down-regulated in Transcription
  misc_feature: MA Experiment 20000180 PARAMETER Experiment Name: At_Germinating_Seeds_P Parameter: Age (hr) Value: 24 vs. 0
  misc_feature: MA Experiment 20000180 PARAMETER Experiment Name: At_Germinating_Seeds_P Parameter: Tissue Value: Germinating Seeds
  misc_feature: MA Experiment ID: 20000439 Result: Up-regulated in Transcription
  misc_feature: MA Experiment 20000439 PARAMETER Experiment Name: At_Roots__P Parameter: Age (day) Value: 14 vs. 21
  misc_feature: MA Experiment 20000439 PARAMETER Experiment Name: At_Roots__P Parameter: Organism Value: A. thaliana
  misc_feature: MA Experiment 20000439 PARAMETER Experiment Name: At_Roots__P Parameter: Tissue Value: Roots vs. Whole Plant
tccaaaacaaacctcggaagagaaaattggagcgaaggagcgatagatatggcgtcggcgtcctcgtctgacggagttgccggaaggattcagaacgcttctttggttcttgtctccgataacagttccacgcttgctgatatccgcaaagctgtggcaatgatgaagaacattgcagttcaattggagaaagaaaatcaaacggacaaggttaaggaccttgaaaattctgtggctgagttattggatttgcatagtgattgtaatcaccgttcgacagcaattcaatccgttgcaaatcggtaccaacccgtggaacaattaacggactttaaaaagttgcttgatgatgaattcacaaagctcaaggctacaccttcctcagtgccacaaaatgatcatttgatgcgccagttcagggaagcagtttggaatgttcatcatgcaggtgaaccaatgcctggtgacgatgatgaggacattgttatgaccagtactcagtgccctcttctaaacatgacatgtcccttgagcgggaagcctgtcactgaattagcagatccagttcgcagtatggattgcaggcacgtctatgaaaaatctgtaatcctgcattacatagtcaacaatcaaaatgcgaattgtcctgtagcagggtgccgaggtaaactgcagaatagcaaagtgatttgtgatgcaatgttgaagtttgaaatagaggagatgcgctcgttgaacaaacaatctaatagggctgaagtgattgaagacttcacagaagatgtggatgaagattagagatcagacatttcttggaccgggttttaagcgctgcaatgaaacaagttgaagccatatgtttcacaactttttgctattcttagtccgttcggtatattttatcaaacgtgaaatttgataccaattgtttccactttatggaggatgtaaatagtcgatctcttccgattctgaattcaactgctggtttttttgtcaagtttacgttc

SEQ ID NO: 46493 - protein, 265 aa, Arabidopsis thaliana
  peptide (1)..(265): Ceres Seq. ID no. 15168837
  misc_feature (46)..(245): Homolog of NCBI NO: 31198967 NR Description: ENSANGP00000017919 [Anopheles gambiae]
  misc_feature (17)..(265): Homolog of NCBI NO: 30683483 NR Description: expressed protein [Arabidopsis thaliana]
  misc_feature (1)..(265): Homolog of NCBI NO: 11994504 NR Description: emb|CAB09999.1~gene_id:F4B12.6~similar to unknown
SKTNLGRENWSEGAIDMASASSSDGVAGRIQNASLVLVSDNSSTLADIRKAVAMMKNIAVQLEKENQTDKVKDLENSVAELLDLHSDCNHRSTAIQSVANRYQPVEQLTDFKKLLDDEFTKLKATPSSVPQNDHLMRQFREAVWNVHHAGEPMPGDDDEDIVMTSTQCPLLNMTCPLSGKPVTELADPVRSMDCRHVYEKSVILHYIVNNQNANCPVAGCRGKLQNSKVICDAMLKFEIEEMRSLNKQSNRAEVIEDFTEDVDED

SEQ ID NO: 46494 - protein, 249 aa, Arabidopsis thaliana
  peptide (1)..(249): Ceres Seq. ID no. 15168838
  misc_feature (30)..(229): Homolog of NCBI NO: 31198967 NR Description: ENSANGP00000017919 [Anopheles gambiae]
  misc_feature (1)..(249): Homolog of NCBI NO: 30683483 NR Description: expressed protein [Arabidopsis thaliana]
  misc_feature (1)..(249): Homolog of NCBI NO: 11994504 NR Description: emb|CAB09999.1~gene_id:F4B12.6~similar to unknown
MASASSSDGVAGRIQNASLVLVSDNSSTLADIRKAVAMMKNIAVQLEKENQTDKVKDLENSVAELLDLHSDCNHRSTAIQSVANRYQPVEQLTDFKKLLDDEFTKLKATPSSVPQNDHLMRQFREAVWNVHHAGEPMPGDDDEDIVMTSTQCPLLNMTCPLSGKPVTELADPVRSMDCRHVYEKSVILHYIVNNQNANCPVAGCRGKLQNSKVICDAMLKFEIEEMRSLNKQSNRAEVIEDFTEDVDED

SEQ ID NO: 46495 - protein, 212 aa, Arabidopsis thaliana
  peptide (1)..(212): Ceres Seq. ID no. 15168839
  misc_feature (1)..(192): Homolog of NCBI NO: 31198967 NR Description: ENSANGP00000017919 [Anopheles gambiae]
  misc_feature (1)..(212): Homolog of NCBI NO: 30683483 NR Description: expressed protein [Arabidopsis thaliana]
  misc_feature (1)..(212): Homolog of NCBI NO: 11994504 NR Description: emb|CAB09999.1~gene_id:F4B12.6~similar to unknown
MMKNIAVQLEKENQTDKVKDLENSVAELLDLHSDCNHRSTAIQSVANRYQPVEQLTDFKKLLDDEFTKLKATPSSVPQNDHLMRQFREAVWNVHHAGEPMPGDDDEDIVMTSTQCPLLNMTCPLSGKPVTELADPVRSMDCRHVYEKSVILHYIVNNQNANCPVAGCRGKLQNSKVICDAMLKFEIEEMRSLNKQSNRAEVIEDFTEDVDED

SEQ ID NO: 46496 - DNA, 2087 bp, Arabidopsis thaliana
  misc_feature (1)..(2087): Ceres Seq. ID no. 12574967
  misc_feature: MA Experiment ID: 20000227 Result: Up-regulated in Transcription
  misc_feature: MA Experiment 20000227 PARAMETER Experiment Name: At_Root-Tips-vs-Tops_P Parameter: Tissue Value: Root Tips vs. Root Tops
  misc_feature: MA Experiment ID: 20001557 Result: Up-regulated in Transcription
  misc_feature: MA Experiment 20001557 PARAMETER Experiment Name: At_Drought_Soil_Dry_P Parameter: Age (day) Value: 27
  misc_feature: MA Experiment 20001557 PARAMETER Experiment Name: At_Drought_Soil_Dry_P Parameter: Organism Value: A. thaliana
  misc_feature: MA Experiment 20001557 PARAMETER Experiment Name: At_Drought_Soil_Dry_P Parameter: Plant Line Value: WS
  misc_feature: MA Experiment 20001557 PARAMETER Experiment Name: At_Drought_Soil_Dry_P Parameter: Post Timepoint (hr) Value: 3
  misc_feature: MA Experiment 20001557 PARAMETER Experiment Name: At_Drought_Soil_Dry_P Parameter: Post-Treatment Value: Re-Water vs. No Drought
  misc_feature: MA Experiment 20001557 PARAMETER Experiment Name: At_Drought_Soil_Dry_P Parameter: Timepoint (day) Value: 13
  misc_feature: MA Experiment 20001557 PARAMETER Experiment Name: At_Drought_Soil_Dry_P Parameter: Treatment Value: Drought vs. No Drought
acttctccacttttgttcgtcatcctcttcaaaatttcttcaatttgattctgcaatttccttaatctctctctggattaagtttcagtttcttcttagcccgccatggatgctcagcgagctctgttggacgaactaatgggcgcagctcgtaatctgacagacgaagagagaagagggttcaaggaggttaagtgggacgatagagaagtatgtgcattctatatggttcgattttgtcctcatgacctctttgttaacacgaaaagcgatcttggagcatgctcgagaattcatgatccaaagttgaaagaaagcttcgagaactctccgaggcatgattcctatgtgcctaaattcgaggctgagcttgcacagttttgcgagaagttggtgaatgatcttgataggaaagttaggcgtgggcgagaacgtcttgcacaagaagttgaaccggttccaccaccttctctatcagcagagaaagctgaacaattgtctgtcttggaggagaaagttaagaaccttttggaacaagtggaagcacttggtgaagaaggcaaagtggatgaagctgaagcgctaatgaggaaggtggaagggctaaatgctgagaagacagtgttgttacaacgaccaactgacaaggtactcgcgatggctcaggagaagaagatggcattgtgtgaggtttgtggttcatttcttgtggctaatgatgcagtagaaagaacacagtctcatgtcactggaaagcaacatgttggctatggcttggttcgggattttattgctgaacaaaaagctgctaaagataaaggaaaggaagaagaaagactagtaagaggaaaagaagcagatgataagaggaaaccaagggagaaggaaagcgagagtaagaggagtggttctagtgatagagaaagatatcgtgatcgagaccgaaacagagatggtgacagacacagagaccgtggtagagattatagaaagccttatgacaggagatcgaggagtgggagagaggaccgagatcgaagcaggtcacgatctcctcatggaaggtctggtcacagaagggtgtcgagaagccccattcgccaatactagtttgagaccctcgtggaaggtctggtcacgaaagggtgttgagaagcaccatttgccagtactagtttgagataaggtgttgtcactatgtcttggggccaggaactttgcaaattaatgagctattctaagagtttgagaccttaccgattctccttcatcggttatttgttaagaggtcaaaagcgttgaggtaggtattacccgtaaaacttttacattttcattgtatttctcgatacttgagatgctatagcgtcattttattttatttttgtcttttggtacaccatttcaagtttgatatacctttctgatttaaagaatacagaatcgggattgttgggatcgaatgacacgaatctatttgaggtaacaaatatacaacagaagtcatccttaatagaagttttgggttttgaatttggtttattttcttcgagttctctgtctgcacttaggtgtatacacagaaggaatgataatctttggctttggggttaggtataactgttgcatttcttggaatctagccttcaatggattggtctgcatgatatctgatttctatcgggtaaactcactccgttgtttatgaacttttaataatcttttccaaactccaaggctagagcattatagtaaaacagtaggtaaggtattctctggtgggagcaagaactgttttggtggtctgtgttgaggttccaagaacagctgtgttgttggtctaccacaaagccggatggcgtctttgtaatcctggcttaaatcctgatctaaacatttacaactttgtctttttttttttttttttttttgccgatttctcctctacagtctatttgattcaaacaagagctcagcatatgaaaccattgtttcggggctcctggtttgcagctatagataagcttcttttatatggcaaacttgtaagaatgacgcaacatttgtcaaaataaaagttgttgatg

SEQ ID NO: 46497 - protein, 334 aa, Arabidopsis thaliana
  peptide (1)..(334): Ceres Seq. ID no. 12574968
  misc_feature (1)..(257): Pfam Name: LUC7 N_terminus Pfam Description: LUC7 N_terminus
  misc_feature (188)..(305): Homolog of NCBI NO: 24640172 NR Description: CG3198-PA [Drosophila melanogaster]
  misc_feature (1)..(177): Homolog of NCBI NO: 24640172 NR Description: CG3198-PA [Drosophila melanogaster]
  misc_feature (7)..(329): Homolog of NCBI NO: 7023491 NR Description: unnamed protein product [Homo sapiens]
  misc_feature (7)..(329): Homolog of NCBI NO: 23956166 NR Description: RIKEN cDNA 3300001P08 [Mus musculus]
  misc_feature (7)..(329): Homolog of NCBI NO: 19923485 NR Description: cisplatin resistance-associated overexpressed
  misc_feature (179)..(334): Homolog of NCBI NO: 1699055 NR Description: putative aspartate-arginine-rich mRNA binding
  misc_feature (1)..(332): Homolog of NCBI NO: 28411928 NR Description: OSJNBa0027N13.9 [Oryza sativa (japonica
  misc_feature (97)..(334): Homolog of NCBI NO: 1699053 NR Description: putative aspartate-arginine-rich mRNA binding
  misc_feature (1)..(332): Homolog of NCBI NO: 30524685 NR Description: salt tolerance protein 3 [Beta vulgaris]
  misc_feature (1)..(334): Homolog of NCBI NO: 15242081 NR Description: arginine-aspartate-rich RNA binding protein-like
MDAQRALLDELMGAARNLTDEERRGFKEVKWDDREVCAFYMVRFCPHDLFVNTKSDLGACSRIHDPKLKESFENSPRHDSYVPKFEAELAQFCEKLVNDLDRKVRRGRERLAQEVEPVPPPSLSAEKAEQLSVLEEKVKNLLEQVEALGEEGKVDEAEALMRKVEGLNAEKTVLLQRPTDKVLAMAQEKKMALCEVCGSFLVANDAVERTQSHVTGKQHVGYGLVRDFIAEQKAAKDKGKEEERLVRGKEADDKRKPREKESESKRSGSSDRERYRDRDRNRDGDRHRDRGRDYRKPYDRRSRSGREDRDRSRSRSPHGRSGHRRVSRSPIRQY

SEQ ID NO: 46498 - protein, 323 aa, Arabidopsis thaliana
  peptide (1)..(323): Ceres Seq. ID no. 12574969
  misc_feature (1)..(246): Pfam Name: LUC7 N_terminus Pfam Description: LUC7 N_terminus
  misc_feature (177)..(294): Homolog of NCBI NO: 24640172 NR Description: CG3198-PA [Drosophila melanogaster]
  misc_feature (1)..(166): Homolog of NCBI NO: 24640172 NR Description: CG3198-PA [Drosophila melanogaster]
  misc_feature (1)..(318): Homolog of NCBI NO: 7023491 NR Description: unnamed protein product [Homo sapiens]
  misc_feature (1)..(318): Homolog of NCBI NO: 23956166 NR Description: RIKEN cDNA 3300001P08 [Mus musculus]
  misc_feature (1)..(318): Homolog of NCBI NO: 19923485 NR Description: cisplatin resistance-associated overexpressed
  misc_feature (168)..(323): Homolog of NCBI NO: 1699055 NR Description: putative aspartate-arginine-rich mRNA binding
  misc_feature (1)..(321): Homolog of NCBI NO: 28411928 NR Description: OSJNBa0027N13.9 [Oryza sativa (japonica
  misc_feature (86)..(323): Homolog of NCBI NO: 1699053 NR Description: putative aspartate-arginine-rich mRNA binding
  misc_feature (1)..(321): Homolog of NCBI NO: 30524685 NR Description: salt tolerance protein 3 [Beta vulgaris]
  misc_feature (1)..(323): Homolog of NCBI NO: 15242081 NR Description: arginine-aspartate-rich RNA binding protein-like
MGAARNLTDEERRGFKEVKWDDREVCAFYMVRFCPHDLFVNTKSDLGACSRIHDPKLKESFENSPRHDSYVPKFEAELAQFCEKLVNDLDRKVRRGRERLAQEVEPVPPPSLSAEKAEQLSVLEEKVKNLLEQVEALGEEGKVDEAEALMRKVEGLNAEKTVLLQRPTDKVLAMAQEKKMALCEVCGSFLVANDAVERTQSHVTGKQHVGYGLVRDFIAEQKAAKDKGKEEERLVRGKEADDKRKPREKESESKRSGSSDRERYRDRDRNRDGDRHRDRGRDYRKPYDRRSRSGREDRDRSRSRSPHGRSGHRRVSRSPIRQY

SEQ ID NO: 46499 - protein, 294 aa, Arabidopsis thaliana
  peptide (1)..(294): Ceres Seq. ID no. 12574970
  misc_feature (1)..(217): Pfam Name: LUC7 N_terminus Pfam Description: LUC7 N_terminus
  misc_feature (148)..(265): Homolog of NCBI NO: 24640172 NR Description: CG3198-PA [Drosophila melanogaster]
  misc_feature (1)..(137): Homolog of NCBI NO: 24640172 NR Description: CG3198-PA [Drosophila melanogaster]
  misc_feature (1)..(289): Homolog of NCBI NO: 7023491 NR Description: unnamed protein product [Homo sapiens]
  misc_feature (1)..(289): Homolog of NCBI NO: 23956166 NR Description: RIKEN cDNA 3300001P08 [Mus musculus]
  misc_feature (1)..(289): Homolog of NCBI NO: 19923485 NR Description: cisplatin resistance-associated overexpressed
  misc_feature (139)..(294): Homolog of NCBI NO: 1699055 NR Description: putative aspartate-arginine-rich mRNA binding
  misc_feature (1)..(292): Homolog of NCBI NO: 28411928 NR Description: OSJNBa0027N13.9 [Oryza sativa (japonica
  misc_feature (57)..(294): Homolog of NCBI NO: 1699053 NR Description: putative aspartate-arginine-rich mRNA binding
  misc_feature (1)..(292): Homolog of NCBI NO: 30524685 NR Description: salt tolerance protein 3 [Beta vulgaris]
  misc_feature (1)..(294): Homolog of NCBI NO: 15242081 NR Description: arginine-aspartate-rich RNA binding protein-like
MVRFCPHDLFVNTKSDLGACSRIHDPKLKESFENSPRHDSYVPKFEAELAQFCEKLVNDLDRKVRRGRERLAQEVEPVPPPSLSAEKAEQLSVLEEKVKNLLEQVEALGEEGKVDEAEALMRKVEGLNAEKTVLLQRPTDKVLAMAQEKKMALCEVCGSFLVANDAVERTQSHVTGKQHVGYGLVRDFIAEQKAAKDKGKEEERLVRGKEADDKRKPREKESESKRSGSSDRERYRDRDRNRDGDRHRDRGRDYRKPYDRRSRSGREDRDRSRSRSPHGRSGHRRVSRSPIRQY

SEQ ID NO: 46500 - DNA, 1380 bp, Arabidopsis thaliana
  misc_feature (1)..(1380): Ceres Seq. ID no. 12574971
  misc_feature: MA Experiment ID: 20000180 Result: Up-regulated in Transcription
  misc_feature: MA Experiment 20000180 PARAMETER Experiment Name: At_Germinating_Seeds_P Parameter: Age (hr) Value: 24 vs. 0
  misc_feature: MA Experiment 20000180 PARAMETER Experiment Name: At_Germinating_Seeds_P Parameter: Tissue Value: Germinating Seeds
  misc_feature: MA Experiment ID: 20000227 Result: Up-regulated in Transcription
  misc_feature: MA Experiment 20000227 PARAMETER Experiment Name: At_Root-Tips-vs-Tops_P Parameter: Tissue Value: Root Tips vs. Root Tops
  misc_feature: MA Experiment ID: 20000495 Result: Up-regulated in Transcription
  misc_feature: MA Experiment 20000495 PARAMETER Experiment Name: At_Guard_Cells_P Parameter: Harvest Date Value: 8/2/2002
  misc_feature: MA Experiment 20000495 PARAMETER Experiment Name: At_Guard_Cells_P Parameter: Organism Value: A. thaliana
  misc_feature: MA Experiment 20000495 PARAMETER Experiment Name: At_Guard_Cells_P Parameter: Tissue Value: Guard Cells vs. Leaves
  misc_feature: MA Experiment ID: 20001451 Result: Up-regulated in Transcription
  misc_feature: MA Experiment 20001451 PARAMETER Experiment Name: At_Far-red-induction_P Parameter: Age (day) Value: 7
  misc_feature: MA Experiment 20001451 PARAMETER Experiment Name: At_Far-red-induction_P Parameter: Light Value: Far-red vs. White
  misc_feature: MA Experiment 20001451 PARAMETER Experiment Name: At_Far-red-induction_P Parameter: Organism Value: A. thaliana
  misc_feature: MA Experiment 20001451 PARAMETER Experiment Name: At_Far-red-induction_P Parameter: Plant Line Value: Columbia
  misc_feature: MA Experiment 20001451 PARAMETER Experiment Name: At_Far-red-induction_P Parameter: Timepoint (hr) Value: 24
  misc_feature: MA Experiment 20001451 PARAMETER Experiment Name: At_Far-red-induction_P Parameter: Tissue Value: Whole Plant
  misc_feature: MA Experiment ID: 20001556 Result: Down-regulated in Transcription
  misc_feature: MA Experiment 20001556 PARAMETER Experiment Name: At_Drought_Soil_Dry_P Parameter: Age (day) Value: 26
  misc_feature: MA Experiment 20001556 PARAMETER Experiment Name: At_Drought_Soil_Dry_P Parameter: Organism Value: A. thaliana
  misc_feature: MA Experiment 20001556 PARAMETER Experiment Name: At_Drought_Soil_Dry_P Parameter: Plant Line Value: WS
  misc_feature: MA Experiment 20001556 PARAMETER Experiment Name: At_Drought_Soil_Dry_P Parameter: Post Timepoint (hr) Value: None
  misc_feature: MA Experiment 20001556 PARAMETER Experiment Name: At_Drought_Soil_Dry_P Parameter: Post-Treatment Value: None
  misc_feature: MA Experiment 20001556 PARAMETER Experiment Name: At_Drought_Soil_Dry_P Parameter: Timepoint (day) Value: 12
  misc_feature: MA Experiment 20001556 PARAMETER Experiment Name: At_Drought_Soil_Dry_P Parameter: Treatment Value: Drought vs. No Drought
  misc_feature: MA Experiment ID: 20001911 Result: Down-regulated in Transcription
  misc_feature: MA Experiment 20001911 PARAMETER Experiment Name: At_Drought_Reproduction_P Parameter: Age (day) Value: 40
  misc_feature: MA Experiment 20001911 PARAMETER Experiment Name: At_Drought_Reproduction_P Parameter: Organism Value: A. thaliana
  misc_feature: MA Experiment 20001911 PARAMETER Experiment Name: At_Drought_Reproduction_P Parameter: Plant Line Value: WS
  misc_feature: MA Experiment 20001911 PARAMETER Experiment Name: At_Drought_Reproduction_P Parameter: Timepoint (day) Value: 10
  misc_feature: MA Experiment 20001911 PARAMETER Experiment Name: At_Drought_Reproduction_P Parameter: Tissue Value: Flowers
  misc_feature: MA Experiment 20001911 PARAMETER Experiment Name: At_Drought_Reproduction_P Parameter: Treatment Value: Drought vs. No Drought
ggcgattatgcttttaatggctcctcctctcttctctatcccttaagcgctctctctcaaatctcaatcatccttcttctcatctagaaaccccttatcttggagtaatcagagagtttgaaaacaccagaaatcatggcgacaggaccagttgttcatcctcaaccagttagaggtgatcccatcgacctcaaaaacgcagcagcaaagaatcgtcgtgctcttggcgacattggaaacgtcgattctcttattggagtcgaaggaggaaagcttaaccgccccattactcgtaactttcgtgctcagttgctagaaaacgcacaagttgcagccgccgctaacaaaaaggctccgattcttgatggagttactaagaaacaagaagttgtaagagcggttcaaaagaaagcaagaggtgataagcgtgagccgtcaaaaccaatcgaagtgattgtgataagtcctgatacaaacgaggttgctaaagctaaagagaacaagaagaaagtgacatactcttcggttcttgatgctcgaagcaaggctgcttctaagactttggatattgattatgtcgacaaagaaaatgatcttgctgctgtggaatacgttgaggatatgtacattttctacaaagaagttgtgaatgagagcaaacctcagatgtatatgcatacacaacctgagattgatgagaagatgagatcaatccttattgattggcttgtagaagttcatgtcaagtttgatctctcccctgagactctttacctcactgtcaacataattgatcgttttctttctctgaagactgtgcctagaagagaactacagcttgtaggtgttagtgctttgcttatagcttcgaagtacgaagaaatctggcctcctcaggtcaatgatttggtatatgtgactgataactcctacaacagcagacagattctagtgatggagaaaaccattttggggaatcttgaatggtacttgacagttccaacacagtatgtgttccttgtgaggtttattaaagcctcgggttctgaccagaaactggagaacttggttcactttctagctgagttgggtttgatgcatcacgacagtttaatgttctgtccttccatgcttgctgcatcagcggtctacacagcaaggtgttgcttgaacaagactcctacttggactgatacactgaaattccacacaggctactccgaatctcagctcatggattgctcaaagcttttagctttcattcactcgaaagcgggggagagcaagctacgtggtgtgttgaagaagtattcgaaacttggaagaggtgctgttgctctgatttcaccagccaagtctcttatgtcatctgctccatga

SEQ ID NO: 46501 - protein, 414 aa, Arabidopsis thaliana
  peptide (1)..(414): Ceres Seq. ID no. 12574972
  misc_feature (162)..(287): Pfam Name: Cyclin, N-terminal domain Pfam Description: Cyclin, N-terminal domain
  misc_feature (59)..(409): Homolog of NCBI NO: 461725 NR Description: G2/mitotic-specific cyclin 1
  misc_feature (69)..(411): Homolog of NCBI NO: 7438502 NR Description: cyclin B1d-ll - yellow lupine
  misc_feature (57)..(411): Homolog of NCBI NO: 1835260 NR Description: mitotic cyclin [Sesbania rostrata]
  misc_feature (30)..(411): Homolog of NCBI NO: 7438506 NR Description: mitosis-specific cyclin B-type - Madagascar
  misc_feature (1)..(411): Homolog of NCBI NO: 15235573 NR Description: Cyclin B1
  misc_feature (1)..(411): Homolog of NCBI NO: 166684 NR Description: cyclin
  misc_feature (1)..(413): Homolog of NCBI NO: 2146728 NR Description: mitosis-specific cyclin 1b - Arabidopsis thaliana
  misc_feature (1)..(413): Homolog of NCBI NO: 15239938 NR Description: Cyclin B1
  misc_feature (1)..(414): Homolog of NCBI NO: 12322897 NR Description: putative cyclin; 69674-68010 [Arabidopsis
  misc_feature (1)..(414): Homolog of NCBI NO: 22330995 NR Description: Cyclin B1;3; protein id: At3g11520.1 [Arabidopsis
MATGPVVHPQPVRGDPIDLKNAAAKNRRALGDIGNVDSLIGVEGGKLNRPITRNFRAQLLENAQVAAAANKKAPILDGVTKKQEVVRAVQKKARGDKREPSKPIEVIVISPDTNEVAKAKENKKKVTYSSVLDARSKAASKTLDIDYVDKENDLAAVEYVEDMYIFYKEVVNESKPQMYMHTQPEIDEKMRSILIDWLVEVHVKFDLSPETLYLTVNIIDRFLSLKTVPRRELQLVGVSALLIASKYEEIWPPQVNDLVYVTDNSYNSRQILVMEKTILGNLEWYLTVPTQYVFLVRFIKASGSDQKLENLVHFLAELGLMHHDSLMFCPSMLAASAVYTARCCLNKTPTWTDTLKFHTGYSESQLMDCSKLLAFIHSKAGESKLRGVLKKYSKLGRGAVALISPAKSLMSSAP

SEQ ID NO: 46502 - protein, 252 aa, Arabidopsis thaliana
  peptide (1)..(252): Ceres Seq. ID no. 12574973
  misc_feature (1)..(125): Pfam Name: Cyclin, N-terminal domain Pfam Description: Cyclin, N-terminal domain
  misc_feature (1)..(247): Homolog of NCBI NO: 461725 NR Description: G2/mitotic-specific cyclin 1
  misc_feature (1)..(249): Homolog of NCBI NO: 7438502 NR Description: cyclin B1d-ll - yellow lupine
  misc_feature (1)..(249): Homolog of NCBI NO: 1835260 NR Description: mitotic cyclin [Sesbania rostrata]
  misc_feature (1)..(249): Homolog of NCBI NO: 7438506 NR Description: mitosis-specific cyclin B-type - Madagascar
  misc_feature (1)..(249): Homolog of NCBI NO: 15235573 NR Description: Cyclin B1
  misc_feature (1)..(249): Homolog of NCBI NO: 166684 NR Description: cyclin
  misc_feature (1)..(251): Homolog of NCBI NO: 2146728 NR Description: mitosis-specific cyclin 1b - Arabidopsis thaliana
  misc_feature (1)..(251): Homolog of NCBI NO: 15239938 NR Description: Cyclin B1
  misc_feature (1)..(252): Homolog of NCBI NO: 12322897 NR Description: putative cyclin; 69674-68010 [Arabidopsis
  misc_feature (1)..(252): Homolog of NCBI NO: 22330995 NR Description: Cyclin B1;3; protein id: At3g11520.1 [Arabidopsis
MYIFYKEVVNESKPQMYMHTQPEIDEKMRSILIDWLVEVHVKFDLSPETLYLTVNIIDRFLSLKTVPRRELQLVGVSALLIASKYEEIWPPQVNDLVYVTDNSYNSRQILVMEKTILGNLEWYLTVPTQYVFLVRFIKASGSDQKLENLVHFLAELGLMHHDSLMFCPSMLAASAVYTARCCLNKTPTWTDTLKFHTGYSESQLMDCSKLLAFIHSKAGESKLRGVLKKYSKLGRGAVALISPAKSLMSSAP

SEQ ID NO: 46503 - protein, 237 aa, Arabidopsis thaliana
  peptide (1)..(237): Ceres Seq. ID no. 12574974
  misc_feature (1)..(110): Pfam Name: Cyclin, N-terminal domain Pfam Description: Cyclin, N-terminal domain
  misc_feature (1)..(232): Homolog of NCBI NO: 461725 NR Description: G2/mitotic-specific cyclin 1
  misc_feature (1)..(234): Homolog of NCBI NO: 7438502 NR Description: cyclin B1d-ll - yellow lupine
  misc_feature (1)..(234): Homolog of NCBI NO: 1835260 NR Description: mitotic cyclin [Sesbania rostrata]
  misc_feature (1)..(234): Homolog of NCBI NO: 7438506 NR Description: mitosis-specific cyclin B-type - Madagascar
  misc_feature (1)..(234): Homolog of NCBI NO: 15235573 NR Description: Cyclin B1
  misc_feature (1)..(234): Homolog of NCBI NO: 166684 NR Description: cyclin
  misc_feature (1)..(236): Homolog of NCBI NO: 2146728 NR Description: mitosis-specific cyclin 1b - Arabidopsis thaliana
  misc_feature (1)..(236): Homolog of NCBI NO: 15239938 NR Description: Cyclin B1
  misc_feature (1)..(237): Homolog of NCBI NO: 12322897 NR Description: putative cyclin; 69674-68010 [Arabidopsis
  misc_feature (1)..(237): Homolog of NCBI NO: 22330995 NR Description: Cyclin B1;3; protein id: At3g11520.1 [Arabidopsis
MYMHTQPEIDEKMRSILIDWLVEVHVKFDLSPETLYLTVNIIDRFLSLKTVPRRELQLVGVSALLIASKYEEIWPPQVNDLVYVTDNSYNSRQILVMEKTILGNLEWYLTVPTQYVFLVRFIKASGSDQKLENLVHFLAELGLMHHDSLMFCPSMLAASAVYTARCCLNKTPTWTDTLKFHTGYSESQLMDCSKLLAFIHSKAGESKLRGVLKKYSKLGRGAVALISPAKSLMSSAP

SEQ ID NO: 46504 - DNA, 1698 bp, Arabidopsis thaliana
  misc_feature (1)..(1698): Ceres Seq. ID no. 12574979
  misc_feature: MA Experiment ID: 20000171 Result: Down-regulated in Transcription
  misc_feature: MA Experiment 20000171 PARAMETER Experiment Name: At_42deg_Heat_P Parameter: Age (day) Value: 14
  misc_feature: MA Experiment 20000171 PARAMETER Experiment Name: At_42deg_Heat_P Parameter: Organism Value: A. thaliana
  misc_feature: MA Experiment 20000171 PARAMETER Experiment Name: At_42deg_Heat_P Parameter: Plant Line Value: WS
  misc_feature: MA Experiment 20000171 PARAMETER Experiment Name: At_42deg_Heat_P Parameter: Temperature (deg C) Value: 42 vs. 22
  misc_feature: MA Experiment 20000171 PARAMETER Experiment Name: At_42deg_Heat_P Parameter: Timepoint (hr) Value: 1
  misc_feature: MA Experiment 20000171 PARAMETER Experiment Name: At_42deg_Heat_P Parameter: Tissue Value: Aerial
  misc_feature: MA Experiment ID: 20000180 Result: Up-regulated in Transcription
  misc_feature: MA Experiment 20000180 PARAMETER Experiment Name: At_Germinating_Seeds_P Parameter: Age (hr) Value: 24 vs. 0
  misc_feature: MA Experiment 20000180 PARAMETER Experiment Name: At_Germinating_Seeds_P Parameter: Tissue Value: Germinating Seeds
  misc_feature: MA Experiment ID: 20000184 Result: Up-regulated in Transcription
  misc_feature: MA Experiment 20000184 PARAMETER Experiment Name: At_Shoots__P Parameter: Age (day) Value: 7
  misc_feature: MA Experiment 20000184 PARAMETER Experiment Name: At_Shoots__P Parameter: Tissue Value: Shoots vs. Whole Plant
  misc_feature: MA Experiment ID: 20000185 Result: Down-regulated in Transcription
  misc_feature: MA Experiment 20000185 PARAMETER Experiment Name: At_Roots__P Parameter: Age (day) Value: 7 vs. 21
  misc_feature: MA Experiment 20000185 PARAMETER Experiment Name: At_Roots__P Parameter: Organism Value: A. thaliana
  misc_feature: MA Experiment 20000185 PARAMETER Experiment Name: At_Roots__P Parameter: Tissue Value: Roots vs. Whole Plant
  misc_feature: MA Experiment ID: 20000234 Result: Up-regulated in Transcription
  misc_feature: MA Experiment 20000234 PARAMETER Experiment Name: At_Siliques_P Parameter: Age (day) Value: 21
  misc_feature: MA Experiment 20000234 PARAMETER Experiment Name: At_Siliques_P Parameter: Organism Value: A. thaliana
  misc_feature: MA Experiment 20000234 PARAMETER Experiment Name: At_Siliques_P Parameter: Plant Line Value: WS
  misc_feature: MA Experiment 20000234 PARAMETER Experiment Name: At_Siliques_P Parameter: Tissue Value: Less Than 5mm Siliques vs. Whole Plant
  misc_feature: MA Experiment ID: 20000286 Result: Up-regulated in Transcription
  misc_feature: MA Experiment 20000286 PARAMETER Experiment Name: At_Open_Flower_P Parameter: Age (day) Value: 21
  misc_feature: MA Experiment 20000286 PARAMETER Experiment Name: At_Open_Flower_P Parameter: Plant Line Value: WS
  misc_feature: MA Experiment 20000286 PARAMETER Experiment Name: At_Open_Flower_P Parameter: Tissue Value: Half Open vs. Whole Plant
  misc_feature: MA Experiment ID: 20000438 Result: Up-regulated in Transcription
  misc_feature: MA Experiment 20000438 PARAMETER Experiment Name: At_Shoots__P Parameter: Age (day) Value: 14
  misc_feature: MA Experiment 20000438 PARAMETER Experiment Name: At_Shoots__P Parameter: Tissue Value: Shoots vs. Whole Plant
  misc_feature: MA Experiment ID: 20000794 Result: Up-regulated in Transcription
  misc_feature: MA Experiment 20000794 PARAMETER Experiment Name: At_Petals_P Parameter: Age (day) Value: 23-25 days
  misc_feature: MA Experiment 20000794 PARAMETER Experiment Name: At_Petals_P Parameter: Plant Line Value: WS
  misc_feature: MA Experiment 20000794 PARAMETER Experiment Name: At_Petals_P Parameter: Tissue Value: Petals vs. Whole plant
  misc_feature: MA Experiment ID: 20001247 Result: Down-regulated in Transcription
  misc_feature: MA Experiment 20001247 PARAMETER Experiment Name: At_Far-red-induction_P Parameter: Age (day) Value: 7
  misc_feature: MA Experiment 20001247 PARAMETER Experiment Name: At_Far-red-induction_P Parameter: Light Value: Far-red vs. White
  misc_feature: MA Experiment 20001247 PARAMETER Experiment Name: At_Far-red-induction_P Parameter: Organism Value: A. thaliana
  misc_feature: MA Experiment 20001247 PARAMETER Experiment Name: At_Far-red-induction_P Parameter: Plant Line Value: Columbia
  misc_feature: MA Experiment 20001247 PARAMETER Experiment Name: At_Far-red-induction_P Parameter: Timepoint (hr) Value: 1
  misc_feature: MA Experiment 20001247 PARAMETER Experiment Name: At_Far-red-induction_P Parameter: Tissue Value: Whole Plant
  misc_feature: MA Experiment ID: 20001248 Result: Down-regulated in Transcription
  misc_feature: MA Experiment 20001248 PARAMETER Experiment Name: At_Far-red-induction_P Parameter: Age (day) Value: 7
  misc_feature: MA Experiment 20001248 PARAMETER Experiment Name: At_Far-red-induction_P Parameter: Light Value: Far-red vs. White
  misc_feature: MA Experiment 20001248 PARAMETER Experiment Name: At_Far-red-induction_P Parameter: Organism Value: A. thaliana
  misc_feature: MA Experiment 20001248 PARAMETER Experiment Name: At_Far-red-induction_P Parameter: Plant Line Value: Columbia
  misc_feature: MA Experiment 20001248 PARAMETER Experiment Name: At_Far-red-induction_P Parameter: Timepoint (hr) Value: 4
  misc_feature: MA Experiment 20001248 PARAMETER Experiment Name: At_Far-red-induction_P Parameter: Tissue Value: Whole Plant
  misc_feature: MA Experiment ID: 20001450 Result: Down-regulated in Transcription
  misc_feature: MA Experiment 20001450 PARAMETER Experiment Name: At_Far-red-induction_P Parameter: Age (day) Value: 7
  misc_feature: MA Experiment 20001450 PARAMETER Experiment Name: At_Far-red-induction_P Parameter: Light Value: Far-red vs. White
  misc_feature: MA Experiment 20001450 PARAMETER Experiment Name: At_Far-red-induction_P Parameter: Organism Value: A. thaliana
  misc_feature: MA Experiment 20001450 PARAMETER Experiment Name: At_Far-red-induction_P Parameter: Plant Line Value: Columbia
  misc_feature: MA Experiment 20001450 PARAMETER Experiment Name: At_Far-red-induction_P Parameter: Timepoint (hr) Value: 8
  misc_feature: MA Experiment 20001450 PARAMETER Experiment Name: At_Far-red-induction_P Parameter: Tissue Value: Whole Plant
accgaaacatcttcaaccttcaataggagaaaccaattctcaattgctacaaaaatataaatattttgaaaaatgaaactggagctggtgttcataccatcacctggtgacggacatctccggccattagtggaggtagctaagcttcatgttgaccgtgacgaccatctctccatcaccatcatcatcatccctcagatgcatggatttagtagcagtaactcttcttcttacatcgcttctctctcctctgattctgaagaacgtcttagctacaacgttctctccgtccctgataaaccagactccgatgacaccaaaccacattttttcgactacattgataacttcaagccgcaggtcaaagccacggtggaaaaacttactgacccgggtccaccagattcgccgtcgcgtcttgctggattcgtggtggatatgttttgcatgatgatgattgatgtcgctaatgagtttggtgttcccagttacatgttttacacatccaacgcaacgtttcttggattgcaagttcatgttgaatacctttacgacgttaagaactatgacgttagtgacctcaaggactcggacactactgagctggaagttccttgtttgactcgtcctttaccggttaagtgtttcccctcggttctattaaccaaggagtggttaccggttatgtttagacaaaccagaagattccgagaaactaaaggtattttggtaaatacattcgctgagcttgagcctcaagctatgaagtttttctccggcgtagatagtcctctgcctacggtgtacacagttggaccggttatgaatcttaaaatcaacggtccaaattcatctgacgataagcaatcggagatcctacggtggctagacgagcagccacgtaaatccgttgttttcctctgtttcggaagcatgggaggtttccgtgagggccaagctaaagaaatcgcaatcgcgcttgagcgaagtggtcaccgctttgtctggtctcttcgtcgtgctcaaccaaaaggatcgataggacctcccgaagaatttacgaatcttgaggaaattctcccggaaggattcttggaacggacggcagagataggaaagattgtaggttgggctccacaaagcgccattctagcaaatcctgcgatcggagggttcgtgtcgcattgtggatggaactcgacgctagagagtctatggttcggagttccgatggctacgtggccgctttacgcagagcaacaagttaacgcgttcgagatggttgaggagctagggctagcggtggaggtccgaaatagtttccgaggagatttcatggcggcggatgatgagttgatgacggcagaggagatagagagagggatccggtgtttgatggagcaggatagtgacgtgaggagtagagtgaaggagatgagcgagaagagtcacgtagctttaatggacggtggatcttcgcacgttgctcttctaaagtttattcaagacgtcactaagaatatctcttgaatctaagatgatgaggctcgtctcagaagacgaagaaacatatatattagcacttataagaaaaagacatgttggcagagattcaagacatatatctcttgaaccagattagtaacttactgtattttttctttctttacttgcattgatattaaaattacattcact

SEQ ID NO: 46505 - protein, 485 aa, Arabidopsis thaliana
  peptide (1)..(485): Ceres Seq. ID no. 12574980
  misc_feature (23)..(484): Pfam Name: UDP-glucoronosyl and UDP-glucosyl transferase Pfam Description: UDP-glucoronosyl and UDP-glucosyl transferase
  misc_feature (23)..(484): Pfam Name: UDP-glucoronosyl and UDP-glucosyl transferase Pfam Description: UDP-glucoronosyl and UDP-glucosyl transferase
  misc_feature (1)..(480): Homolog of NCBI NO: 15222348 NR Description: UDP-glucose glucosyltransferase, putative
  misc_feature (55)..(485): Homolog of NCBI NO: 15233155 NR Description: putative UDP-glucose glucosyltransferase; protein
  misc_feature (1)..(466): Homolog of NCBI NO: 13605541 NR Description: AT3g21750/MSD21_6 [Arabidopsis thaliana]
  misc_feature (2)..(485): Homolog of NCBI NO: 15233158 NR Description: putative UDP-glucose glucosyltransferase; protein
  misc_feature (1)..(484): Homolog of NCBI NO: 15233149 NR Description: UDP-glycosyltransferase family; protein id:
  misc_feature (1)..(480): Homolog of NCBI NO: 15222348 NR Description: UDP-glucose glucosyltransferase, putative
  misc_feature (1)..(466): Homolog of NCBI NO: 13605541 NR Description: AT3g21750/MSD21_6 [Arabidopsis thaliana]
  misc_feature (1)..(484): Homolog of NCBI NO: 15233149 NR Description: UDP-glycosyltransferase family; protein id:
  misc_feature (1)..(485): Homolog of NCBI NO: 15233151 NR Description: putative UDP-glucose glucosyltransferase
  misc_feature (1)..(484): Homolog of NCBI NO: 15233761 NR Description: UTP-glucose glucosyltransferase; protein id:
  misc_feature (1)..(485): Homolog of NCBI NO: 11994645 NR Description: UTP-glucose glucosyltransferase [Arabidopsis
  misc_feature (1)..(484): Homolog of NCBI NO: 11994646 NR Description: UTP-glucose glucosyltransferase [Arabidopsis
  misc_feature (1)..(484): Homolog of NCBI NO: 15233157 NR Description: putative UDP-glucose glucosyltransferase; protein
  misc_feature (2)..(485): Homolog of NCBI NO: 15233158 NR Description: putative UDP-glucose glucosyltransferase; protein
  misc_feature (55)..(485): Homolog of NCBI NO: 15233155 NR Description: putative UDP-glucose glucosyltransferase; protein
  misc_feature (1)..(484): Homolog of NCBI NO: 15233157 NR Description: putative UDP-glucose glucosyltransferase; protein
  misc_feature (1)..(484): Homolog of NCBI NO: 11994646 NR Description: UTP-glucose glucosyltransferase [Arabidopsis
  misc_feature (1)..(485): Homolog of NCBI NO: 11994645 NR Description: UTP-glucose glucosyltransferase [Arabidopsis
  misc_feature (1)..(484): Homolog of NCBI NO: 15233761 NR Description: UTP-glucose glucosyltransferase; protein id:
  misc_feature (1)..(485): Homolog of NCBI NO: 15233151 NR Description: putative UDP-glucose glucosyltransferase
MKLELVFIPSPGDGHLRPLVEVAKLHVDRDDHLSITIIIIPQMHGFSSSNSSSYIASLSSDSEERLSYNVLSVPDKPDSDDTKPHFFDYIDNFKPQVKATVEKLTDPGPPDSPSRLAGFVVDMFCMMMIDVANEFGVPSYMFYTSNATFLGLQVHVEYLYDVKNYDVSDLKDSDTTELEVPCLTRPLPVKCFPSVLLTKEWLPVMFRQTRRFRETKGILVNTFAELEPQAMKFFSGVDSPLPTVYTVGPVMNLKINGPNSSDDKQSEILRWLDEQPRKSVVFLCFGSMGGFREGQAKEIAIALERSGHRFVWSLRRAQPKGSIGPPEEFTNLEEILPEGFLERTAEIGKIVGWAPQSAILANPAIGGFVSHCGWNSTLESLWFGVPMATWPLYAEQQVNAFEMVEELGLAVEVRNSFRGDFMAADDELMTAEEIERGIRCLMEQDSDVRSRVKEMSEKSHVALMDGGSSHVALLKFIQDVTKNIS

SEQ ID NO: 46506 - protein, 443 aa, Arabidopsis thaliana
  peptide (1)..(443): Ceres Seq. ID no. 12574981
  misc_feature (1)..(442): Pfam Name: UDP-glucoronosyl and UDP-glucosyl transferase Pfam Description: UDP-glucoronosyl and UDP-glucosyl transferase
  misc_feature (1)..(442): Pfam Name: UDP-glucoronosyl and UDP-glucosyl transferase Pfam Description: UDP-glucoronosyl and UDP-glucosyl transferase
  misc_feature (1)..(438): Homolog of NCBI NO: 15222348 NR Description: UDP-glucose glucosyltransferase, putative
  misc_feature (13)..(443): Homolog of NCBI NO: 15233155 NR Description: putative UDP-glucose glucosyltransferase; protein
  misc_feature (1)..(424): Homolog of NCBI NO: 13605541 NR Description: AT3g21750/MSD21_6 [Arabidopsis thaliana]
  misc_feature (1)..(443): Homolog of NCBI NO: 15233158 NR Description: putative UDP-glucose glucosyltransferase; protein
  misc_feature (1)..(442): Homolog of NCBI NO: 15233149 NR Description: UDP-glycosyltransferase family; protein id:
  misc_feature (1)..(438): Homolog of NCBI NO: 15222348 NR Description: UDP-glucose glucosyltransferase, putative
  misc_feature (1)..(424): Homolog of NCBI NO: 13605541 NR Description: AT3g21750/MSD21_6 [Arabidopsis thaliana]
  misc_feature (1)..(442): Homolog of NCBI NO: 15233149 NR Description: UDP-glycosyltransferase family; protein id:
  misc_feature (1)..(443): Homolog of NCBI NO: 15233151 NR Description: putative UDP-glucose glucosyltransferase
  misc_feature (1)..(442): Homolog of NCBI NO: 15233761 NR Description: UTP-glucose glucosyltransferase; protein id:
  misc_feature (1)..(443): Homolog of NCBI NO: 11994645 NR Description: UTP-glucose glucosyltransferase [Arabidopsis
  misc_feature (1)..(442): Homolog of NCBI NO: 11994646 NR Description: UTP-glucose glucosyltransferase [Arabidopsis
  misc_feature (1)..(442): Homolog of NCBI NO: 15233157 NR Description: putative UDP-glucose glucosyltransferase; protein
  misc_feature (1)..(443): Homolog of NCBI NO: 15233158 NR Description: putative UDP-glucose glucosyltransferase; protein
  misc_feature (13)..(443): Homolog of NCBI NO: 15233155 NR Description: putative UDP-glucose glucosyltransferase; protein
  misc_feature (1)..(442): Homolog of NCBI NO: 15233157 NR Description: putative UDP-glucose glucosyltransferase; protein
  misc_feature (1)..(442): Homolog of NCBI NO: 11994646 NR Description: UTP-glucose glucosyltransferase [Arabidopsis
  misc_feature (1)..(443): Homolog of NCBI NO: 11994645 NR Description: UTP-glucose glucosyltransferase [Arabidopsis
  misc_feature (1)..(442): Homolog of NCBI NO: 15233761 NR Description: UTP-glucose glucosyltransferase; protein id:
  misc_feature (1)..(443): Homolog of NCBI NO: 15233151 NR Description: putative UDP-glucose glucosyltransferase
MHGFSSSNSSSYIASLSSDSEERLSYNVLSVPDKPDSDDTKPHFFDYIDNFKPQVKATVEKLTDPGPPDSPSRLAGFVVDMFCMMMIDVANEFGVPSYMFYTSNATFLGLQVHVEYLYDVKNYDVSDLKDSDTTELEVPCLTRPLPVKCFPSVLLTKEWLPVMFRQTRRFRETKGILVNTFAELEPQAMKFFSGVDSPLPTVYTVGPVMNLKINGPNSSDDKQSEILRWLDEQPRKSVVFLCFGSMGGFREGQAKEIAIALERSGHRFVWSLRRAQPKGSIGPPEEFTNLEEILPEGFLERTAEIGKIVGWAPQSAILANPAIGGFVSHCGWNSTLESLWFGVPMATWPLYAEQQVNAFEMVEELGLAVEVRNSFRGDFMAADDELMTAEEIERGIRCLMEQDSDVRSRVKEMSEKSHVALMDGGSSHVALLKFIQDVTKNIS

SEQ ID NO: 46507 - protein, 363 aa, Arabidopsis thaliana
  peptide (1)..(363): Ceres Seq. ID no. 12574982
  misc_feature (1)..(362): Pfam Name: UDP-glucoronosyl and UDP-glucosyl transferase Pfam Description: UDP-glucoronosyl and UDP-glucosyl transferase
  misc_feature (1)..(362): Pfam Name: UDP-glucoronosyl and UDP-glucosyl transferase Pfam Description: UDP-glucoronosyl and UDP-glucosyl transferase
  misc_feature (1)..(358): Homolog of NCBI NO: 15222348 NR Description: UDP-glucose glucosyltransferase, putative
  misc_feature (1)..(363): Homolog of NCBI NO: 15233155 NR Description: putative UDP-glucose glucosyltransferase; protein
  misc_feature (1)..(344): Homolog of NCBI NO: 13605541 NR Description: AT3g21750/MSD21_6 [Arabidopsis thaliana]
  misc_feature (1)..(363): Homolog of NCBI NO: 15233158 NR Description: putative UDP-glucose glucosyltransferase; protein
  misc_feature (1)..(362): Homolog of NCBI NO: 15233149 NR Description: UDP-glycosyltransferase family; protein id:
  misc_feature (1)..(358): Homolog of NCBI NO: 15222348 NR Description: UDP-glucose glucosyltransferase, putative
  misc_feature (1)..(344): Homolog of NCBI NO: 13605541 NR Description: AT3g21750/MSD21_6 [Arabidopsis thaliana]
  misc_feature (1)..(362): Homolog of NCBI NO: 15233149 NR Description: UDP-glycosyltransferase family; protein id:
  misc_feature (1)..(363): Homolog of NCBI NO: 15233151 NR Description: putative UDP-glucose glucosyltransferase
  misc_feature (1)..(362): Homolog of NCBI NO: 15233761 NR Description: UTP-glucose glucosyltransferase; protein id:
  misc_feature (1)..(363): Homolog of NCBI NO: 11994645 NR Description: UTP-glucose glucosyltransferase [Arabidopsis
  misc_feature (1)..(362): Homolog of NCBI NO: 11994646 NR Description: UTP-glucose glucosyltransferase [Arabidopsis
  misc_feature (1)..(362): Homolog of NCBI NO: 15233157 NR Description: putative UDP-glucose glucosyltransferase; protein
  misc_feature (1)..(363): Homolog of NCBI NO: 15233158 NR Description: putative UDP-glucose glucosyltransferase; protein
  misc_feature (1)..(363): Homolog of NCBI NO: 15233155 NR Description: putative UDP-glucose glucosyltransferase; protein
  misc_feature (1)..(362): Homolog of NCBI NO: 15233157 NR Description: putative UDP-glucose glucosyltransferase; protein
  misc_feature (1)..(362): Homolog of NCBI NO: 11994646 NR Description: UTP-glucose glucosyltransferase [Arabidopsis
  misc_feature (1)..(363): Homolog of NCBI NO: 11994645 NR Description: UTP-glucose glucosyltransferase [Arabidopsis
  misc_feature (1)..(362): Homolog of NCBI NO: 15233761 NR Description: UTP-glucose glucosyltransferase; protein id:
  misc_feature (1)..(363): Homolog of NCBI NO: 15233151 NR Description: putative UDP-glucose glucosyltransferase
MFCMMMIDVANEFGVPSYMFYTSNATFLGLQVHVEYLYDVKNYDVSDLKDSDTTELEVPCLTRPLPVKCFPSVLLTKEWLPVMFRQTRRFRETKGILVNTFAELEPQAMKFFSGVDSPLPTVYTVGPVMNLKINGPNSSDDKQSEILRWLDEQPRKSVVFLCFGSMGGFREGQAKEIAIALERSGHRFVWSLRRAQPKGSIGPPEEFTNLEEILPEGFLERTAEIGKIVGWAPQSAILANPAIGGFVSHCGWNSTLESLWFGVPMATWPLYAEQQVNAFEMVEELGLAVEVRNSFRGDFMAADDELMTAEEIERGIRCLMEQDSDVRSRVKEMSEKSHVALMDGGSSHVALLKFIQDVTKNIS

SEQ ID NO: 46508 - DNA, 948 bp, Arabidopsis thaliana
  misc_feature (1)..(948): Ceres Seq. ID no. 14310073
  misc_feature: MA Experiment ID: 20001905 Result: Down-regulated in Transcription
  misc_feature: MA Experiment 20001905 PARAMETER Experiment Name: At_Drought_Reproduction_P Parameter: Age (day) Value: 40
  misc_feature: MA Experiment 20001905 PARAMETER Experiment Name: At_Drought_Reproduction_P Parameter: Organism Value: A. thaliana
  misc_feature: MA Experiment 20001905 PARAMETER Experiment Name: At_Drought_Reproduction_P Parameter: Plant Line Value: WS
  misc_feature: MA Experiment 20001905 PARAMETER Experiment Name: At_Drought_Reproduction_P Parameter: Timepoint (day) Value: 10
  misc_feature: MA Experiment 20001905 PARAMETER Experiment Name: At_Drought_Reproduction_P Parameter: Tissue Value: Rosettes
  misc_feature: MA Experiment 20001905 PARAMETER Experiment Name: At_Drought_Reproduction_P Parameter: Treatment Value: Drought vs. No Drought
gttccttctcttcttcgatcagacgattcaatcgcttctcactcaaaccacttcgctccttcgcatccatgtcttcttcttcccccgacgctgctcagactcctctaaccaccgctccttatggctcctggaaatctccaatactggacaagtcgaggttgggcatttgttgatgtcaattatggtggaagcacaggttatggtcgagagtatcgagagcggttgttaaggcagtggggaatagtcgacgttgatgactgttgtggctgtgctaaatacttggtatcttctggcaaggcagatgttaagcggctctgtatatctggcggttctgcaggaggttacacaactcttgcatcattggcgttcagggatgttttcaaagctggagcgtccttatacggagtggctgatttaaaaatgttgaaagaagaaggtcataaatttgaatcccgttatatcgacaatcttgttggagatgaaaaagatttctatgagagatcaccaatcaatttcgtcgataagttctcttgtcccatcatccttttccaaggactagaagacaaggttgtaactccagatcaatcacgtaaaatctatgaagcattaaagaaaaaaggtctgcctgttgctcttgtcgagtacgaaggagaacaacacggttttcgcaaggcggaaaacatcaaatacacacttgagcaacagatggtgttctttgcccgagtggttggagggttcaaagttgctgatgacatcactcctttgaaaattgacaacttcgacacttagaaaacgatgcttaaatagatatgtttggaaaagatttgctttttttttattatttagagaaaatacaggcttggactaacgttttcggataatttgttcatcaaaagtccaaaaccttctatattcactagaatgggaatacctaggaggtggctcggc

SEQ ID NO: 46509 - protein, 222 aa, Arabidopsis thaliana
  peptide (1)..(222): Ceres Seq. ID no. 14310074
  misc_feature (12)..(76): Pfam Name: Prolyl oligopeptidase family Pfam Description: Prolyl oligopeptidase family
  misc_feature (5)..(201): Homolog of NCBI NO: 33863869 NR Description: Dienelactone hydrolase [Prochlorococcus marinus
  misc_feature (8)..(218): Homolog of NCBI NO: 23019244 NR Description: hypothetical protein [Thermobifida fusca]
  misc_feature (6)..(199): Homolog of NCBI NO: 23029170 NR Description: hypothetical protein [Microbulbifer degradans
  misc_feature (1)..(199): Homolog of NCBI NO: 33864859 NR Description: putative peptidase [Synechococcus sp. WH 8102]
  misc_feature (7)..(214): Homolog of NCBI NO: 29654820 NR Description: prolyl oligopeptidase family protein [Coxiella
  misc_feature (1)..(204): Homolog of NCBI NO: 22972830 NR Description: hypothetical protein [Chloroflexus aurantiacus]
  misc_feature (6)..(219): Homolog of NCBI NO: 37521039 NR Description: probable peptidase [Gloeobacter violaceus]
  misc_feature (1)..(204): Homolog of NCBI NO: 16331709 NR Description: hypothetical protein [Synechocystis sp. PCC 6803]
  misc_feature (1)..(219): Homolog of NCBI NO: 23043087 NR Description: hypothetical protein [Trichodesmium erythraeum
  misc_feature (1)..(222): Homolog of NCBI NO: 15239342 NR Description: acyl-peptide hydrolase-related [Arabidopsis
MAPGNLQYWTSRGWAFVDVNYGGSTGYGREYRERLLRQWGIVDVDDCCGCAKYLVSSGKADVKRLCISGGSAGGYTTLASLAFRDVFKAGASLYGVADLKMLKEEGHKFESRYIDNLVGDEKDFYERSPINFVDKFSCPIILFQGLEDKVVTPDQSRKIYEALKKKGLPVALVEYEGEQHGFRKAENIKYTLEQQMVFFARVVGGFKVADDITPLKIDNFDT

SEQ ID NO: 46510 - protein, 122 aa, Arabidopsis thaliana
  peptide (1)..(122): Ceres Seq. ID no. 14310075
  misc_feature (28)..(93): Pfam Name: Dienelactone hydrolase family Pfam Description: Dienelactone hydrolase family
  misc_feature (1)..(101): Homolog of NCBI NO: 33863869 NR Description: Dienelactone hydrolase [Prochlorococcus marinus
  misc_feature (1)..(118): Homolog of NCBI NO: 23019244 NR Description: hypothetical protein [Thermobifida fusca]
  misc_feature (1)..(99): Homolog of NCBI NO: 23029170 NR Description: hypothetical protein [Microbulbifer degradans
  misc_feature (1)..(99): Homolog of NCBI NO: 33864859 NR Description: putative peptidase [Synechococcus sp. WH 8102]
  misc_feature (1)..(114): Homolog of NCBI NO: 29654820 NR Description: prolyl oligopeptidase family protein [Coxiella
  misc_feature (1)..(104): Homolog of NCBI NO: 22972830 NR Description: hypothetical protein [Chloroflexus aurantiacus]
  misc_feature (1)..(119): Homolog of NCBI NO: 37521039 NR Description: probable peptidase [Gloeobacter violaceus]
  misc_feature (1)..(104): Homolog of NCBI NO: 16331709 NR Description: hypothetical protein [Synechocystis sp. PCC 6803]
  misc_feature (1)..(119): Homolog of NCBI NO: 23043087 NR Description: hypothetical protein [Trichodesmium erythraeum
  misc_feature (1)..(122): Homolog of NCBI NO: 15239342 NR Description: acyl-peptide hydrolase-related [Arabidopsis
MLKEEGHKFESRYIDNLVGDEKDFYERSPINFVDKFSCPIILFQGLEDKVVTPDQSRKIYEALKKKGLPVALVEYEGEQHGFRKAENIKYTLEQQMVFFARVVGGFKVADDITPLKIDNFDT

SEQ ID NO: 46511 - DNA, 2390 bp, Arabidopsis thaliana
  misc_feature (1)..(2390): Ceres Seq. ID no. 14315727
  misc_feature: MA Experiment ID: 20000173 Result: Down-regulated in Transcription
  misc_feature: MA Experiment 20000173 PARAMETER Experiment Name: At_42deg_Heat_P Parameter: Age (day) Value: 14
  misc_feature: MA Experiment 20000173 PARAMETER Experiment Name: At_42deg_Heat_P Parameter: Organism Value: A. thaliana
  misc_feature: MA Experiment 20000173 PARAMETER Experiment Name: At_42deg_Heat_P Parameter: Plant Line Value: WS
  misc_feature: MA Experiment 20000173 PARAMETER Experiment Name: At_42deg_Heat_P Parameter: Temperature (deg C) Value: 42 vs. 22
  misc_feature: MA Experiment 20000173 PARAMETER Experiment Name: At_42deg_Heat_P Parameter: Timepoint (hr) Value: 6
  misc_feature: MA Experiment 20000173 PARAMETER Experiment Name: At_42deg_Heat_P Parameter: Tissue Value: Aerial
  misc_feature: MA Experiment ID: 20001905 Result: Down-regulated in Transcription
  misc_feature: MA Experiment 20001905 PARAMETER Experiment Name: At_Drought_Reproduction_P Parameter: Age (day) Value: 40
  misc_feature: MA Experiment 20001905 PARAMETER Experiment Name: At_Drought_Reproduction_P Parameter: Organism Value: A. thaliana
  misc_feature: MA Experiment 20001905 PARAMETER Experiment Name: At_Drought_Reproduction_P Parameter: Plant Line Value: WS
  misc_feature: MA Experiment 20001905 PARAMETER Experiment Name: At_Drought_Reproduction_P Parameter: Timepoint (day) Value: 10
  misc_feature: MA Experiment 20001905 PARAMETER Experiment Name: At_Drought_Reproduction_P Parameter: Tissue Value: Rosettes
  misc_feature: MA Experiment 20001905 PARAMETER Experiment Name: At_Drought_Reproduction_P Parameter: Treatment Value: Drought vs. No Drought
aaaaaaattgattctgtaatttcagcgagtcgtctcgtctagctctcacttttgttcgtctcttctgcgtcaaacatttccaccattttcgtttcttaaacctttcttcagctcttctcttcgtcaatctgcgatagtggaattgaagtctcttcggtgagtttctttactaatggagaccgccgcttcgagcgtagctacaactcgtggcggttcccttcagaatccgtcgccgacggctccgtcaagaaaagagtggcgcgccgtttcggattcacaagacaccacagattatgtggatttggaacagttaaagctgaacaggacagatgagagaacgatttatgagaatggaagagaacaggatggttattcaaatagtgagatgttgcagcaacagattcttaatgtttctagaaagaaaggagaattacagcagttggagattgagcttcgagctcagatgattgcgagacatgagatcatggagatccagagcaactatgaatctcaattcacagagtatgctaatgctgctgctagaatgcaggagcaacttcatgagaatgagagatctattcgggaggcagagaggaagttagaagagaaagacagagagctacatgcgattaaactagataatgaagcggcttgggccaaagagggtatcctaagagaacaaaataaagaacttgccacattcagaagagagcgtgatcactctgaagatgagaggtcccagaatatacataaaatatctgaacttcaggagcatattcaagagaaagagagtcagctcagtgaattgcaggaacaaaataggattgctcaagaaactatcctgtacaaggatgagcaactaagagaagcacaaggttggattgctcgtgcccaagagattgatgctttacaatcatctacaaatcattcgttgcaggctgaattgcgagaacgtactgagcagtataaccagctctggcatggttgtcagaggcagtttgcagagatggagagattgcatgtgcacacagtgcaacagcttcagcaagagcttgctaatgtaagggaagctggtggttccaaaacaaactccggtggagcctcccagactattcagaacagcgggaaccaatttgatgctcatggaaacagcgcagaaagtgcaaacattagtgtccattcaaatggaaaaagcgcagataacatctcatcttttacttcaactgatgataaggctacccagaacaaccgtgttgatgggatatcagcttccaatcttgcgacacatgggttccttcaagctggtcagatgacccctctgcattcatttgtcatgcatcaacaagagatttctcagcttgttcagcctcaggtcccttcacaacatattgaacaatcagtgttgctacagcaaaaggctcaggctgtaccagatagttcacagatgcctatgcagaatcatgtgcatccatctcaaggtgttcatggcttggtacaatcctttggtcaagggtacggagatattcaaactagccaagtagcacaatacggaactacgacaacaccatcctctgtgaatgaacaggcagtggaatctggcaatggagattataatggatctaatcagtcagagaataactttcaagacatttcttcacagttccgtgatgccctaaggcttgattctcattcccagaatcagaaacctgaggaactcaatggtcaggtttcacctgatgaacacagtggtgctaaatccattgtccctgaaactctagtctcatccggaaaacctgagaggaactcagagtgcgctctgctcgatgaaaggtcgcttttgacatgcatcctccgtactataccagctggtgggagaatcagaatcagttcaacgcttccaaaccgtttgggcaaaatgctagcccctctacactggcatgattacaggaaaaagtacgggaagctggatgattttgttgctagccatcttgagttattttcgatagaggatgactacattcaagttagagacggtgcacagaaaatggtagcagcatcagcagcagcagccaaagtggcagcagcagctgcagcttcgtcatccccaaactccatctatgtggctatgactcctatggctcagtctcaagggttaaagaagaatgacaacagagttaggcagagctctgattttatggtgaagcagcaaagaaagctctgattttacaagtcaagcttttcaaagtaaaagcgtattagagtgaggctaaacaatctcctatcttgtttttcattttttggtgtatccccgaagctaagatatacattcataattacttttgccctttcaatagtatcaatgcttaaagtcgacaatgtttattttaaag

SEQ ID NO: 46512 - protein, 682 aa, Arabidopsis thaliana
  peptide (1)..(682): Ceres Seq. ID no. 14315728
  misc_feature (44)..(294): Pfam Name: Myosin tail Pfam Description: Myosin tail
  misc_feature (34)..(329): Homolog of NCBI NO: 18846043 NR Description: ORF 73
  misc_feature (27)..(519): Homolog of NCBI NO: 7489885 NR Description: interaptin - slime mold (Dictyostelium
  misc_feature (17)..(299): Homolog of NCBI NO: 13936996 NR Description: ORF73 [Human herpesvirus 8]
  misc_feature (16)..(329): Homolog of NCBI NO: 9886896 NR Description: Orf73 [Human herpesvirus 8]
  misc_feature (34)..(293): Homolog of NCBI NO: 5669894 NR Description: latent nuclear antigen [Human herpesvirus 8]
  misc_feature (36)..(329): Homolog of NCBI NO: 5669894 NR Description: latent nuclear antigen [Human herpesvirus 8]
  misc_feature (17)..(299): Homolog of NCBI NO: 2246532 NR Description: ORF 73, contains large complex repeat CR 73
  misc_feature (17)..(329): Homolog of NCBI NO: 2246532 NR Description: ORF 73, contains large complex repeat CR 73
  misc_feature (16)..(329): Homolog of NCBI NO: 11037008 NR Description: latent nuclear antigen [Human herpesvirus 8]
  misc_feature (17)..(329): Homolog of NCBI NO: 13936996 NR Description: ORF73 [Human herpesvirus 8]
METAASSVATTRGGSLQNPSPTAPSRKEWRAVSDSQDTTDYVDLEQLKLNRTDERTIYENGREQDGYSNSEMLQQQILNVSRKKGELQQLEIELRAQMIARHEIMEIQSNYESQFTEYANAAARMQEQLHENERSIREAERKLEEKDRELHAIKLDNEAAWAKEGILREQNKELATFRRERDHSEDERSQNIHKISELQEHIQEKESQLSELQEQNRIAQETILYKDEQLREAQGWIARAQEIDALQSSTNHSLQAELRERTEQYNQLWHGCQRQFAEMERLHVHTVQQLQQELANVREAGGSKTNSGGASQTIQNSGNQFDAHGNSAESANISVHSNGKSADNISSFTSTDDKATQNNRVDGISASNLATHGFLQAGQMTPLHSFVMHQQEISQLVQPQVPSQHIEQSVLLQQKAQAVPDSSQMPMQNHVHPSQGVHGLVQSFGQGYGDIQTSQVAQYGTTTTPSSVNEQAVESGNGDYNGSNQSENNFQDISSQFRDALRLDSHSQNQKPEELNGQVSPDEHSGAKSIVPETLVSSGKPERNSECALLDERSLLTCILRTIPAGGRIRISSTLPNRLGKMLAPLHWHDYRKKYGKLDDFVASHLELFSIEDDYIQVRDGAQKMVAASAAAAKVAAAAAASSSPNSIYVAMTPMAQSQGLKKNDNRVRQSSDFMVKQQRKL

SEQ ID NO: 46513 - protein, 611 aa, Arabidopsis thaliana
  peptide (1)..(611): Ceres Seq. ID no. 14315729
  misc_feature (1)..(223): Pfam Name: Myosin tail Pfam Description: Myosin tail
  misc_feature (1)..(258): Homolog of NCBI NO: 18846043 NR Description: ORF 73
  misc_feature (1)..(448): Homolog of NCBI NO: 7489885 NR Description: interaptin - slime mold (Dictyostelium
  misc_feature (1)..(228): Homolog of NCBI NO: 13936996 NR Description: ORF73 [Human herpesvirus 8]
  misc_feature (1)..(258): Homolog of NCBI NO: 9886896 NR Description: Orf73 [Human herpesvirus 8]
  misc_feature (1)..(222): Homolog of NCBI NO: 5669894 NR Description: latent nuclear antigen [Human herpesvirus 8]
  misc_feature (1)..(258): Homolog of NCBI NO: 5669894 NR Description: latent nuclear antigen [Human herpesvirus 8]
  misc_feature (1)..(228): Homolog of NCBI NO: 2246532 NR Description: ORF 73, contains large complex repeat CR 73
  misc_feature (1)..(258): Homolog of NCBI NO: 2246532 NR Description: ORF 73, contains large complex repeat CR 73
  misc_feature (1)..(258): Homolog of NCBI NO: 11037008 NR Description: latent nuclear antigen [Human herpesvirus 8]
  misc_feature (1)..(258): Homolog of NCBI NO: 13936996 NR Description: ORF73 [Human herpesvirus 8]
MLQQQILNVSRKKGELQQLEIELRAQMIARHEIMEIQSNYESQFTEYANAAARMQEQLHENERSIREAERKLEEKDRELHAIKLDNEAAWAKEGILREQNKELATFRRERDHSEDERSQNIHKISELQEHIQEKESQLSELQEQNRIAQETILYKDEQLREAQGWIARAQEIDALQSSTNHSLQAELRERTEQYNQLWHGCQRQFAEMERLHVHTVQQLQQELANVREAGGSKTNSGGASQTIQNSGNQFDAHGNSAESANISVHSNGKSADNISSFTSTDDKATQNNRVDGISASNLATHGFLQAGQMTPLHSFVMHQQEISQLVQPQVPSQHIEQSVLLQQKAQAVPDSSQMPMQNHVHPSQGVHGLVQSFGQGYGDIQTSQVAQYGTTTTPSSVNEQAVESGNGDYNGSNQSENNFQDISSQFRDALRLDSHSQNQKPEELNGQVSPDEHSGAKSIVPETLVSSGKPERNSECALLDERSLLTCILRTIPAGGRIRISSTLPNRLGKMLAPLHWHDYRKKYGKLDDFVASHLELFSIEDDYIQVRDGAQKMVAASAAAAKVAAAAAASSSPNSIYVAMTPMAQSQGLKKNDNRVRQSSDFMVKQQRKL

SEQ ID NO: 46514 - protein, 585 aa, Arabidopsis thaliana
  peptide (1)..(585): Ceres Seq. ID no. 14315730
  misc_feature (1)..(197): Pfam Name: Myosin tail Pfam Description: Myosin tail
  misc_feature (1)..(232): Homolog of NCBI NO: 18846043 NR Description: ORF 73
  misc_feature (1)..(422): Homolog of NCBI NO: 7489885 NR Description: interaptin - slime mold (Dictyostelium
  misc_feature (1)..(202): Homolog of NCBI NO: 13936996 NR Description: ORF73 [Human herpesvirus 8]
  misc_feature (1)..(232): Homolog of NCBI NO: 9886896 NR Description: Orf73 [Human herpesvirus 8]
  misc_feature (1)..(196): Homolog of NCBI NO: 5669894 NR Description: latent nuclear antigen [Human herpesvirus 8]
  misc_feature (1)..(232): Homolog of NCBI NO: 5669894 NR Description: latent nuclear antigen [Human herpesvirus 8]
  misc_feature (1)..(202): Homolog of NCBI NO: 2246532 NR Description: ORF 73, contains large complex repeat CR 73
  misc_feature (1)..(232): Homolog of NCBI NO: 2246532 NR Description: ORF 73, contains large complex repeat CR 73
  misc_feature (1)..(232): Homolog of NCBI NO: 11037008 NR Description: latent nuclear antigen [Human herpesvirus 8]
  misc_feature (1)..(232): Homolog of NCBI NO: 13936996 NR Description: ORF73 [Human herpesvirus 8]
MIARHEIMEIQSNYESQFTEYANAAARMQEQLHENERSIREAERKLEEKDRELHAIKLDNEAAWAKEGILREQNKELATFRRERDHSEDERSQNIHKISELQEHIQEKESQLSELQEQNRIAQETILYKDEQLREAQGWIARAQEIDALQSSTNHSLQAELRERTEQYNQLWHGCQRQFAEMERLHVHTVQQLQQELANVREAGGSKTNSGGASQTIQNSGNQFDAHGNSAESANISVHSNGKSADNISSFTSTDDKATQNNRVDGISASNLATHGFLQAGQMTPLHSFVMHQQEISQLVQPQVPSQHIEQSVLLQQKAQAVPDSSQMPMQNHVHPSQGVHGLVQSFGQGYGDIQTSQVAQYGTTTTPSSVNEQAVESGNGDYNGSNQSENNFQDISSQFRDALRLDSHSQNQKPEELNGQVSPDEHSGAKSIVPETLVSSGKPERNSECALLDERSLLTCILRTIPAGGRIRISSTLPNRLGKMLAPLHWHDYRKKYGKLDDFVASHLELFSIEDDYIQVRDGAQKMVAASAAAAKVAAAAAASSSPNSIYVAMTPMAQSQGLKKNDNRVRQSSDFMVKQQRKL

SEQ ID NO: 46515 - DNA, 3171 bp, Arabidopsis thaliana
  misc_feature (1)..(3171): Ceres Seq. ID no. 12574388
  misc_feature: MA Experiment ID: 20000173 Result: Down-regulated in Transcription
  misc_feature: MA Experiment 20000173 PARAMETER Experiment Name: At_42deg_Heat_P Parameter: Age (day) Value: 14
  misc_feature: MA Experiment 20000173 PARAMETER Experiment Name: At_42deg_Heat_P Parameter: Organism Value: A. thaliana
  misc_feature: MA Experiment 20000173 PARAMETER Experiment Name: At_42deg_Heat_P Parameter: Plant Line Value: WS
  misc_feature: MA Experiment 20000173 PARAMETER Experiment Name: At_42deg_Heat_P Parameter: Temperature (deg C) Value: 42 vs. 22
  misc_feature: MA Experiment 20000173 PARAMETER Experiment Name: At_42deg_Heat_P Parameter: Timepoint (hr) Value: 6
  misc_feature: MA Experiment 20000173 PARAMETER Experiment Name: At_42deg_Heat_P Parameter: Tissue Value: Aerial
  misc_feature: MA Experiment ID: 20000185 Result: Up-regulated in Transcription
  misc_feature: MA Experiment 20000185 PARAMETER Experiment Name: At_Roots__P Parameter: Age (day) Value: 7 vs. 21
  misc_feature: MA Experiment 20000185 PARAMETER Experiment Name: At_Roots__P Parameter: Organism Value: A. thaliana
  misc_feature: MA Experiment 20000185 PARAMETER Experiment Name: At_Roots__P Parameter: Tissue Value: Roots vs. Whole Plant
  misc_feature: MA Experiment ID: 20000234 Result: Up-regulated in Transcription
  misc_feature: MA Experiment 20000234 PARAMETER Experiment Name: At_Siliques_P Parameter: Age (day) Value: 21
  misc_feature: MA Experiment 20000234 PARAMETER Experiment Name: At_Siliques_P Parameter: Organism Value: A. thaliana
  misc_feature: MA Experiment 20000234 PARAMETER Experiment Name: At_Siliques_P Parameter: Plant Line Value: WS
  misc_feature: MA Experiment 20000234 PARAMETER Experiment Name: At_Siliques_P Parameter: Tissue Value: Less Than 5mm Siliques vs. Whole Plant
  misc_feature: MA Experiment ID: 20000264 Result: Up-regulated in Transcription
  misc_feature: MA Experiment 20000264 PARAMETER Experiment Name: At_Open_Flower_P Parameter: Age (day) Value: 21
  misc_feature: MA Experiment 20000264 PARAMETER Experiment Name: At_Open_Flower_P Parameter: Plant Line Value: WS
  misc_feature: MA Experiment 20000264 PARAMETER Experiment Name: At_Open_Flower_P Parameter: Tissue Value: Open Flower vs. Whole Plant
  misc_feature: MA Experiment ID: 20000265 Result: Up-regulated in Transcription
  misc_feature: MA Experiment 20000265 PARAMETER Experiment Name: At_Open_Flower_P Parameter: Age (day) Value: 21
  misc_feature: MA Experiment 20000265 PARAMETER Experiment Name: At_Open_Flower_P Parameter: Plant Line Value: WS
  misc_feature: MA Experiment 20000265 PARAMETER Experiment Name: At_Open_Flower_P Parameter: Tissue Value: Closed Flower vs. Whole Plant
  misc_feature: MA Experiment ID: 20000286 Result: Up-regulated in Transcription
  misc_feature: MA Experiment 20000286 PARAMETER Experiment Name: At_Open_Flower_P Parameter: Age (day) Value: 21
  misc_feature: MA Experiment 20000286 PARAMETER Experiment Name: At_Open_Flower_P Parameter: Plant Line Value: WS
  misc_feature: MA Experiment 20000286 PARAMETER Experiment Name: At_Open_Flower_P Parameter: Tissue Value: Half Open vs. Whole Plant
  misc_feature: MA Experiment ID: 20000496 Result: Up-regulated in Transcription
  misc_feature: MA Experiment 20000496 PARAMETER Experiment Name: At_Guard_Cells_P Parameter: Harvest Date Value: 7/19/2002
  misc_feature: MA Experiment 20000496 PARAMETER Experiment Name: At_Guard_Cells_P Parameter: Organism Value: Canola
  misc_feature: MA Experiment 20000496 PARAMETER Experiment Name: At_Guard_Cells_P Parameter: Tissue Value: Guard Cells vs. Leaves
  misc_feature: MA Experiment ID: 20001451 Result: Down-regulated in Transcription
  misc_feature: MA Experiment 20001451 PARAMETER Experiment Name: At_Far-red-induction_P Parameter: Age (day) Value: 7
  misc_feature: MA Experiment 20001451 PARAMETER Experiment Name: At_Far-red-induction_P Parameter: Light Value: Far-red vs. White
  misc_feature: MA Experiment 20001451 PARAMETER Experiment Name: At_Far-red-induction_P Parameter: Organism Value: A. thaliana
  misc_feature: MA Experiment 20001451 PARAMETER Experiment Name: At_Far-red-induction_P Parameter: Plant Line Value: Columbia
  misc_feature: MA Experiment 20001451 PARAMETER Experiment Name: At_Far-red-induction_P Parameter: Timepoint (hr) Value: 24
  misc_feature: MA Experiment 20001451 PARAMETER Experiment Name: At_Far-red-induction_P Parameter: Tissue Value: Whole Plant
atgtctagccgccatgacaaagagaaaggcgtcaatgttcaagtcctcctccgatgcaggccatttagcgatgatgaattgagaagcaatgcgcctcaggttctcacttgtaatgatttgcaaagagaagttgctgtttcccaaaacatcgctgggaagcatattgatagggttttcacttttgataaggtgtttggaccatcagcacaacagaaggatttgtatgatcaagccgttgttccaattgtgaatgaagtacttgaaggttttaattgtactatatttgcgtatggtcagactggtactggtaaaacatatacaatggaaggagaatgtagaagatcaaagagcgcaccttgtggaggtcttccggcagaagcaggtgttatacctagagctgtgaaacaaatatttgatacgcttgagggtcagcaagctgagtacagtgttaaagtcacgtttttggaactctacaatgaagagattaccgatttgcttgctcctgaagatctatccagagttgctgctgaagaaaaacaaaagaagccgttgcctctcatggaggacggcaaaggtggtgttcttgttagaggattggaagaggaaatcgtgacaagtgccaatgaaatctttactttgcttgagagaggttcctctaaacggagaactgcagaaacattcttgaataaacaatcaagtcggtcacattctctcttctcaataacaatacatatcaaagaagctactccagaaggtgaagaactaatcaagtgtggcaagctcaacttggttgacttggcagggtcagaaaatatatcacgttctggtgctagggatggccgggctcgagaagctggtgaaataaacaaaagtcttcttacattaggacgagtgatcagcgctttggttgaacatcttggacacgttccttacagggatagtaagctcacccgtttactacgtgattcacttggtgggagaacaaagacatgtatcatagccacagtttcacctgccgttcattgtctggaggaaacattaagtactcttgattatgcacacagggctaagaatattagaaacaaaccagaggttaaccagaaaatgatgaaatctactttgataaaggacctttatggtgaaatagaacgacttaaggcggaggtatacgcttcccgtgagaaaaatggtgtttatatgccaaaagagagatactaccaagaggagagtgagagaaaggtaatggctgagcagattgaacagatgggtggtcagatagagaattaccaaaaacaacttgaggagttgcaagataagtatgtcggtcaagtgcgggagtgctctgatctgactaccaagcttgatatcaccgagaaaaacttgagccaaacatgcaaagtgcttgcttccacaaacgaggaattgaagaaatctcaatatgccatgaaagagaaagatttcatcatttcagagcagaaaaaatctgaaaatgtactggttcaacaagcttgcattttgcaatccaacctagagaaagctactaaagacaattcttcattacaccaaaagattggaagagaggacaagcttagtgcggataacagaaaagtggtggacaattatcaagtagaactttctgaacaaatttcaaatctgttcaatagggttgcttcttgtctctcccagcaaaatgtacaccttcagggtgttaacaaactgtcccaatctcgtttagaggcacacaacaaggcgatcctagaaatgaaaaagaaggttaaagcttcaagggatttatatagttctcacttggaggcagtgcagaatgtagttcggttacacaaggcaaacgcgaatgcttgtcttgaggaagtttcagcattgacgacttcaagtgcatgttccattgatgaatttcttgcttcaggagatgaaacaacatcgtcgttatttgatgaacttcagagtgctctctcgtcccatcagggagaaatggctctctttgcgagggaactgagacaaaggttccacacaacgatggagcaaactcaggagatgtctgaatacacaagtacgttctttcagaagcttatggaagagtctaaaaatgctgagactcgtgctgcagaggcaaatgatagtcaaataaacagcattattgattttcagaagacttacgaggctcagtcaaaatctgatacagataaacttattgcagatttaactaacctagtctcaagtcacattcgtcgccaacacgaattggttgattcaagactccataactttaaagatgccgtctcttccaacaaaactttcttggacgaacatgtctctgctgttaataatctgacgaaagacgcaaaaagaaagtgggagacattttccatgcaagctgagaatgaagccagagaaggtgctgatttctcggctgcaaaacattgtcgaatggagttactgcttcagcaatctgtgggtcatgcggaatcagctttcaaacactgcaagataactcatgaatctctaaaggagatgaccagtaagcaagtcacagatgtctcttcacttgttaggtctgcttgtgatagtaacgagcagcacgatgccgaagtagattctgcaaggactgctgctgaaaaagatgtaacaaagaacagcgatgatataatccagcaaattgaacgcatgtcagaggatgaaaaagcgtctgtatcaaaaatcctggaaaatgtcaggtcgcatgaaaaaactcttgaaagtttccaacaggatcagtgttgccaagccagatgcatcgaggataaagctcaagaaacttttcaacaacaatacatggagtatgagcccacaggtgcaactccaacaaagaatgaaccagagatcccaaccaaagccaccattgaatcactacgagccatgccaattgagacattagttgaagagttccgtgaaaacaactcttatgaatcctttgcgaccaaggaaacaaaaccgcaacagctaacacggtcgcctctctcacaattgaaattctcttacagtaatcgaagttctcaaagacggtttgttctactattacataatgcgaatcttggaccctttttggttatgatggtttgtgatatgtgcatgcatataccacttgatcactttctatatatgactcaaccatga

SEQ ID NO: 46516 - protein, 1056 aa, Arabidopsis thaliana
  peptide (1)..(1056): Ceres Seq. ID no. 12574389
  misc_feature (343)..(993): Pfam Name: Myosin tail Pfam Description: Myosin tail
  misc_feature (1)..(997): Homolog of NCBI NO: 119217 NR Description: KINESIN-RELATED MOTOR PROTEIN EG5 1
  misc_feature (1)..(906): Homolog of NCBI NO: 2497521 NR Description: Kinesin-related motor protein Eg5 2
  misc_feature (1)..(983): Homolog of NCBI NO: 27503177 NR Description: Similar to kinesin-like 1 [Xenopus laevis]
  misc_feature (12)..(965): Homolog of NCBI NO: 10567777 NR Description: KRP170 [Strongylocentrotus purpuratus]
  misc_feature (12)..(983): Homolog of NCBI NO: 12055369 NR Description: kinesin-like boursin [Paracentrotus lividus]
  misc_feature (2)..(924): Homolog of NCBI NO: 25408550 NR Description: probable kinesin heavy chain [imported] -
  misc_feature (2)..(1008): Homolog of NCBI NO: 30687132 NR Description: kinesin-related protein [Arabidopsis thaliana]
  misc_feature (3)..(929): Homolog of NCBI NO: 15226915 NR Description: kinesin-related protein; protein id: At2g28620.1
  misc_feature (2)..(1008): Homolog of NCBI NO: 15186760 NR Description: KRP120-2 [Daucus carota]
  misc_feature (2)..(1023): Homolog of NCBI NO: 15231259 NR Description: kinesin-related protein; protein id: At3g45850.1
MSSRHDKEKGVNVQVLLRCRPFSDDELRSNAPQVLTCNDLQREVAVSQNIAGKHIDRVFTFDKVFGPSAQQKDLYDQAVVPIVNEVLEGFNCTIFAYGQTGTGKTYTMEGECRRSKSAPCGGLPAEAGVIPRAVKQIFDTLEGQQAEYSVKVTFLELYNEEITDLLAPEDLSRVAAEEKQKKPLPLMEDGKGGVLVRGLEEEIVTSANEIFTLLERGSSKRRTAETFLNKQSSRSHSLFSITIHIKEATPEGEELIKCGKLNLVDLAGSENISRSGARDGRAREAGEINKSLLTLGRVISALVEHLGHVPYRDSKLTRLLRDSLGGRTKTCIIATVSPAVHCLEETLSTLDYAHRAKNIRNKPEVNQKMMKSTLIKDLYGEIERLKAEVYASREKNGVYMPKERYYQEESERKVMAEQIEQMGGQIENYQKQLEELQDKYVGQVRECSDLTTKLDITEKNLSQTCKVLASTNEELKKSQYAMKEKDFIISEQKKSENVLVQQACILQSNLEKATKDNSSLHQKIGREDKLSADNRKVVDNYQVELSEQISNLFNRVASCLSQQNVHLQGVNKLSQSRLEAHNKAILEMKKKVKASRDLYSSHLEAVQNVVRLHKANANACLEEVSALTTSSACSIDEFLASGDETTSSLFDELQSALSSHQGEMALFARELRQRFHTTMEQTQEMSEYTSTFFQKLMEESKNAETRAAEANDSQINSIIDFQKTYEAQSKSDTDKLIADLTNLVSSHIRRQHELVDSRLHNFKDAVSSNKTFLDEHVSAVNNLTKDAKRKWETFSMQAENEAREGADFSAAKHCRMELLLQQSVGHAESAFKHCKITHESLKEMTSKQVTDVSSLVRSACDSNEQHDAEVDSARTAAEKDVTKNSDDIIQQIERMSEDEKASVSKILENVRSHEKTLESFQQDQCCQARCIEDKAQETFQQQYMEYEPTGATPTKNEPEIPTKATIESLRAMPIETLVEEFRENNSYESFATKETKPQQLTRSPLSQLKFSYSNRSSQRRFVLLLHNANLGPFLVMMVCDMCMHIPLDHFLYMTQP

SEQ ID NO: 46517 - protein, 949 aa, Arabidopsis thaliana
  peptide (1)..(949): Ceres Seq. ID no. 12574390
  misc_feature (236)..(886): Pfam Name: Myosin tail Pfam Description: Myosin tail
  misc_feature (1)..(890): Homolog of NCBI NO: 119217 NR Description: KINESIN-RELATED MOTOR PROTEIN EG5 1
  misc_feature (1)..(799): Homolog of NCBI NO: 2497521 NR Description: Kinesin-related motor protein Eg5 2
  misc_feature (1)..(876): Homolog of NCBI NO: 27503177 NR Description: Similar to kinesin-like 1 [Xenopus laevis]
  misc_feature (1)..(858): Homolog of NCBI NO: 10567777 NR Description: KRP170 [Strongylocentrotus purpuratus]
  misc_feature (1)..(876): Homolog of NCBI NO: 12055369 NR Description: kinesin-like boursin [Paracentrotus lividus]
  misc_feature (1)..(817): Homolog of NCBI NO: 25408550 NR Description: probable kinesin heavy chain [imported] -
  misc_feature (1)..(901): Homolog of NCBI NO: 30687132 NR Description: kinesin-related protein [Arabidopsis thaliana]
  misc_feature (1)..(822): Homolog of NCBI NO: 15226915 NR Description: kinesin-related protein; protein id: At2g28620.1
  misc_feature (1)..(901): Homolog of NCBI NO: 15186760 NR Description: KRP120-2 [Daucus carota]
  misc_feature (1)..(916): Homolog of NCBI NO: 15231259 NR Description: kinesin-related protein; protein id: At3g45850.1
MEGECRRSKSAPCGGLPAEAGVIPRAVKQIFDTLEGQQAEYSVKVTFLELYNEEITDLLAPEDLSRVAAEEKQKKPLPLMEDGKGGVLVRGLEEEIVTSANEIFTLLERGSSKRRTAETFLNKQSSRSHSLFSITIHIKEATPEGEELIKCGKLNLVDLAGSENISRSGARDGRAREAGEINKSLLTLGRVISALVEHLGHVPYRDSKLTRLLRDSLGGRTKTCIIATVSPAVHCLEETLSTLDYAHRAKNIRNKPEVNQKMMKSTLIKDLYGEIERLKAEVYASREKNGVYMPKERYYQEESERKVMAEQIEQMGGQIENYQKQLEELQDKYVGQVRECSDLTTKLDITEKNLSQTCKVLASTNEELKKSQYAMKEKDFIISEQKKSENVLVQQACILQSNLEKATKDNSSLHQKIGREDKLSADNRKVVDNYQVELSEQISNLFNRVASCLSQQNVHLQGVNKLSQSRLEAHNKAILEMKKKVKASRDLYSSHLEAVQNVVRLHKANANACLEEVSALTTSSACSIDEFLASGDETTSSLFDELQSALSSHQGEMALFARELRQRFHTTMEQTQEMSEYTSTFFQKLMEESKNAETRAAEANDSQINSIIDFQKTYEAQSKSDTDKLIADLTNLVSSHIRRQHELVDSRLHNFKDAVSSNKTFLDEHVSAVNNLTKDAKRKWETFSMQAENEAREGADFSAAKHCRMELLLQQSVGHAESAFKHCKITHESLKEMTSKQVTDVSSLVRSACDSNEQHDAEVDSARTAAEKDVTKNSDDIIQQIERMSEDEKASVSKILENVRSHEKTLESFQQDQCCQARCIEDKAQETFQQQYMEYEPTGATPTKNEPEIPTKATIESLRAMPIETLVEEFRENNSYESFATKETKPQQLTRSPLSQLKFSYSNRSSQRRFVLLLHNANLGPFLVMMVCDMCMHIPLDHFLYMTQP

SEQ ID NO: 46518 - protein, 870 aa, Arabidopsis thaliana
  peptide (1)..(870): Ceres Seq. ID no. 12574391
  misc_feature (157)..(807): Pfam Name: Myosin tail Pfam Description: Myosin tail
  misc_feature (1)..(811): Homolog of NCBI NO: 119217 NR Description: KINESIN-RELATED MOTOR PROTEIN EG5 1
  misc_feature (1)..(720): Homolog of NCBI NO: 2497521 NR Description: Kinesin-related motor protein Eg5 2
  misc_feature (1)..(797): Homolog of NCBI NO: 27503177 NR Description: Similar to kinesin-like 1 [Xenopus laevis]
  misc_feature (1)..(779): Homolog of NCBI NO: 10567777 NR Description: KRP170 [Strongylocentrotus purpuratus]
  misc_feature (1)..(797): Homolog of NCBI NO: 12055369 NR Description: kinesin-like boursin [Paracentrotus lividus]
  misc_feature (1)..(738): Homolog of NCBI NO: 25408550 NR Description: probable kinesin heavy chain [imported] -
  misc_feature (1)..(822): Homolog of NCBI NO: 30687132 NR Description: kinesin-related protein [Arabidopsis thaliana]
  misc_feature (1)..(743): Homolog of NCBI NO: 15226915 NR Description: kinesin-related protein; protein id: At2g28620.1
  misc_feature (1)..(822): Homolog of NCBI NO: 15186760 NR Description: KRP120-2 [Daucus carota]
  misc_feature (1)..(837): Homolog of NCBI NO: 15231259 NR Description: kinesin-related protein; protein id: At3g45850.1
MEDGKGGVLVRGLEEEIVTSANEIFTLLERGSSKRRTAETFLNKQSSRSHSLFSITIHIKEATPEGEELIKCGKLNLVDLAGSENISRSGARDGRAREAGEINKSLLTLGRVISALVEHLGHVPYRDSKLTRLLRDSLGGRTKTCIIATVSPAVHCLEETLSTLDYAHRAKNIRNKPEVNQKMMKSTLIKDLYGEIERLKAEVYASREKNGVYMPKERYYQEESERKVMAEQIEQMGGQIENYQKQLEELQDKYVGQVRECSDLTTKLDITEKNLSQTCKVLASTNEELKKSQYAMKEKDFIISEQKKSENVLVQQACILQSNLEKATKDNSSLHQKIGREDKLSADNRKVVDNYQVELSEQISNLFNRVASCLSQQNVHLQGVNKLSQSRLEAHNKAILEMKKKVKASRDLYSSHLEAVQNVVRLHKANANACLEEVSALTTSSACSIDEFLASGDETTSSLFDELQSALSSHQGEMALFARELRQRFHTTMEQTQEMSEYTSTFFQKLMEESKNAETRAAEANDSQINSIIDFQKTYEAQSKSDTDKLIADLTNLVSSHIRRQHELVDSRLHNFKDAVSSNKTFLDEHVSAVNNLTKDAKRKWETFSMQAENEAREGADFSAAKHCRMELLLQQSVGHAESAFKHCKITHESLKEMTSKQVTDVSSLVRSACDSNEQHDAEVDSARTAAEKDVTKNSDDIIQQIERMSEDEKASVSKILENVRSHEKTLESFQQDQCCQARCIEDKAQETFQQQYMEYEPTGATPTKNEPEIPTKATIESLRAMPIETLVEEFRENNSYESFATKETKPQQLTRSPLSQLKFSYSNRSSQRRFVLLLHNANLGPFLVMMVCDMCMHIPLDHFLYMTQP

SEQ ID NO: 46519 - DNA, 2188 bp, Arabidopsis thaliana; identical to SEQ ID NO: 43111
  misc_feature (1)..(2188): Ceres Seq. ID no. 12574396
  misc_feature: MA Experiment ID: 20000185 Result: Up-regulated in Transcription
  misc_feature: MA Experiment 20000185 PARAMETER Experiment Name: At_Roots__P Parameter: Age (day) Value: 7 vs. 21
  misc_feature: MA Experiment 20000185 PARAMETER Experiment Name: At_Roots__P Parameter: Organism Value: A. thaliana
  misc_feature: MA Experiment 20000185 PARAMETER Experiment Name: At_Roots__P Parameter: Tissue Value: Roots vs. Whole Plant
  misc_feature: MA Experiment ID: 20000264 Result: Up-regulated in Transcription
  misc_feature: MA Experiment 20000264 PARAMETER Experiment Name: At_Open_Flower_P Parameter: Age (day) Value: 21
  misc_feature: MA Experiment 20000264 PARAMETER Experiment Name: At_Open_Flower_P Parameter: Plant Line Value: WS
  misc_feature: MA Experiment 20000264 PARAMETER Experiment Name: At_Open_Flower_P Parameter: Tissue Value: Open Flower vs. Whole Plant
  misc_feature: MA Experiment ID: 20000265 Result: Up-regulated in Transcription
  misc_feature: MA Experiment 20000265 PARAMETER Experiment Name: At_Open_Flower_P Parameter: Age (day) Value: 21
  misc_feature: MA Experiment 20000265 PARAMETER Experiment Name: At_Open_Flower_P Parameter: Plant Line Value: WS
  misc_feature: MA Experiment 20000265 PARAMETER Experiment Name: At_Open_Flower_P Parameter: Tissue Value: Closed Flower vs. Whole Plant
  misc_feature: MA Experiment ID: 20000438 Result: Up-regulated in Transcription
  misc_feature: MA Experiment 20000438 PARAMETER Experiment Name: At_Shoots__P Parameter: Age (day) Value: 14
  misc_feature: MA Experiment 20000438 PARAMETER Experiment Name: At_Shoots__P Parameter: Tissue Value: Shoots vs. Whole Plant
  misc_feature: MA Experiment ID: 20000439 Result: Up-regulated in Transcription
  misc_feature: MA Experiment 20000439 PARAMETER Experiment Name: At_Roots__P Parameter: Age (day) Value: 14 vs. 21
  misc_feature: MA Experiment 20000439 PARAMETER Experiment Name: At_Roots__P Parameter: Organism Value: A. thaliana
  misc_feature: MA Experiment 20000439 PARAMETER Experiment Name: At_Roots__P Parameter: Tissue Value: Roots vs. Whole Plant
  misc_feature: MA Experiment ID: 20001451 Result: Down-regulated in Transcription
  misc_feature: MA Experiment 20001451 PARAMETER Experiment Name: At_Far-red-induction_P Parameter: Age (day) Value: 7
  misc_feature: MA Experiment 20001451 PARAMETER Experiment Name: At_Far-red-induction_P Parameter: Light Value: Far-red vs. White
  misc_feature: MA Experiment 20001451 PARAMETER Experiment Name: At_Far-red-induction_P Parameter: Organism Value: A. thaliana
  misc_feature: MA Experiment 20001451 PARAMETER Experiment Name: At_Far-red-induction_P Parameter: Plant Line Value: Columbia
  misc_feature: MA Experiment 20001451 PARAMETER Experiment Name: At_Far-red-induction_P Parameter: Timepoint (hr) Value: 24
  misc_feature: MA Experiment 20001451 PARAMETER Experiment Name: At_Far-red-induction_P Parameter: Tissue Value: Whole Plant

SEQ ID NO: 46520 - protein, 611 aa, Arabidopsis thaliana; identical to SEQ ID NO: 43112
  peptide (1)..(611): Ceres Seq. ID no. 12574397
  misc_feature (93)..(539): Pfam Name: Phosphoglucose isomerase Pfam Description: Phosphoglucose isomerase
  misc_feature (93)..(539): Pfam Name: Phosphoglucose isomerase Pfam Description: Phosphoglucose isomerase
  misc_feature (112)..(437): Homolog of NCBI NO: 18645083 NR Description: glucose-6-phosphate isomerase [uncultured
  misc_feature (101)..(543): Homolog of NCBI NO: 18030022 NR Description: glucose-6-phosphate isomerase [Trichomonas
  misc_feature (70)..(581): Homolog of NCBI NO: 23053592 NR Description: hypothetical protein [Geobacter metallireducens]
  misc_feature (74)..(599): Homolog of NCBI NO: 16330760 NR Description: glucose-6-phosphate isomerase [Synechocystis sp.
  misc_feature (70)..(598): Homolog of NCBI NO: 22298259 NR Description: glucose-6-phosphate isomerase
  misc_feature (112)..(437): Homolog of NCBI NO: 18645083 NR Description: glucose-6-phosphate isomerase [uncultured
  misc_feature (70)..(581): Homolog of NCBI NO: 23053592 NR Description: hypothetical protein [Geobacter metallireducens]
  misc_feature (70)..(598): Homolog of NCBI NO: 22298259 NR Description: glucose-6-phosphate isomerase
  misc_feature (1)..(611): Homolog of NCBI NO: 6690395 NR Description: phosphoglucose isomerase precursor [Arabidopsis
  misc_feature (2)..(611): Homolog of NCBI NO: 7484671 NR Description: glucose-6-phosphate isomerase (EC 5.3.1.9)
  misc_feature (70)..(599): Homolog of NCBI NO: 23125809 NR Description: hypothetical protein [Nostoc punctiforme]
  misc_feature (70)..(601): Homolog of NCBI NO: 17228545 NR Description: glucose-6-phosphate isomerase [Nostoc sp. PCC
  misc_feature (73)..(599): Homolog of NCBI NO: 23040343 NR Description: hypothetical protein [Trichodesmium erythraeum
  misc_feature (74)..(599): Homolog of NCBI NO: 16330760 NR Description: glucose-6-phosphate isomerase [Synechocystis sp.
  misc_feature (101)..(543): Homolog of NCBI NO: 18030022 NR Description: glucose-6-phosphate isomerase [Trichomonas
  misc_feature (73)..(599): Homolog of NCBI NO: 23040343 NR Description: hypothetical protein [Trichodesmium erythraeum
  misc_feature (70)..(601): Homolog of NCBI NO: 17228545 NR Description: glucose-6-phosphate isomerase [Nostoc sp. PCC
  misc_feature (70)..(599): Homolog of NCBI NO: 23125809 NR Description: hypothetical protein [Nostoc punctiforme]
  misc_feature (2)..(611): Homolog of NCBI NO: 7484671 NR Description: glucose-6-phosphate isomerase (EC 5.3.1.9)
  misc_feature (1)..(611): Homolog of NCBI NO: 6690395 NR Description: phosphoglucose isomerase precursor [Arabidopsis

SEQ ID NO: 46521 - protein, 505 aa, Arabidopsis thaliana; identical to SEQ ID NO: 43113
  peptide (1)..(505): Ceres Seq. ID no. 12574398
  misc_feature (1)..(433): Pfam Name: Phosphoglucose isomerase Pfam Description: Phosphoglucose isomerase
  misc_feature (1)..(433): Pfam Name: Phosphoglucose isomerase Pfam Description: Phosphoglucose isomerase
  misc_feature (6)..(331): Homolog of NCBI NO: 18645083 NR Description: glucose-6-phosphate isomerase [uncultured
  misc_feature (1)..(437): Homolog of NCBI NO: 18030022 NR Description: glucose-6-phosphate isomerase [Trichomonas
  misc_feature (1)..(475): Homolog of NCBI NO: 23053592 NR Description: hypothetical protein [Geobacter metallireducens]
  misc_feature (1)..(493): Homolog of NCBI NO: 16330760 NR Description: glucose-6-phosphate isomerase [Synechocystis sp.
  misc_feature (1)..(492): Homolog of NCBI NO: 22298259 NR Description: glucose-6-phosphate isomerase
  misc_feature (6)..(331): Homolog of NCBI NO: 18645083 NR Description: glucose-6-phosphate isomerase [uncultured
  misc_feature (1)..(475): Homolog of NCBI NO: 23053592 NR Description: hypothetical protein [Geobacter metallireducens]
  misc_feature (1)..(492): Homolog of NCBI NO: 22298259 NR Description: glucose-6-phosphate isomerase
  misc_feature (1)..(505): Homolog of NCBI NO: 6690395 NR Description: phosphoglucose isomerase precursor [Arabidopsis
  misc_feature (1)..(505): Homolog of NCBI NO: 7484671 NR Description: glucose-6-phosphate isomerase (EC 5.3.1.9)
  misc_feature (1)..(493): Homolog of NCBI NO: 23125809 NR Description: hypothetical protein [Nostoc punctiforme]
  misc_feature (1)..(495): Homolog of NCBI NO: 17228545 NR Description: glucose-6-phosphate isomerase [Nostoc sp. PCC
  misc_feature (1)..(493): Homolog of NCBI NO: 23040343 NR Description: hypothetical protein [Trichodesmium erythraeum
  misc_feature (1)..(493): Homolog of NCBI NO: 16330760 NR Description: glucose-6-phosphate isomerase [Synechocystis sp.
  misc_feature (1)..(437): Homolog of NCBI NO: 18030022 NR Description: glucose-6-phosphate isomerase [Trichomonas
  misc_feature (1)..(493): Homolog of NCBI NO: 23040343 NR Description: hypothetical protein [Trichodesmium erythraeum
  misc_feature (1)..(495): Homolog of NCBI NO: 17228545 NR Description: glucose-6-phosphate isomerase [Nostoc sp. PCC
  misc_feature (1)..(493): Homolog of NCBI NO: 23125809 NR Description: hypothetical protein [Nostoc punctiforme]
  misc_feature (1)..(505): Homolog of NCBI NO: 7484671 NR Description: glucose-6-phosphate isomerase (EC 5.3.1.9)
  misc_feature (1)..(505): Homolog of NCBI NO: 6690395 NR Description: phosphoglucose isomerase precursor [Arabidopsis

SEQ ID NO: 46522 - protein, 494 aa, Arabidopsis thaliana; identical to SEQ ID NO: 43114
  peptide (1)..(494): Ceres Seq. ID no. 12574399
  misc_feature (1)..(422): Pfam Name: Phosphoglucose isomerase Pfam Description: Phosphoglucose isomerase
  misc_feature (1)..(422): Pfam Name: Phosphoglucose isomerase Pfam Description: Phosphoglucose isomerase
  misc_feature (1)..(320): Homolog of NCBI NO: 18645083 NR Description: glucose-6-phosphate isomerase [uncultured
  misc_feature (1)..(426): Homolog of NCBI NO: 18030022 NR Description: glucose-6-phosphate isomerase [Trichomonas
  misc_feature (1)..(464): Homolog of NCBI NO: 23053592 NR Description: hypothetical protein [Geobacter metallireducens]
  misc_feature (1)..(482): Homolog of NCBI NO: 16330760 NR Description: glucose-6-phosphate isomerase [Synechocystis sp.
  misc_feature (1)..(481): Homolog of NCBI NO: 22298259 NR Description: glucose-6-phosphate isomerase
  misc_feature (1)..(320): Homolog of NCBI NO: 18645083 NR Description: glucose-6-phosphate isomerase [uncultured
  misc_feature (1)..(464): Homolog of NCBI NO: 23053592 NR Description: hypothetical protein [Geobacter metallireducens]
  misc_feature (1)..(481): Homolog of NCBI NO: 22298259 NR Description: glucose-6-phosphate isomerase
  misc_feature (1)..(494): Homolog of NCBI NO: 6690395 NR Description: phosphoglucose isomerase precursor [Arabidopsis
  misc_feature (1)..(494): Homolog of NCBI NO: 7484671 NR Description: glucose-6-phosphate isomerase (EC 5.3.1.9)
  misc_feature (1)..(482): Homolog of NCBI NO: 23125809 NR Description: hypothetical protein [Nostoc punctiforme]
  misc_feature (1)..(484): Homolog of NCBI NO: 17228545 NR Description: glucose-6-phosphate isomerase [Nostoc sp. PCC
  misc_feature (1)..(482): Homolog of NCBI NO: 23040343 NR Description: hypothetical protein [Trichodesmium erythraeum
  misc_feature (1)..(482): Homolog of NCBI NO: 16330760 NR Description: glucose-6-phosphate isomerase [Synechocystis sp.
  misc_feature (1)..(426): Homolog of NCBI NO: 18030022 NR Description: glucose-6-phosphate isomerase [Trichomonas
  misc_feature (1)..(482): Homolog of NCBI NO: 23040343 NR Description: hypothetical protein [Trichodesmium erythraeum
  misc_feature (1)..(484): Homolog of NCBI NO: 17228545 NR Description: glucose-6-phosphate isomerase [Nostoc sp. PCC
  misc_feature (1)..(482): Homolog of NCBI NO: 23125809 NR Description: hypothetical protein [Nostoc punctiforme]
  misc_feature (1)..(494): Homolog of NCBI NO: 7484671 NR Description: glucose-6-phosphate isomerase (EC 5.3.1.9)
  misc_feature (1)..(494): Homolog of NCBI NO: 6690395 NR Description: phosphoglucose isomerase precursor [Arabidopsis

SEQ ID NO: 46523 - DNA, 2649 bp, Arabidopsis thaliana
  misc_feature (1)..(2649): Ceres Seq. ID no. 13592024
  misc_feature: MA Experiment ID: 20000315 Result: Down-regulated in Transcription
  misc_feature: MA Experiment 20000315 PARAMETER Experiment Name: At_14day_Shoots-Roots_Sub_P Parameter: Age (day) Value: 14
  misc_feature: MA Experiment 20000315 PARAMETER Experiment Name: At_14day_Shoots-Roots_Sub_P Parameter: Organism Value: A. thaliana
  misc_feature: MA Experiment 20000315 PARAMETER Experiment Name: At_14day_Shoots-Roots_Sub_P Parameter: Plant Line Value: WS
  misc_feature: MA Experiment 20000315 PARAMETER Experiment Name: At_14day_Shoots-Roots_Sub_P Parameter: Tissue Value: Shoots vs. Whole Plant
ttctcttctctctccattttgggaactttcatccataaacttctatttttctcatcgcaaacttgaaccgtcgtaaccctaaatcgccatcttcatcatcggcaaatcgaatctccgattatatatcaaatagcttaccaaatccgacatgacccaggccctcgttttcggaggactataatgatcggactcttcgtgtcccgtctcgattgcatggggtttgagctatgccggagcttcgccgtggagtccgccgtggccgtgttactgatgctgtagctcccaatcagcttccgcaaacacctacagaaaagaaaccgaagaagagtaccgttaaagctccaaaaccggttgccggcggagttacaggagttgcagagaggccgaggactagattagcggcgaggaaattaaaggaggaagataaagagatacctcaggagattccggttgttgtgccgtctaaggatagcgatatcgataaaaacaagggtaaagaggtagtcgttgaagaagagaagaaagatatggctattggtaatgatagtggtggctctaacaaggcggctgctcaggaagaagaaggaaatactgctcctttccctgagagggttcaagttggaggatcaccactatataaagttgagagaaagctggggaagggtggttttggacaagtatttgtcggacgtcgtattagtggcggtaatgatcgtagtgcaggagctagcatcttggaggttgctctaaagtttgagcataggagcagcaagggttgcaactatggtcctccacatgagtggcaggtttacaacaccttgggtggtagccatggagtccctagagtacatttcaaaggcaggcaaggagactattatgtcatggttatggacatgcttgggcctagcttatgggatttatggaatacttcagggcaagcaatgtcctcggaaatggtagcttgcattgcggttgaatcactttccatccttgaaaagatgcatgcaaaaggttatgtgcatggggatgttaagccagaaaatttcttactcggccagccttcaacgtctcaagagaaaaaactgtttcttgttgatttgggactagctacaaagtggagagaaggtggtagcggacaacatgttgaatatgatcaacgtcctgatatgtttagagggacagttagatacgcaagtgcacatgctcatttagggagaactgctagcagaagggatgatctggaatcattagcatatacactgatctttcttcaccgaggtagattgccatggcaaggatatcagggagataacaagtcattccttgtttgcaaaaagaagatggcaacatcgccggatatgctttgttgtttttgtccccctcctttcaaacaatttcttgagatcgtggtaaatatgaaatttgatgaagaacccaactatggaaagttagtatctctgtttcaagacctcttgggcgaaaatccggcaattaggcctataaacacagagggtgctcaaaagatcatattccaagttggccagaagcgaggtaggttgagcattggggaggaagaagaagatgcccctaggaaaaaggtccgtctaggagtccctgcaacgcaatggatatcgatttacaatgccaggcaaccaatgaagcagaggtatcattataatgtggctgatataagactggcacagcatattgagagaggtattgcagatggtttgttgataagctgtgtatcatcatgttcgaatctctgggcattgataatggatgctggaactggcttcacgcaccaagtctatgaactctctcctgtattcttgcacaaggaatggattatggagcagtgggagaagaactactacattagttctattgctggtgcaagcaatggaagctccttagttgtcatgtcaaaaggtacgcagtatacacagcagtcttacaaagtaagcgattcattcccgttcaagtggataaacaagaaatggagagaaggcttccatgtaacctcaatggcaacagctggaaatcgatggggtgttgttatgtcccgcaattctggctacagtgaacaggttgtggaacttgattttctgtatccaagtgaaggcatccacaggcgttgggatggtggattcagaatcacatcaacagcagccacaaccgatcaagctgctctcatcctaagcatcccacgtcgtagacttgttgatgagacacaagagacgttacgtacctctcaattccccagcacacacgtcaaggaaaaatggggaaagaatctctaccttgcatcgttaagctatggccgaactgtatcttgagacttattagtaaaaactgttgaaggacgagagaaatatgtttctaagtctcggctcctattccttatccaaccctatggcctctcaggctctgttgtgcttcttcttttttttcagttgaattgtgaagcaaaaatgtggtgattgtgttgtttattccccccttgtgaaggggattgagccataatcaccagtttacctacacatttccctcgaaattgctatatttaatttttaaatcaagaaaagatatttttgtcaccaaatattctatagttgtccaattctgtaacctaattatcgaattcat

SEQ ID NO: 46524 - protein, 703 aa, Arabidopsis thaliana
  peptide (1)..(703): Ceres Seq. ID no. 13592025
  misc_feature (136)..(435): Homolog of NCBI NO: 25287608 NR Description: probable casein kinase I [imported] - Arabidopsis
  misc_feature (112)..(703): Homolog of NCBI NO: 18139937 NR Description: serine/threonine protein kinase [Chlamydomonas
  misc_feature (239)..(702): Homolog of NCBI NO: 6006848 NR Description: unknown protein, 5' partial [Arabidopsis thaliana]
  misc_feature (71)..(703): Homolog of NCBI NO: 34903604 NR Description: casein kinase-like protein
  misc_feature (1)..(702): Homolog of NCBI NO: 34394436 NR Description: putative casein kinase 1, delta isoform 1
  misc_feature (1)..(702): Homolog of NCBI NO: 28269422 NR Description: putative serine/threonine protein kinase
  misc_feature (1)..(702): Homolog of NCBI NO: 15228670 NR Description: casein kinase -related [Arabidopsis thaliana]
  misc_feature (1)..(703): Homolog of NCBI NO: 34909952 NR Description: putative casein kinase [Oryza sativa (japonica
  misc_feature (1)..(702): Homolog of NCBI NO: 15238765 NR Description: casein kinase-related protein [Arabidopsis
  misc_feature (37)..(703): Homolog of NCBI NO: 30682888 NR Description: protein kinase family [Arabidopsis thaliana]
  misc_feature (136)..(435): Homolog of NCBI NO: 25287608 NR Description: probable casein kinase I [imported] - Arabidopsis
  misc_feature (112)..(703): Homolog of NCBI NO: 18139937 NR Description: serine/threonine protein kinase [Chlamydomonas
  misc_feature (239)..(702): Homolog of NCBI NO: 6006848 NR Description: unknown protein, 5' partial [Arabidopsis thaliana]
  misc_feature (71)..(703): Homolog of NCBI NO: 34903604 NR Description: casein kinase-like protein
  misc_feature (1)..(702): Homolog of NCBI NO: 34394436 NR Description: putative casein kinase 1, delta isoform 1
  misc_feature (1)..(702): Homolog of NCBI NO: 28269422 NR Description: putative serine/threonine protein kinase
  misc_feature (1)..(702): Homolog of NCBI NO: 15228670 NR Description: casein kinase -related [Arabidopsis thaliana]
  misc_feature (1)..(703): Homolog of NCBI NO: 34909952 NR Description: putative casein kinase [Oryza sativa (japonica
  misc_feature (1)..(702): Homolog of NCBI NO: 15238765 NR Description: casein kinase-related protein [Arabidopsis
  misc_feature (37)..(703): Homolog of NCBI NO: 30682888 NR Description: protein kinase family [Arabidopsis thaliana]
  misc_feature (136)..(435): Homolog of NCBI NO: 25287608 NR Description: probable casein kinase I [imported] - Arabidopsis
  misc_feature (112)..(703): Homolog of NCBI NO: 18139937 NR Description: serine/threonine protein kinase [Chlamydomonas
  misc_feature (239)..(702): Homolog of NCBI NO: 6006848 NR Description: unknown protein, 5' partial [Arabidopsis thaliana]
  misc_feature (71)..(703): Homolog of NCBI NO: 34903604 NR Description: casein kinase-like protein
  misc_feature (1)..(702): Homolog of NCBI NO: 34394436 NR Description: putative casein kinase 1, delta isoform 1
  misc_feature (1)..(702): Homolog of NCBI NO: 28269422 NR Description: putative serine/threonine protein kinase
  misc_feature (1)..(702): Homolog of NCBI NO: 15228670 NR Description: casein kinase -related [Arabidopsis thaliana]
  misc_feature (1)..(703): Homolog of NCBI NO: 34909952 NR Description: putative casein kinase [Oryza sativa (japonica
  misc_feature (1)..(702): Homolog of NCBI NO: 15238765 NR Description: casein kinase-related protein [Arabidopsis
  misc_feature (37)..(703): Homolog of NCBI NO: 30682888 NR Description: protein kinase family [Arabidopsis thaliana]
MPELRRGVRRGRVTDAVAPNQLPQTPTEKKPKKSTVKAPKPVAGGVTGVAERPRTRLAARKLKEEDKEIPQEIPVVVPSKDSDIDKNKGKEVVVEEEKKDMAIGNDSGGSNKAAAQEEEGNTAPFPERVQVGGSPLYKVERKLGKGGFGQVFVGRRISGGNDRSAGASILEVALKFEHRSSKGCNYGPPHEWQVYNTLGGSHGVPRVHFKGRQGDYYVMVMDMLGPSLWDLWNTSGQAMSSEMVACIAVESLSILEKMHAKGYVHGDVKPENFLLGQPSTSQEKKLFLVDLGLATKWREGGSGQHVEYDQRPDMFRGTVRYASAHAHLGRTASRRDDLESLAYTLIFLHRGRLPWQGYQGDNKSFLVCKKKMATSPDMLCCFCPPPFKQFLEIVVNMKFDEEPNYGKLVSLFQDLLGENPAIRPINTEGAQKIIFQVGQKRGRLSIGEEEEDAPRKKVRLGVPATQWISIYNARQPMKQRYHYNVADIRLAQHIERGIADGLLISCVSSCSNLWALIMDAGTGFTHQVYELSPVFLHKEWIMEQWEKNYYISSIAGASNGSSLVVMSKGTQYTQQSYKVSDSFPFKWINKKWREGFHVTSMATAGNRWGVVMSRNSGYSEQVVELDFLYPSEGIHRRWDGGFRITSTAATTDQAALILSIPRRRLVDETQETLRTSQFPSTHVKEKWGKNLYLASLSYGRTVS

SEQ ID NO: 46525 - protein, 603 aa, Arabidopsis thaliana
  peptide (1)..(603): Ceres Seq. ID no. 13592026
  misc_feature (36)..(335): Homolog of NCBI NO: 25287608 NR Description: probable casein kinase I [imported] - Arabidopsis
  misc_feature (12)..(603): Homolog of NCBI NO: 18139937 NR Description: serine/threonine protein kinase [Chlamydomonas
  misc_feature (139)..(602): Homolog of NCBI NO: 6006848 NR Description: unknown protein, 5' partial [Arabidopsis thaliana]
  misc_feature (1)..(603): Homolog of NCBI NO: 34903604 NR Description: casein kinase-like protein
  misc_feature (1)..(602): Homolog of NCBI NO: 34394436 NR Description: putative casein kinase 1, delta isoform 1
  misc_feature (1)..(602): Homolog of NCBI NO: 28269422 NR Description: putative serine/threonine protein kinase
  misc_feature (1)..(602): Homolog of NCBI NO: 15228670 NR Description: casein kinase -related [Arabidopsis thaliana]
  misc_feature (1)..(603): Homolog of NCBI NO: 34909952 NR Description: putative casein kinase [Oryza sativa (japonica
  misc_feature (1)..(602): Homolog of NCBI NO: 15238765 NR Description: casein kinase-related protein [Arabidopsis
  misc_feature (1)..(603): Homolog of NCBI NO: 30682888 NR Description: protein kinase family [Arabidopsis thaliana]
  misc_feature (36)..(335): Homolog of NCBI NO: 25287608 NR Description: probable casein kinase I [imported] - Arabidopsis
  misc_feature (12)..(603): Homolog of NCBI NO: 18139937 NR Description: serine/threonine protein kinase [Chlamydomonas
  misc_feature (139)..(602): Homolog of NCBI NO: 6006848 NR Description: unknown protein, 5' partial [Arabidopsis thaliana]
  misc_feature (1)..(603): Homolog of NCBI NO: 34903604 NR Description: casein kinase-like protein
  misc_feature (1)..(602): Homolog of NCBI NO: 34394436 NR Description: putative casein kinase 1, delta isoform 1
  misc_feature (1)..(602): Homolog of NCBI NO: 28269422 NR Description: putative serine/threonine protein kinase
  misc_feature (1)..(602): Homolog of NCBI NO: 15228670 NR Description: casein kinase -related [Arabidopsis thaliana]
  misc_feature (1)..(603): Homolog of NCBI NO: 34909952 NR Description: putative casein kinase [Oryza sativa (japonica
  misc_feature (1)..(602): Homolog of NCBI NO: 15238765 NR Description: casein kinase-related protein [Arabidopsis
  misc_feature (1)..(603): Homolog of NCBI NO: 30682888 NR Description: protein kinase family [Arabidopsis thaliana]
  misc_feature (36)..(335): Homolog of NCBI NO: 25287608 NR Description: probable casein kinase I [imported] - Arabidopsis
  misc_feature (12)..(603): Homolog of NCBI NO: 18139937 NR Description: serine/threonine protein kinase [Chlamydomonas
  misc_feature (139)..(602): Homolog of NCBI NO: 6006848 NR Description: unknown protein, 5' partial [Arabidopsis thaliana]
  misc_feature (1)..(603): Homolog of NCBI NO: 34903604 NR Description: casein kinase-like protein
  misc_feature (1)..(602): Homolog of NCBI NO: 34394436 NR Description: putative casein kinase 1, delta isoform 1
  misc_feature (1)..(602): Homolog of NCBI NO: 28269422 NR Description: putative serine/threonine protein kinase
  misc_feature (1)..(602): Homolog of NCBI NO: 15228670 NR Description: casein kinase -related [Arabidopsis thaliana]
  misc_feature (1)..(603): Homolog of NCBI NO: 34909952 NR Description: putative casein kinase [Oryza sativa (japonica
  misc_feature (1)..(602): Homolog of NCBI NO: 15238765 NR Description: casein kinase-related protein [Arabidopsis
  misc_feature (1)..(603): Homolog of NCBI NO: 30682888 NR Description: protein kinase family [Arabidopsis thaliana]
MAIGNDSGGSNKAAAQEEEGNTAPFPERVQVGGSPLYKVERKLGKGGFGQVFVGRRISGGNDRSAGASILEVALKFEHRSSKGCNYGPPHEWQVYNTLGGSHGVPRVHFKGRQGDYYVMVMDMLGPSLWDLWNTSGQAMSSEMVACIAVESLSILEKMHAKGYVHGDVKPENFLLGQPSTSQEKKLFLVDLGLATKWREGGSGQHVEYDQRPDMFRGTVRYASAHAHLGRTASRRDDLESLAYTLIFLHRGRLPWQGYQGDNKSFLVCKKKMATSPDMLCCFCPPPFKQFLEIVVNMKFDEEPNYGKLVSLFQDLLGENPAIRPINTEGAQKIIFQVGQKRGRLSIGEEEEDAPRKKVRLGVPATQWISIYNARQPMKQRYHYNVADIRLAQHIERGIADGLLISCVSSCSNLWALIMDAGTGFTHQVYELSPVFLHKEWIMEQWEKNYYISSIAGASNGSSLVVMSKGTQYTQQSYKVSDSFPFKWINKKWREGFHVTSMATAGNRWGVVMSRNSGYSEQVVELDFLYPSEGIHRRWDGGFRITSTAATTDQAALILSIPRRRLVDETQETLRTSQFPSTHVKEKWGKNLYLASLSYGRTVS

SEQ ID NO: 46526 - protein, 485 aa, Arabidopsis thaliana
  peptide (1)..(485): Ceres Seq. ID no. 13592027
  misc_feature (1)..(217): Homolog of NCBI NO: 25287608 NR Description: probable casein kinase I [imported] - Arabidopsis
  misc_feature (1)..(485): Homolog of NCBI NO: 18139937 NR Description: serine/threonine protein kinase [Chlamydomonas
  misc_feature (21)..(484): Homolog of NCBI NO: 6006848 NR Description: unknown protein, 5' partial [Arabidopsis thaliana]
  misc_feature (1)..(485): Homolog of NCBI NO: 34903604 NR Description: casein kinase-like protein
  misc_feature (1)..(484): Homolog of NCBI NO: 34394436 NR Description: putative casein kinase 1, delta isoform 1
  misc_feature (1)..(484): Homolog of NCBI NO: 28269422 NR Description: putative serine/threonine protein kinase
  misc_feature (1)..(484): Homolog of NCBI NO: 15228670 NR Description: casein kinase -related [Arabidopsis thaliana]
  misc_feature (1)..(485): Homolog of NCBI NO: 34909952 NR Description: putative casein kinase [Oryza sativa (japonica
  misc_feature (1)..(484): Homolog of NCBI NO: 15238765 NR Description: casein kinase-related protein [Arabidopsis
  misc_feature (1)..(485): Homolog of NCBI NO: 30682888 NR Description: protein kinase family [Arabidopsis thaliana]
  misc_feature (1)..(217): Homolog of NCBI NO: 25287608 NR Description: probable casein kinase I [imported] - Arabidopsis
  misc_feature (1)..(485): Homolog of NCBI NO: 18139937 NR Description: serine/threonine protein kinase [Chlamydomonas
  misc_feature (21)..(484): Homolog of NCBI NO: 6006848 NR Description: unknown protein, 5' partial [Arabidopsis thaliana]
  misc_feature (1)..(485): Homolog of NCBI NO: 34903604 NR Description: casein kinase-like protein
  misc_feature (1)..(484): Homolog of NCBI NO: 34394436 NR Description: putative casein kinase 1, delta isoform 1
  misc_feature (1)..(484): Homolog of NCBI NO: 28269422 NR Description: putative serine/threonine protein kinase
  misc_feature (1)..(484): Homolog of NCBI NO: 15228670 NR Description: casein kinase -related [Arabidopsis thaliana]
  misc_feature (1)..(485): Homolog of NCBI NO: 34909952 NR Description: putative casein kinase [Oryza sativa (japonica
  misc_feature (1)..(484): Homolog of NCBI NO: 15238765 NR Description: casein kinase-related protein [Arabidopsis
  misc_feature (1)..(485): Homolog of NCBI NO: 30682888 NR Description: protein kinase family [Arabidopsis thaliana]
  misc_feature (1)..(217): Homolog of NCBI NO: 25287608 NR Description: probable casein kinase I [imported] - Arabidopsis
  misc_feature (1)..(485): Homolog of NCBI NO: 18139937 NR Description: serine/threonine protein kinase [Chlamydomonas
  misc_feature (21)..(484): Homolog of NCBI NO: 6006848 NR Description: unknown protein, 5' partial [Arabidopsis thaliana]
  misc_feature (1)..(485): Homolog of NCBI NO: 34903604 NR Description: casein kinase-like protein
  misc_feature (1)..(484): Homolog of NCBI NO: 34394436 NR Description: putative casein kinase 1, delta isoform 1
  misc_feature (1)..(484): Homolog of NCBI NO: 28269422 NR Description: putative serine/threonine protein kinase
  misc_feature (1)..(484): Homolog of NCBI NO: 15228670 NR Description: casein kinase -related [Arabidopsis thaliana]
  misc_feature (1)..(485): Homolog of NCBI NO: 34909952 NR Description: putative casein kinase [Oryza sativa (japonica
  misc_feature (1)..(484): Homolog of NCBI NO: 15238765 NR Description: casein kinase-related protein [Arabidopsis
  misc_feature (1)..(485): Homolog of NCBI NO: 30682888 NR Description: protein kinase family [Arabidopsis thaliana]
MVMDMLGPSLWDLWNTSGQAMSSEMVACIAVESLSILEKMHAKGYVHGDVKPENFLLGQPSTSQEKKLFLVDLGLATKWREGGSGQHVEYDQRPDMFRGTVRYASAHAHLGRTASRRDDLESLAYTLIFLHRGRLPWQGYQGDNKSFLVCKKKMATSPDMLCCFCPPPFKQFLEIVVNMKFDEEPNYGKLVSLFQDLLGENPAIRPINTEGAQKIIFQVGQKRGRLSIGEEEEDAPRKKVRLGVPATQWISIYNARQPMKQRYHYNVADIRLAQHIERGIADGLLISCVSSCSNLWALIMDAGTGFTHQVYELSPVFLHKEWIMEQWEKNYYISSIAGASNGSSLVVMSKGTQYTQQSYKVSDSFPFKWINKKWREGFHVTSMATAGNRWGVVMSRNSGYSEQVVELDFLYPSEGIHRRWDGGFRITSTAATTDQAALILSIPRRRLVDETQETLRTSQFPSTHVKEKWGKNLYLASLSYGRTVS

SEQ ID NO: 46527 - DNA, 2765 bp, Arabidopsis thaliana
  misc_feature (1)..(2765): Ceres Seq. ID no. 13579248
  misc_feature: MA Experiment ID: 20000307 Result: Up-regulated in Transcription
  misc_feature: MA Experiment 20000307 PARAMETER Experiment Name: At_Germinating_Seeds_Sub_P Parameter: Age (hr) Value: 24 vs. 0
  misc_feature: MA Experiment 20000307 PARAMETER Experiment Name: At_Germinating_Seeds_Sub_P Parameter: Organism Value: A. thaliana
  misc_feature: MA Experiment 20000307 PARAMETER Experiment Name: At_Germinating_Seeds_Sub_P Parameter: Plant Line Value: WS
  misc_feature: MA Experiment 20000307 PARAMETER Experiment Name: At_Germinating_Seeds_Sub_P Parameter: Tissue Value: Germinating Seeds
  misc_feature: MA Experiment ID: 20000315 Result: Down-regulated in Transcription
  misc_feature: MA Experiment 20000315 PARAMETER Experiment Name: At_14day_Shoots-Roots_Sub_P Parameter: Age (day) Value: 14
  misc_feature: MA Experiment 20000315 PARAMETER Experiment Name: At_14day_Shoots-Roots_Sub_P Parameter: Organism Value: A. thaliana
  misc_feature: MA Experiment 20000315 PARAMETER Experiment Name: At_14day_Shoots-Roots_Sub_P Parameter: Plant Line Value: WS
  misc_feature: MA Experiment 20000315 PARAMETER Experiment Name: At_14day_Shoots-Roots_Sub_P Parameter: Tissue Value: Shoots vs. Whole Plant
  misc_feature: MA Experiment ID: 20000327 Result: Down-regulated in Transcription
  misc_feature: MA Experiment 20000327 PARAMETER Experiment Name: At_42deg_Heat_Sub_P Parameter: Age (day) Value: 14
  misc_feature: MA Experiment 20000327 PARAMETER Experiment Name: At_42deg_Heat_Sub_P Parameter: Organism Value: A. thaliana
  misc_feature: MA Experiment 20000327 PARAMETER Experiment Name: At_42deg_Heat_Sub_P Parameter: Plant Line Value: WS
  misc_feature: MA Experiment 20000327 PARAMETER Experiment Name: At_42deg_Heat_Sub_P Parameter: Temperature (deg C) Value: 42 vs. 22
  misc_feature: MA Experiment 20000327 PARAMETER Experiment Name: At_42deg_Heat_Sub_P Parameter: Timepoint (hr) Value: 1
  misc_feature: MA Experiment 20000327 PARAMETER Experiment Name: At_42deg_Heat_Sub_P Parameter: Tissue Value: Aerial
  misc_feature: MA Experiment ID: 20000328 Result: Down-regulated in Transcription
  misc_feature: MA Experiment 20000328 PARAMETER Experiment Name: At_42deg_Heat_Sub_P Parameter: Age (day) Value: 14
  misc_feature: MA Experiment 20000328 PARAMETER Experiment Name: At_42deg_Heat_Sub_P Parameter: Organism Value: A. thaliana
  misc_feature: MA Experiment 20000328 PARAMETER Experiment Name: At_42deg_Heat_Sub_P Parameter: Plant Line Value: WS
  misc_feature: MA Experiment 20000328 PARAMETER Experiment Name: At_42deg_Heat_Sub_P Parameter: Temperature (deg C) Value: 42 vs. 22
  misc_feature: MA Experiment 20000328 PARAMETER Experiment Name: At_42deg_Heat_Sub_P Parameter: Timepoint (hr) Value: 6
  misc_feature: MA Experiment 20000328 PARAMETER Experiment Name: At_42deg_Heat_Sub_P Parameter: Tissue Value: Aerial
atggagcagaagagcgtgttgttgtcagctttaggtgttggtgttgggttagggattgggttagcatcaggtcaaagtttgggaagatgggcaaacgggtcaggttctgttgaagatggactcaccggagaacagattgagcaagagttgattagacaaattgttgatggtagagaaagtactgtcacttttgaagagtttccgtatttcttaagcaagagaactcgagaattgttgacaagtgttgcatatgttcatttaaaagagtatgatatatcgaagcacactcggaatcttgcacctgcaagtaaagccattctactttctggtcctgcggaattttatcagcaaatgcttgcaaaagctttgtctcattactttgaatcaaagctattgttgttagatataactgacttctctattaagatacagagtaaatatggatgcaccaagagagaaccttttcacaagaggtctatttctgagttaacattagataaagtgtcgagtttgatgggttccttctctatgctctctcaacgcgaagttgaaccaagagggacattgcgtcgacacaccagtggaaatgatcttaaatcaaggagtactgagagctctaatcgtcttccaagacacaagagaaatgcttctgctgcttctgatatcagtagcatatcttcccgctcttcgagttctgtttcagcttccagaaaacgcactacaaatctatgtttcgacgagaaacttttcctgcaatcactttacaaggtcttgagttctgtatcggaaacaactccgctaatcatatacttgagagatgttgagaagcttcttgagtcagaaagattctacaagttgttccaaaggctcttgaacaagctctctggtcctgtcttaattcttggctcaagagtattagaacctgaagatgattgccaagaagtagacgaaagtatttccgctctatttccttacaacatcgagatcagaccaccagaagatgaatctcagctcgtgagctggaaatctcggttagaagacgacatgaaaatgattcagtttcaagacaacaagaaccacattgcagaggttcttgctgctaatgatatccaatgcgatgacttgtcttcgatatgccacgcagatacaatgtgtttgagtaaccatattgaggaaattgtggtttctgcaatcacttatcatttgatacacaccaaagaaccagaatacagaaacggaaagcttgtaatatcttccaaaagtttgtctcatggactaagtatattccaagaaggtggaaacagatcatttgaagactcgttgaagctagatacaaacactgactctaagcgaaaaggaggagaagtatgttcaaagagtgagtcaaaatctggtcctgaaaacaaaaacgagtcagaaatatcacttccttcaaacaagaatgacaatccattacctccaaaagcacctgaggttgttcctgataatgagtttgagaagcgtataagaccagaagttataccagcaaatgagattggtgtgacatttgcagatattggttctctagacgaaacaaaagattcgcttcaagaacttgtaatgcttccacttagaagaccggatctttttcaaggcggtcttctcaagccatgtagaggaatcctattattcggtccacctggtactggcaaaacaatgcttgcaaaagcaattgcaaatgaagctggagctagtttcatcaatgtctccatgtctacaatcacttcaaaatggtttggagaagacgaaaagaatgtgagagctctgtttactttagcagctaaagtatctccaacgattatatttgtggatgaagttgatagtatgttgggacaaaggacaagagttggagagcatgaagctatgaggaagattaagaatgagtttatgacacattgggatgggctaatgacgaaacccggtgaaaggattctcgttcttgcagcgacaaacagaccgtttgatcttgatgaagctatcattaggaggtttgagagaagaataatggtgggacttccttcgattgagagcagagagaagatcttgagaactttgttgtcgaaagagaaaacagagaatcttgatttccatgagcttgggcagataacagaaggctacagtggaagtgatctcaagaacttatgcatcacagctgcttatagaccagttagagagctgattcagcaggaaagattgaaagatcaggagaggaagaagagagaagaagcaggaaaaggcacagaagaatcaaaagaagaagaagcagaagcttctgaggaaagagttattacattgagacctttgaacatggaagacatgagaaaagctaaaaaccaggtagctgcgagttttgcatcagaaggagcaggaatgaatgagctaaagcaatggaatgatttgtatggagaaggaggctcaaggaaaaaggaacagctcacttacttcctctgaaaattgcaaacagatattgatgtgtgtttcttgatgcacacgatatatatataacaaagagatcccgcatatcacaaagaaagagtcttcaattacttgttaggccattccatttttagataactttttaggtttcatcttattctctttctttttgtgttttatagaattttctacaaaactatgatttttttttatatgttcatatttatgtcattgtgaatgtgtagttaatgtagtaaagatattttataaaaatattatgattgtttgtt

SEQ ID NO: 46528 - protein, 829 aa, Arabidopsis thaliana
  peptide (1)..(829): Ceres Seq. ID no. 13579249
  misc_feature (553)..(737): Pfam Name: ATPase family associated with various cellular Pfam Description: ATPase family associated with various cellular
  misc_feature (553)..(737): Pfam Name: ATPase family associated with various cellular Pfam Description: ATPase family associated with various cellular
  misc_feature (553)..(737): Pfam Name: ATPase family associated with various cellular Pfam Description: ATPase family associated with various cellular
  misc_feature (1)..(448): Homolog of NCBI NO: 34912822 NR Description: P0501G01.20 [Oryza sativa (japonica
  misc_feature (1)..(116): Homolog of NCBI NO: 15234347 NR Description: hypothetical protein [Arabidopsis thaliana]
  misc_feature (440)..(829): Homolog of NCBI NO: 15234347 NR Description: hypothetical protein [Arabidopsis thaliana]
  misc_feature (745)..(829): Homolog of NCBI NO: 25404926 NR Description: protein F22C12.12 [imported] - Arabidopsis
  misc_feature (160)..(750): Homolog of NCBI NO: 25404926 NR Description: protein F22C12.12 [imported] - Arabidopsis
  misc_feature (1)..(448): Homolog of NCBI NO: 34912822 NR Description: P0501G01.20 [Oryza sativa (japonica
  misc_feature (440)..(829): Homolog of NCBI NO: 15234347 NR Description: hypothetical protein [Arabidopsis thaliana]
  misc_feature (160)..(750): Homolog of NCBI NO: 25404926 NR Description: protein F22C12.12 [imported] - Arabidopsis
  misc_feature (745)..(829): Homolog of NCBI NO: 25404926 NR Description: protein F22C12.12 [imported] - Arabidopsis
  misc_feature (440)..(829): Homolog of NCBI NO: 15234347 NR Description: hypothetical protein [Arabidopsis thaliana]
  misc_feature (1)..(116): Homolog of NCBI NO: 15234347 NR Description: hypothetical protein [Arabidopsis thaliana]
  misc_feature (1)..(448): Homolog of NCBI NO: 34912822 NR Description: P0501G01.20 [Oryza sativa (japonica
  misc_feature (1)..(829): Homolog of NCBI NO: 30696968 NR Description: expressed protein [Arabidopsis thaliana]
  misc_feature (6)..(829): Homolog of NCBI NO: 18407974 NR Description: expressed protein [Arabidopsis thaliana]
  misc_feature (8)..(725): Homolog of NCBI NO: 34904204 NR Description: P0492F05.26 [Oryza sativa (japonica
  misc_feature (733)..(829): Homolog of NCBI NO: 34904204 NR Description: P0492F05.26 [Oryza sativa (japonica
  misc_feature (1)..(747): Homolog of NCBI NO: 17065032 NR Description: similar to homeobox protein [Arabidopsis thaliana]
  misc_feature (1)..(829): Homolog of NCBI NO: 30696968 NR Description: expressed protein [Arabidopsis thaliana]
  misc_feature (6)..(829): Homolog of NCBI NO: 18407974 NR Description: expressed protein [Arabidopsis thaliana]
  misc_feature (8)..(725): Homolog of NCBI NO: 34904204 NR Description: P0492F05.26 [Oryza sativa (japonica
  misc_feature (733)..(829): Homolog of NCBI NO: 34904204 NR Description: P0492F05.26 [Oryza sativa (japonica
  misc_feature (1)..(747): Homolog of NCBI NO: 17065032 NR Description: similar to homeobox protein [Arabidopsis thaliana]
  misc_feature (160)..(750): Homolog of NCBI NO: 25404926 NR Description: protein F22C12.12 [imported] - Arabidopsis
  misc_feature (745)..(829): Homolog of NCBI NO: 25404926 NR Description: protein F22C12.12 [imported] - Arabidopsis
  misc_feature (1)..(116): Homolog of NCBI NO: 15234347 NR Description: hypothetical protein [Arabidopsis thaliana]
  misc_feature (1)..(747): Homolog of NCBI NO: 17065032 NR Description: similar to homeobox protein [Arabidopsis thaliana]
  misc_feature (733)..(829): Homolog of NCBI NO: 34904204 NR Description: P0492F05.26 [Oryza sativa (japonica
  misc_feature (8)..(725): Homolog of NCBI NO: 34904204 NR Description: P0492F05.26 [Oryza sativa (japonica
  misc_feature (6)..(829): Homolog of NCBI NO: 18407974 NR Description: expressed protein [Arabidopsis thaliana]
  misc_feature (1)..(829): Homolog of NCBI NO: 30696968 NR Description: expressed protein [Arabidopsis thaliana]
MEQKSVLLSALGVGVGLGIGLASGQSLGRWANGSGSVEDGLTGEQIEQELIRQIVDGRESTVTFEEFPYFLSKRTRELLTSVAYVHLKEYDISKHTRNLAPASKAILLSGPAEFYQQMLAKALSHYFESKLLLLDITDFSIKIQSKYGCTKREPFHKRSISELTLDKVSSLMGSFSMLSQREVEPRGTLRRHTSGNDLKSRSTESSNRLPRHKRNASAASDISSISSRSSSSVSASRKRTTNLCFDEKLFLQSLYKVLSSVSETTPLIIYLRDVEKLLESERFYKLFQRLLNKLSGPVLILGSRVLEPEDDCQEVDESISALFPYNIEIRPPEDESQLVSWKSRLEDDMKMIQFQDNKNHIAEVLAANDIQCDDLSSICHADTMCLSNHIEEIVVSAITYHLIHTKEPEYRNGKLVISSKSLSHGLSIFQEGGNRSFEDSLKLDTNTDSKRKGGEVCSKSESKSGPENKNESEISLPSNKNDNPLPPKAPEVVPDNEFEKRIRPEVIPANEIGVTFADIGSLDETKDSLQELVMLPLRRPDLFQGGLLKPCRGILLFGPPGTGKTMLAKAIANEAGASFINVSMSTITSKWFGEDEKNVRALFTLAAKVSPTIIFVDEVDSMLGQRTRVGEHEAMRKIKNEFMTHWDGLMTKPGERILVLAATNRPFDLDEAIIRRFERRIMVGLPSIESREKILRTLLSKEKTENLDFHELGQITEGYSGSDLKNLCITAAYRPVRELIQQERLKDQERKKREEAGKGTEESKEEEAEASEERVITLRPLNMEDMRKAKNQVAASFASEGAGMNELKQWNDLYGEGGSRKKEQLTYFL

SEQ ID NO: 46529 - protein, 712 aa, Arabidopsis thaliana
  peptide (1)..(712): Ceres Seq. ID no. 13579250
  misc_feature (436)..(620): Pfam Name: ATPase family associated with various cellular Pfam Description: ATPase family associated with various cellular
  misc_feature (436)..(620): Pfam Name: ATPase family associated with various cellular Pfam Description: ATPase family associated with various cellular
  misc_feature (436)..(620): Pfam Name: ATPase family associated with various cellular Pfam Description: ATPase family associated with various cellular
  misc_feature (323)..(694): Homolog of NCBI NO: 34912822 NR Description: P0501G01.20 [Oryza sativa (japonica
  misc_feature (1)..(331): Homolog of NCBI NO: 34912822 NR Description: P0501G01.20 [Oryza sativa (japonica
  misc_feature (323)..(712): Homolog of NCBI NO: 15234347 NR Description: hypothetical protein [Arabidopsis thaliana]
  misc_feature (628)..(712): Homolog of NCBI NO: 25404926 NR Description: protein F22C12.12 [imported] - Arabidopsis
  misc_feature (43)..(633): Homolog of NCBI NO: 25404926 NR Description: protein F22C12.12 [imported] - Arabidopsis
  misc_feature (323)..(694): Homolog of NCBI NO: 34912822 NR Description: P0501G01.20 [Oryza sativa (japonica
  misc_feature (323)..(712): Homolog of NCBI NO: 15234347 NR Description: hypothetical protein [Arabidopsis thaliana]
  misc_feature (43)..(633): Homolog of NCBI NO: 25404926 NR Description: protein F22C12.12 [imported] - Arabidopsis
  misc_feature (628)..(712): Homolog of NCBI NO: 25404926 NR Description: protein F22C12.12 [imported] - Arabidopsis
  misc_feature (323)..(712): Homolog of NCBI NO: 15234347 NR Description: hypothetical protein [Arabidopsis thaliana]
  misc_feature (1)..(331): Homolog of NCBI NO: 34912822 NR Description: P0501G01.20 [Oryza sativa (japonica
  misc_feature (323)..(694): Homolog of NCBI NO: 34912822 NR Description: P0501G01.20 [Oryza sativa (japonica
  misc_feature (1)..(712): Homolog of NCBI NO: 30696968 NR Description: expressed protein [Arabidopsis thaliana]
  misc_feature (1)..(712): Homolog of NCBI NO: 18407974 NR Description: expressed protein [Arabidopsis thaliana]
  misc_feature (1)..(608): Homolog of NCBI NO: 34904204 NR Description: P0492F05.26 [Oryza sativa (japonica
  misc_feature (616)..(712): Homolog of NCBI NO: 34904204 NR Description: P0492F05.26 [Oryza sativa (japonica
  misc_feature (1)..(630): Homolog of NCBI NO: 17065032 NR Description: similar to homeobox protein [Arabidopsis thaliana]
  misc_feature (1)..(712): Homolog of NCBI NO: 30696968 NR Description: expressed protein [Arabidopsis thaliana]
  misc_feature (1)..(712): Homolog of NCBI NO: 18407974 NR Description: expressed protein [Arabidopsis thaliana]
  misc_feature (1)..(608): Homolog of NCBI NO: 34904204 NR Description: P0492F05.26 [Oryza sativa (japonica
  misc_feature (616)..(712): Homolog of NCBI NO: 34904204 NR Description: P0492F05.26 [Oryza sativa (japonica
  misc_feature (1)..(630): Homolog of NCBI NO: 17065032 NR Description: similar to homeobox protein [Arabidopsis thaliana]
  misc_feature (43)..(633): Homolog of NCBI NO: 25404926 NR Description: protein F22C12.12 [imported] - Arabidopsis
  misc_feature (628)..(712): Homolog of NCBI NO: 25404926 NR Description: protein F22C12.12 [imported] - Arabidopsis
  misc_feature (1)..(331): Homolog of NCBI NO: 34912822 NR Description: P0501G01.20 [Oryza sativa (japonica
  misc_feature (1)..(630): Homolog of NCBI NO: 17065032 NR Description: similar to homeobox protein [Arabidopsis thaliana]
  misc_feature (616)..(712): Homolog of NCBI NO: 34904204 NR Description: P0492F05.26 [Oryza sativa (japonica
  misc_feature (1)..(608): Homolog of NCBI NO: 34904204 NR Description: P0492F05.26 [Oryza sativa (japonica
  misc_feature (1)..(712): Homolog of NCBI NO: 18407974 NR Description: expressed protein [Arabidopsis thaliana]
  misc_feature (1)..(712): Homolog of NCBI NO: 30696968 NR Description: expressed protein [Arabidopsis thaliana]
MLAKALSHYFESKLLLLDITDFSIKIQSKYGCTKREPFHKRSISELTLDKVSSLMGSFSMLSQREVEPRGTLRRHTSGNDLKSRSTESSNRLPRHKRNASAASDISSISSRSSSSVSASRKRTTNLCFDEKLFLQSLYKVLSSVSETTPLIIYLRDVEKLLESERFYKLFQRLLNKLSGPVLILGSRVLEPEDDCQEVDESISALFPYNIEIRPPEDESQLVSWKSRLEDDMKMIQFQDNKNHIAEVLAANDIQCDDLSSICHADTMCLSNHIEEIVVSAITYHLIHTKEPEYRNGKLVISSKSLSHGLSIFQEGGNRSFEDSLKLDTNTDSKRKGGEVCSKSESKSGPENKNESEISLPSNKNDNPLPPKAPEVVPDNEFEKRIRPEVIPANEIGVTFADIGSLDETKDSLQELVMLPLRRPDLFQGGLLKPCRGILLFGPPGTGKTMLAKAIANEAGASFINVSMSTITSKWFGEDEKNVRALFTLAAKVSPTIIFVDEVDSMLGQRTRVGEHEAMRKIKNEFMTHWDGLMTKPGERILVLAATNRPFDLDEAIIRRFERRIMVGLPSIESREKILRTLLSKEKTENLDFHELGQITEGYSGSDLKNLCITAAYRPVRELIQQERLKDQERKKREEAGKGTEESKEEEAEASEERVITLRPLNMEDMRKAKNQVAASFASEGAGMNELKQWNDLYGEGGSRKKEQLTYFL

SEQ ID NO: 46530 - protein, 658 aa, Arabidopsis thaliana
  peptide (1)..(658): Ceres Seq. ID no. 13579251
  misc_feature (382)..(566): Pfam Name: ATPase family associated with various cellular Pfam Description: ATPase family associated with various cellular
  misc_feature (382)..(566): Pfam Name: ATPase family associated with various cellular Pfam Description: ATPase family associated with various cellular
  misc_feature (382)..(566): Pfam Name: ATPase family associated with various cellular Pfam Description: ATPase family associated with various cellular
  misc_feature (269)..(640): Homolog of NCBI NO: 34912822 NR Description: P0501G01.20 [Oryza sativa (japonica
  misc_feature (1)..(277): Homolog of NCBI NO: 34912822 NR Description: P0501G01.20 [Oryza sativa (japonica
  misc_feature (269)..(658): Homolog of NCBI NO: 15234347 NR Description: hypothetical protein [Arabidopsis thaliana]
  misc_feature (574)..(658): Homolog of NCBI NO: 25404926 NR Description: protein F22C12.12 [imported] - Arabidopsis
  misc_feature (1)..(579): Homolog of NCBI NO: 25404926 NR Description: protein F22C12.12 [imported] - Arabidopsis
  misc_feature (269)..(640): Homolog of NCBI NO: 34912822 NR Description: P0501G01.20 [Oryza sativa (japonica
  misc_feature (269)..(658): Homolog of NCBI NO: 15234347 NR Description: hypothetical protein [Arabidopsis thaliana]
  misc_feature (1)..(579): Homolog of NCBI NO: 25404926 NR Description: protein F22C12.12 [imported] - Arabidopsis
  misc_feature (574)..(658): Homolog of NCBI NO: 25404926 NR Description: protein F22C12.12 [imported] - Arabidopsis
  misc_feature (269)..(658): Homolog of NCBI NO: 15234347 NR Description: hypothetical protein [Arabidopsis thaliana]
  misc_feature (1)..(277): Homolog of NCBI NO: 34912822 NR Description: P0501G01.20 [Oryza sativa (japonica
  misc_feature (269)..(640): Homolog of NCBI NO: 34912822 NR Description: P0501G01.20 [Oryza sativa (japonica
  misc_feature (1)..(658): Homolog of NCBI NO: 30696968 NR Description: expressed protein [Arabidopsis thaliana]
  misc_feature (1)..(658): Homolog of NCBI NO: 18407974 NR Description: expressed protein [Arabidopsis thaliana]
  misc_feature (1)..(554): Homolog of NCBI NO: 34904204 NR Description: P0492F05.26 [Oryza sativa (japonica
  misc_feature (562)..(658): Homolog of NCBI NO: 34904204 NR Description: P0492F05.26 [Oryza sativa (japonica
  misc_feature (1)..(576): Homolog of NCBI NO: 17065032 NR Description: similar to homeobox protein [Arabidopsis thaliana]
  misc_feature (1)..(658): Homolog of NCBI NO: 30696968 NR Description: expressed protein [Arabidopsis thaliana]
  misc_feature (1)..(658): Homolog of NCBI NO: 18407974 NR Description: expressed protein [Arabidopsis thaliana]
  misc_feature (1)..(554): Homolog of NCBI NO: 34904204 NR Description: P0492F05.26 [Oryza sativa (japonica
  misc_feature (562)..(658): Homolog of NCBI NO: 34904204 NR Description: P0492F05.26 [Oryza sativa (japonica
  misc_feature (1)..(576): Homolog of NCBI NO: 17065032 NR Description: similar to homeobox protein [Arabidopsis thaliana]
  misc_feature (1)..(579): Homolog of NCBI NO: 25404926 NR Description: protein F22C12.12 [imported] - Arabidopsis
  misc_feature (574)..(658): Homolog of NCBI NO: 25404926 NR Description: protein F22C12.12 [imported] - Arabidopsis
  misc_feature (1)..(277): Homolog of NCBI NO: 34912822 NR Description: P0501G01.20 [Oryza sativa (japonica
  misc_feature (1)..(576): Homolog of NCBI NO: 17065032 NR Description: similar to homeobox protein [Arabidopsis thaliana]
  misc_feature (562)..(658): Homolog of NCBI NO: 34904204 NR Description: P0492F05.26 [Oryza sativa (japonica
  misc_feature (1)..(554): Homolog of NCBI NO: 34904204 NR Description: P0492F05.26 [Oryza sativa (japonica
  misc_feature (1)..(658): Homolog of NCBI NO: 18407974 NR Description: expressed protein [Arabidopsis thaliana]
  misc_feature (1)..(658): Homolog of NCBI NO: 30696968 NR Description: expressed protein [Arabidopsis thaliana]
MGSFSMLSQREVEPRGTLRRHTSGNDLKSRSTESSNRLPRHKRNASAASDISSISSRSSSSVSASRKRTTNLCFDEKLFLQSLYKVLSSVSETTPLIIYLRDVEKLLESERFYKLFQRLLNKLSGPVLILGSRVLEPEDDCQEVDESISALFPYNIEIRPPEDESQLVSWKSRLEDDMKMIQFQDNKNHIAEVLAANDIQCDDLSSICHADTMCLSNHIEEIVVSAITYHLIHTKEPEYRNGKLVISSKSLSHGLSIFQEGGNRSFEDSLKLDTNTDSKRKGGEVCSKSESKSGPENKNESEISLPSNKNDNPLPPKAPEVVPDNEFEKRIRPEVIPANEIGVTFADIGSLDETKDSLQELVMLPLRRPDLFQGGLLKPCRGILLFGPPGTGKTMLAKAIANEAGASFINVSMSTITSKWFGEDEKNVRALFTLAAKVSPTIIFVDEVDSMLGQRTRVGEHEAMRKIKNEFMTHWDGLMTKPGERILVLAATNRPFDLDEAIIRRFERRIMVGLPSIESREKILRTLLSKEKTENLDFHELGQITEGYSGSDLKNLCITAAYRPVRELIQQERLKDQERKKREEAGKGTEESKEEEAEASEERVITLRPLNMEDMRKAKNQVAASFASEGAGMNELKQWNDLYGEGGSRKKEQLTYFL

SEQ ID NO: 46531 - DNA, 1252 bp, Arabidopsis thaliana
  misc_feature (1)..(1252): Ceres Seq. ID no. 13591768
  misc_feature: MA Experiment ID: 20000438 Result: Up-regulated in Transcription
  misc_feature: MA Experiment 20000438 PARAMETER Experiment Name: At_Shoots__P Parameter: Age (day) Value: 14
  misc_feature: MA Experiment 20000438 PARAMETER Experiment Name: At_Shoots__P Parameter: Tissue Value: Shoots vs. Whole Plant
  misc_feature: MA Experiment ID: 20000495 Result: Down-regulated in Transcription
  misc_feature: MA Experiment 20000495 PARAMETER Experiment Name: At_Guard_Cells_P Parameter: Harvest Date Value: 8/2/2002
  misc_feature: MA Experiment 20000495 PARAMETER Experiment Name: At_Guard_Cells_P Parameter: Organism Value: A. thaliana
  misc_feature: MA Experiment 20000495 PARAMETER Experiment Name: At_Guard_Cells_P Parameter: Tissue Value: Guard Cells vs. Leaves
  misc_feature: MA Experiment ID: 20000496 Result: Down-regulated in Transcription
  misc_feature: MA Experiment 20000496 PARAMETER Experiment Name: At_Guard_Cells_P Parameter: Harvest Date Value: 7/19/2002
  misc_feature: MA Experiment 20000496 PARAMETER Experiment Name: At_Guard_Cells_P Parameter: Organism Value: Canola
  misc_feature: MA Experiment 20000496 PARAMETER Experiment Name: At_Guard_Cells_P Parameter: Tissue Value: Guard Cells vs. Leaves
  misc_feature: MA Experiment ID: 20001451 Result: Down-regulated in Transcription
  misc_feature: MA Experiment 20001451 PARAMETER Experiment Name: At_Far-red-induction_P Parameter: Age (day) Value: 7
  misc_feature: MA Experiment 20001451 PARAMETER Experiment Name: At_Far-red-induction_P Parameter: Light Value: Far-red vs. White
  misc_feature: MA Experiment 20001451 PARAMETER Experiment Name: At_Far-red-induction_P Parameter: Organism Value: A. thaliana
  misc_feature: MA Experiment 20001451 PARAMETER Experiment Name: At_Far-red-induction_P Parameter: Plant Line Value: Columbia
  misc_feature: MA Experiment 20001451 PARAMETER Experiment Name: At_Far-red-induction_P Parameter: Timepoint (hr) Value: 24
  misc_feature: MA Experiment 20001451 PARAMETER Experiment Name: At_Far-red-induction_P Parameter: Tissue Value: Whole Plant
gagtccattttcgcgagcttccgtgtccaagagctcctcgaccatggcgtcttgtttacaagcatccatgaattctctgcttccacgctcttcttctttttctcctcatcctcctctatcttcgaattcatccgggagaagaaacttgaagacttttcgttacgcctttcgcgccaaagcctctgccaaaatccctatgcctccgataaatccaaaggatcctttcctctccacgctcgcttctattgccgcgaattctccggaaaagcttctcaatcggccggttaacgctgatgtgccgccatatcttgacatctttgactcccctcagctcatgtcttctcctgcacaggttgaaagatcagtggcttataacgagcaccgaccgagaactcctccaccagacttgccatctatgcttcttgacgggagaattgtttacattggaatgcctcttgtgccggcagtgactgagctagttgtcgctgagctaatgtatcttcagtggctggatcccaaggaacccatttacatttacatcaactccacagggaccactcgtgatgatggagagacggttggaatggaatcagaagggtttgcgatctatgactctttgatgcaacttaaaaacgaggtacatacagtatgtgtgggagcagccataggtcaggcctgtctattactttctgcgggaaccaagggtaaacggtttatgatgccacatgccaaagcgatgattcagcaaccacgtgtaccttcttctgggttgatgcctgccagtgatgtcctgattcgggccaaagaggtcattacaaatagggatatacttgtggaactactatcaaagcatactgggaattccgtggagactgtagctaacgtaatgagaaggccatattacatggatgcaccaaaagctaaagaatttggagtcattgacaggattctttggcgcggtcaagaaaagattattgcggacgtggttccttcagaggaattcgacaagaatgcagggattaaaagcgtagtatgagtctagtcttaagttttcttggcctaaatcatactgcgtcatggagaagaacaaatagactgaccaaaatcacattggccgcagactgccttgtttcaaatcacttggtaaatgtgaacatgcgattaggagaatcatacttaaaggatcttgaaatattatgataaaattgtaatgtgtttgttcgttagcaatagtaaatacaatcttcaactc

SEQ ID NO: 46532 - protein, 344 aa, Arabidopsis thaliana
  peptide (1)..(344): Ceres Seq. ID no. 13591769
  misc_feature (129)..(320): Pfam Name: Clp protease Pfam Description: Clp protease
  misc_feature (129)..(320): Pfam Name: Clp protease Pfam Description: Clp protease
  misc_feature (130)..(317): Homolog of NCBI NO: 33240836 NR Description: Protease subunit of ATP-dependent Clp protease
  misc_feature (112)..(317): Homolog of NCBI NO: 23043113 NR Description: hypothetical protein [Trichodesmium erythraeum
  misc_feature (120)..(317): Homolog of NCBI NO: 16506759 NR Description: hypothetical protein [Cyanothece sp. PCC 8801]
  misc_feature (132)..(317): Homolog of NCBI NO: 13812146 NR Description: ATP-dependent Clp protease proteolytic subunit
  misc_feature (120)..(317): Homolog of NCBI NO: 16331161 NR Description: ATP-dependent Clp protease proteolytic subunit
  misc_feature (130)..(317): Homolog of NCBI NO: 33240836 NR Description: Protease subunit of ATP-dependent Clp protease
  misc_feature (120)..(317): Homolog of NCBI NO: 16506759 NR Description: hypothetical protein [Cyanothece sp. PCC 8801]
  misc_feature (120)..(317): Homolog of NCBI NO: 16331161 NR Description: ATP-dependent Clp protease proteolytic subunit
  misc_feature (15)..(344): Homolog of NCBI NO: 18390982 NR Description: ATP-dependent Clp protease proteolytic subunit
  misc_feature (15)..(244): Homolog of NCBI NO: 25402516 NR Description: hypothetical protein [imported] - Arabidopsis
  misc_feature (112)..(317): Homolog of NCBI NO: 22299302 NR Description: ATP-dependent Clp protease proteolytic subunit 3
  misc_feature (114)..(316): Homolog of NCBI NO: 23126723 NR Description: hypothetical protein [Nostoc punctiforme]
  misc_feature (114)..(316): Homolog of NCBI NO: 17231850 NR Description: ATP-dependent Clp protease proteolytic subunit
  misc_feature (132)..(317): Homolog of NCBI NO: 13812146 NR Description: ATP-dependent Clp protease proteolytic subunit
  misc_feature (112)..(317): Homolog of NCBI NO: 23043113 NR Description: hypothetical protein [Trichodesmium erythraeum
  misc_feature (114)..(316): Homolog of NCBI NO: 17231850 NR Description: ATP-dependent Clp protease proteolytic subunit
  misc_feature (114)..(316): Homolog of NCBI NO: 23126723 NR Description: hypothetical protein [Nostoc punctiforme]
  misc_feature (112)..(317): Homolog of NCBI NO: 22299302 NR Description: ATP-dependent Clp protease proteolytic subunit 3
  misc_feature (15)..(244): Homolog of NCBI NO: 25402516 NR Description: hypothetical protein [imported] - Arabidopsis
  misc_feature (15)..(344): Homolog of NCBI NO: 18390982 NR Description: ATP-dependent Clp protease proteolytic subunit
SPFSRASVSKSSSTMASCLQASMNSLLPRSSSFSPHPPLSSNSSGRRNLKTFRYAFRAKASAKIPMPPINPKDPFLSTLASIAANSPEKLLNRPVNADVPPYLDIFDSPQLMSSPAQVERSVAYNEHRPRTPPPDLPSMLLDGRIVYIGMPLVPAVTELVVAELMYLQWLDPKEPIYIYINSTGTTRDDGETVGMESEGFAIYDSLMQLKNEVHTVCVGAAIGQACLLLSAGTKGKRFMMPHAKAMIQQPRVPSSGLMPASDVLIRAKEVITNRDILVELLSKHTGNSVETVANVMRRPYYMDAPKAKEFGVIDRILWRGQEKIIADVVPSEEFDKNAGIKSVV

SEQ ID NO: 46533 - protein, 330 aa, Arabidopsis thaliana
  peptide (1)..(330): Ceres Seq. ID no. 13591770
  misc_feature (115)..(306): Pfam Name: Clp protease Pfam Description: Clp protease
  misc_feature (115)..(306): Pfam Name: Clp protease Pfam Description: Clp protease
  misc_feature (116)..(303): Homolog of NCBI NO: 33240836 NR Description: Protease subunit of ATP-dependent Clp protease
  misc_feature (98)..(303): Homolog of NCBI NO: 23043113 NR Description: hypothetical protein [Trichodesmium erythraeum
  misc_feature (106)..(303): Homolog of NCBI NO: 16506759 NR Description: hypothetical protein [Cyanothece sp. PCC 8801]
  misc_feature (118)..(303): Homolog of NCBI NO: 13812146 NR Description: ATP-dependent Clp protease proteolytic subunit
  misc_feature (106)..(303): Homolog of NCBI NO: 16331161 NR Description: ATP-dependent Clp protease proteolytic subunit
  misc_feature (116)..(303): Homolog of NCBI NO: 33240836 NR Description: Protease subunit of ATP-dependent Clp protease
  misc_feature (106)..(303): Homolog of NCBI NO: 16506759 NR Description: hypothetical protein [Cyanothece sp. PCC 8801]
  misc_feature (106)..(303): Homolog of NCBI NO: 16331161 NR Description: ATP-dependent Clp protease proteolytic subunit
  misc_feature (1)..(330): Homolog of NCBI NO: 18390982 NR Description: ATP-dependent Clp protease proteolytic subunit
  misc_feature (1)..(230): Homolog of NCBI NO: 25402516 NR Description: hypothetical protein [imported] - Arabidopsis
  misc_feature (98)..(303): Homolog of NCBI NO: 22299302 NR Description: ATP-dependent Clp protease proteolytic subunit 3
  misc_feature (100)..(302): Homolog of NCBI NO: 23126723 NR Description: hypothetical protein [Nostoc punctiforme]
  misc_feature (100)..(302): Homolog of NCBI NO: 17231850 NR Description: ATP-dependent Clp protease proteolytic subunit
  misc_feature (118)..(303): Homolog of NCBI NO: 13812146 NR Description: ATP-dependent Clp protease proteolytic subunit
  misc_feature (98)..(303): Homolog of NCBI NO: 23043113 NR Description: hypothetical protein [Trichodesmium erythraeum
  misc_feature (100)..(302): Homolog of NCBI NO: 17231850 NR Description: ATP-dependent Clp protease proteolytic subunit
  misc_feature (100)..(302): Homolog of NCBI NO: 23126723 NR Description: hypothetical protein [Nostoc punctiforme]
  misc_feature (98)..(303): Homolog of NCBI NO: 22299302 NR Description: ATP-dependent Clp protease proteolytic subunit 3
  misc_feature (1)..(230): Homolog of NCBI NO: 25402516 NR Description: hypothetical protein [imported] - Arabidopsis
  misc_feature (1)..(330): Homolog of NCBI NO: 18390982 NR Description: ATP-dependent Clp protease proteolytic subunit
MASCLQASMNSLLPRSSSFSPHPPLSSNSSGRRNLKTFRYAFRAKASAKIPMPPINPKDPFLSTLASIAANSPEKLLNRPVNADVPPYLDIFDSPQLMSSPAQVERSVAYNEHRPRTPPPDLPSMLLDGRIVYIGMPLVPAVTELVVAELMYLQWLDPKEPIYIYINSTGTTRDDGETVGMESEGFAIYDSLMQLKNEVHTVCVGAAIGQACLLLSAGTKGKRFMMPHAKAMIQQPRVPSSGLMPASDVLIRAKEVITNRDILVELLSKHTGNSVETVANVMRRPYYMDAPKAKEFGVIDRILWRGQEKIIADVVPSEEFDKNAGIKSVV

SEQ ID NO: 46534 - protein, 322 aa, Arabidopsis thaliana
  peptide (1)..(322): Ceres Seq. ID no. 13591771
  misc_feature (107)..(298): Pfam Name: Clp protease Pfam Description: Clp protease
  misc_feature (107)..(298): Pfam Name: Clp protease Pfam Description: Clp protease
  misc_feature (108)..(295): Homolog of NCBI NO: 33240836 NR Description: Protease subunit of ATP-dependent Clp protease
  misc_feature (90)..(295): Homolog of NCBI NO: 23043113 NR Description: hypothetical protein [Trichodesmium erythraeum
  misc_feature (98)..(295): Homolog of NCBI NO: 16506759 NR Description: hypothetical protein [Cyanothece sp. PCC 8801]
  misc_feature (110)..(295): Homolog of NCBI NO: 13812146 NR Description: ATP-dependent Clp protease proteolytic subunit
  misc_feature (98)..(295): Homolog of NCBI NO: 16331161 NR Description: ATP-dependent Clp protease proteolytic subunit
  misc_feature (108)..(295): Homolog of NCBI NO: 33240836 NR Description: Protease subunit of ATP-dependent Clp protease
  misc_feature (98)..(295): Homolog of NCBI NO: 16506759 NR Description: hypothetical protein [Cyanothece sp. PCC 8801]
  misc_feature (98)..(295): Homolog of NCBI NO: 16331161 NR Description: ATP-dependent Clp protease proteolytic subunit
  misc_feature (1)..(322): Homolog of NCBI NO: 18390982 NR Description: ATP-dependent Clp protease proteolytic subunit
  misc_feature (1)..(222): Homolog of NCBI NO: 25402516 NR Description: hypothetical protein [imported] - Arabidopsis
  misc_feature (90)..(295): Homolog of NCBI NO: 22299302 NR Description: ATP-dependent Clp protease proteolytic subunit 3
  misc_feature (92)..(294): Homolog of NCBI NO: 23126723 NR Description: hypothetical protein [Nostoc punctiforme]
  misc_feature (92)..(294): Homolog of NCBI NO: 17231850 NR Description: ATP-dependent Clp protease proteolytic subunit
  misc_feature (110)..(295): Homolog of NCBI NO: 13812146 NR Description: ATP-dependent Clp protease proteolytic subunit
  misc_feature (90)..(295): Homolog of NCBI NO: 23043113 NR Description: hypothetical protein [Trichodesmium erythraeum
  misc_feature (92)..(294): Homolog of NCBI NO: 17231850 NR Description: ATP-dependent Clp protease proteolytic subunit
  misc_feature (92)..(294): Homolog of NCBI NO: 23126723 NR Description: hypothetical protein [Nostoc punctiforme]
  misc_feature (90)..(295): Homolog of NCBI NO: 22299302 NR Description: ATP-dependent Clp protease proteolytic subunit 3
  misc_feature (1)..(222): Homolog of NCBI NO: 25402516 NR Description: hypothetical protein [imported] - Arabidopsis
  misc_feature (1)..(322): Homolog of NCBI NO: 18390982 NR Description: ATP-dependent Clp protease proteolytic subunit
MNSLLPRSSSFSPHPPLSSNSSGRRNLKTFRYAFRAKASAKIPMPPINPKDPFLSTLASIAANSPEKLLNRPVNADVPPYLDIFDSPQLMSSPAQVERSVAYNEHRPRTPPPDLPSMLLDGRIVYIGMPLVPAVTELVVAELMYLQWLDPKEPIYIYINSTGTTRDDGETVGMESEGFAIYDSLMQLKNEVHTVCVGAAIGQACLLLSAGTKGKRFMMPHAKAMIQQPRVPSSGLMPASDVLIRAKEVITNRDILVELLSKHTGNSVETVANVMRRPYYMDAPKAKEFGVIDRILWRGQEKIIADVVPSEEFDKNAGIKSVV

SEQ ID NO: 46535 - DNA, 2086 bp, Arabidopsis thaliana
  misc_feature (1)..(2086): Ceres Seq. ID no. 12639069
  misc_feature: MA Experiment ID: 20000179 Result: Up-regulated in Transcription
  misc_feature: MA Experiment 20000179 PARAMETER Experiment Name: At_Germinating_Seeds_P Parameter: Age (hr) Value: 6 vs. 0
  misc_feature: MA Experiment 20000179 PARAMETER Experiment Name: At_Germinating_Seeds_P Parameter: Tissue Value: Germinating Seeds
  misc_feature: MA Experiment ID: 20000180 Result: Up-regulated in Transcription
  misc_feature: MA Experiment 20000180 PARAMETER Experiment Name: At_Germinating_Seeds_P Parameter: Age (hr) Value: 24 vs. 0
  misc_feature: MA Experiment 20000180 PARAMETER Experiment Name: At_Germinating_Seeds_P Parameter: Tissue Value: Germinating Seeds
tctctctctctcgctactctcatcttcaccgtacgcttcttcgatctacgcttctctctagctatagcttccattgtcacgattcctcccaaagcgtagaatgtggaaccctagatacctcaaattcagctagagatctatctactttcacctctattactttctacttctgaaacccctcatcagagctacacacagtgatgggaaactgttgcagatctcccgcagcagttgctagagaagacgtgaaatccaactattccggccacgatcacgcccgcaaagacgccgccggcggtaaaaaatcggcgccgattcgagttctaagcgatgttcccaaggaaaacatcgaggaccgttacttactcgacagagaactcggccgcggcgagtttggtgtcacttacctctgtatcgagaggtcctcgcgtgacctactcgcttgcaaatcgatctccaagaggaagcttagaactgctgtggatattgaagatgttaaaagagaagtagcgattatgaagcatttgcctaagagttcgagtattgttactttgaaagaagcttgtgaggatgataatgctgtgcatttggttatggagctttgtgaaggtggcgagcttttcgatcggattgttgcgagaggtcattatacggagcgtgctgctgctggtgttactaagactattgttgaggttgtgcagctttgtcataagcatggtgtgattcatagagatttgaagcccgagaactttttgtttgctaataagaaggagaactcgcctttgaaagctattgattttggattgtcgattttcttcaagccaggtgagaaattctctgagattgttgggagtccatattacatggcacctgaggtgcttaagcggaattatggacccgaaatagatatttggagtgctggagtgattctttatattctcttgtgtggagttcctccgttctgggcagagtcagaacagggagttgctcaggctattctgcgtggagtaattgattttaagagggaaccgtggccaaacatttctgagaccgctaagaatctagtcagacaaatgttagagcctgatccaaagcgtcggctgactgcaaagcaagtgcttgagcacccatggattcagaacgcaaagaaagctcccaatgttcctcttggagatgttgtgaagtcgaggttgaagcaattttcagtgatgaaccgattcaagagaaaagctttaagggttattgccgaatttttatctacggaagaagtagaagacatcaaagtaatgttcaacaagatggatactgataatgatggtatagtttccattgaggagttgaaagccggacttcgtgattttagtacacagctagcggaatcagaagttcagatgcttattgaagcggtggatactaaaggaaaaggaactctagactatggagaatttgtagcagtgtctctccacctgcaaaaggtagcaaacgatgagcatctccgcaaagccttctcttactttgacaaggatggaaatgggtacattttgccccaggagctttgtgacgccttaaaggaagatggaggagatgactgtgtggatgtcgccaatgatatattccaagaagttgacacagacaaggatgggagaataagctacgaagagtttgcggcaatgatgaaaacaggaacggattggagaaaggcgtctcgtcattactcaagagggagattcaatagcctaagcatcaagctaatgaaggacgggtctttgaacctaggcaacgaatagcgaatcaaagtgaagaagccgcaatagggtctttagtgtctgtctctcacgccacgttctcgtgcacgtcaagtattaaaccaagagaaggtaaaacttgggattcagaattcatatctttttgtacatctttcgttttttaacctttctatttttggtgattatgttatctgtgttcttttttttattggtttatgggttgagttgtgtttgtttagtttgttctggtagaaatccaaaagacatgagaatcagtgtttgatgtgtagaaggaaaaaaaaccaaagaccatttctggt

SEQ ID NO: 46536 - protein, 528 aa, Arabidopsis thaliana
  peptide (1)..(528): Ceres Seq. ID no. 12639070
  misc_feature (54)..(312): Pfam Name: Protein kinase domain Pfam Description: Protein kinase domain
  misc_feature (54)..(312): Pfam Name: Protein kinase domain Pfam Description: Protein kinase domain
  misc_feature (1)..(528): Homolog of NCBI NO: 18416872 NR Description: calcium-dependent protein kinase-like protein
  misc_feature (1)..(528): Homolog of NCBI NO: 15239742 NR Description: calcium-dependent protein kinase
  misc_feature (29)..(525): Homolog of NCBI NO: 30699042 NR Description: calcium-dependent protein kinase, putative (CDPK)
  misc_feature (1)..(525): Homolog of NCBI NO: 28416563 NR Description: At1g18890 [Arabidopsis thaliana]
  misc_feature (1)..(525): Homolog of NCBI NO: 25287677 NR Description: calcium-dependent protein kinase 1
  misc_feature (1)..(528): Homolog of NCBI NO: 18416872 NR Description: calcium-dependent protein kinase-like protein
  misc_feature (29)..(525): Homolog of NCBI NO: 30699042 NR Description: calcium-dependent protein kinase, putative (CDPK)
  misc_feature (1)..(525): Homolog of NCBI NO: 25287677 NR Description: calcium-dependent protein kinase 1
  misc_feature (1)..(528): Homolog of NCBI NO: 22331739 NR Description: calcium-dependent protein kinase
  misc_feature (1)..(528): Homolog of NCBI NO: 17064926 NR Description: calcium-dependent protein kinase [Arabidopsis
  misc_feature (33)..(528): Homolog of NCBI NO: 34907990 NR Description: putative calcium-dependent protein kinase
  misc_feature (1)..(20): Homolog of NCBI NO: 34907990 NR Description: putative calcium-dependent protein kinase
  misc_feature (1)..(425): Homolog of NCBI NO: 11259886 NR Description: calcium dependent protein kinase
  misc_feature (1)..(525): Homolog of NCBI NO: 28416563 NR Description: At1g18890 [Arabidopsis thaliana]
  misc_feature (1)..(528): Homolog of NCBI NO: 15239742 NR Description: calcium-dependent protein kinase
  misc_feature (1)..(425): Homolog of NCBI NO: 11259886 NR Description: calcium dependent protein kinase
  misc_feature (1)..(20): Homolog of NCBI NO: 34907990 NR Description: putative calcium-dependent protein kinase
  misc_feature (33)..(528): Homolog of NCBI NO: 34907990 NR Description: putative calcium-dependent protein kinase
  misc_feature (1)..(528): Homolog of NCBI NO: 17064926 NR Description: calcium-dependent protein kinase [Arabidopsis
  misc_feature (1)..(528): Homolog of NCBI NO: 22331739 NR Description: calcium-dependent protein kinase
MGNCCRSPAAVAREDVKSNYSGHDHARKDAAGGKKSAPIRVLSDVPKENIEDRYLLDRELGRGEFGVTYLCIERSSRDLLACKSISKRKLRTAVDIEDVKREVAIMKHLPKSSSIVTLKEACEDDNAVHLVMELCEGGELFDRIVARGHYTERAAAGVTKTIVEVVQLCHKHGVIHRDLKPENFLFANKKENSPLKAIDFGLSIFFKPGEKFSEIVGSPYYMAPEVLKRNYGPEIDIWSAGVILYILLCGVPPFWAESEQGVAQAILRGVIDFKREPWPNISETAKNLVRQMLEPDPKRRLTAKQVLEHPWIQNAKKAPNVPLGDVVKSRLKQFSVMNRFKRKALRVIAEFLSTEEVEDIKVMFNKMDTDNDGIVSIEELKAGLRDFSTQLAESEVQMLIEAVDTKGKGTLDYGEFVAVSLHLQKVANDEHLRKAFSYFDKDGNGYILPQELCDALKEDGGDDCVDVANDIFQEVDTDKDGRISYEEFAAMMKTGTDWRKASRHYSRGRFNSLSIKLMKDGSLNLGNE

SEQ ID NO: 46537 - protein, 423 aa, Arabidopsis thaliana
  peptide (1)..(423): Ceres Seq. ID no. 12639071
  misc_feature (1)..(207): Pfam Name: Protein kinase domain Pfam Description: Protein kinase domain
  misc_feature (1)..(207): Pfam Name: Protein kinase domain Pfam Description: Protein kinase domain
  misc_feature (1)..(419): Homolog of NCBI NO: 14484895 NR Description: calcium-dependent protein kinase [Funaria
  misc_feature (1)..(423): Homolog of NCBI NO: 18416872 NR Description: calcium-dependent protein kinase-like protein
  misc_feature (1)..(423): Homolog of NCBI NO: 15239742 NR Description: calcium-dependent protein kinase
  misc_feature (1)..(420): Homolog of NCBI NO: 30699042 NR Description: calcium-dependent protein kinase, putative (CDPK)
  misc_feature (1)..(420): Homolog of NCBI NO: 28416563 NR Description: At1g18890 [Arabidopsis thaliana]
  misc_feature (1)..(419): Homolog of NCBI NO: 14484895 NR Description: calcium-dependent protein kinase [Funaria
  misc_feature (1)..(423): Homolog of NCBI NO: 15239742 NR Description: calcium-dependent protein kinase
  misc_feature (1)..(420): Homolog of NCBI NO: 28416563 NR Description: At1g18890 [Arabidopsis thaliana]
  misc_feature (1)..(423): Homolog of NCBI NO: 22331739 NR Description: calcium-dependent protein kinase
  misc_feature (1)..(423): Homolog of NCBI NO: 17064926 NR Description: calcium-dependent protein kinase [Arabidopsis
  misc_feature (1)..(423): Homolog of NCBI NO: 34907990 NR Description: putative calcium-dependent protein kinase
  misc_feature (1)..(320): Homolog of NCBI NO: 11259886 NR Description: calcium dependent protein kinase
  misc_feature (1)..(420): Homolog of NCBI NO: 25287677 NR Description: calcium-dependent protein kinase 1
  misc_feature (1)..(420): Homolog of NCBI NO: 30699042 NR Description: calcium-dependent protein kinase, putative (CDPK)
  misc_feature (1)..(423): Homolog of NCBI NO: 18416872 NR Description: calcium-dependent protein kinase-like protein
  misc_feature (1)..(420): Homolog of NCBI NO: 25287677 NR Description: calcium-dependent protein kinase 1
  misc_feature (1)..(320): Homolog of NCBI NO: 11259886 NR Description: calcium dependent protein kinase
  misc_feature (1)..(423): Homolog of NCBI NO: 34907990 NR Description: putative calcium-dependent protein kinase
  misc_feature (1)..(423): Homolog of NCBI NO: 17064926 NR Description: calcium-dependent protein kinase [Arabidopsis
  misc_feature (1)..(423): Homolog of NCBI NO: 22331739 NR Description: calcium-dependent protein kinase
MKHLPKSSSIVTLKEACEDDNAVHLVMELCEGGELFDRIVARGHYTERAAAGVTKTIVEVVQLCHKHGVIHRDLKPENFLFANKKENSPLKAIDFGLSIFFKPGEKFSEIVGSPYYMAPEVLKRNYGPEIDIWSAGVILYILLCGVPPFWAESEQGVAQAILRGVIDFKREPWPNISETAKNLVRQMLEPDPKRRLTAKQVLEHPWIQNAKKAPNVPLGDVVKSRLKQFSVMNRFKRKALRVIAEFLSTEEVEDIKVMFNKMDTDNDGIVSIEELKAGLRDFSTQLAESEVQMLIEAVDTKGKGTLDYGEFVAVSLHLQKVANDEHLRKAFSYFDKDGNGYILPQELCDALKEDGGDDCVDVANDIFQEVDTDKDGRISYEEFAAMMKTGTDWRKASRHYSRGRFNSLSIKLMKDGSLNLGNE

SEQ ID NO: 46538 - protein, 397 aa, Arabidopsis thaliana
  peptide (1)..(397): Ceres Seq. ID no. 12639072
  misc_feature (1)..(181): Pfam Name: Protein kinase domain Pfam Description: Protein kinase domain
  misc_feature (1)..(181): Pfam Name: Protein kinase domain Pfam Description: Protein kinase domain
  misc_feature (1)..(393): Homolog of NCBI NO: 14484895 NR Description: calcium-dependent protein kinase [Funaria
  misc_feature (1)..(397): Homolog of NCBI NO: 18416872 NR Description: calcium-dependent protein kinase-like protein
  misc_feature (1)..(397): Homolog of NCBI NO: 15239742 NR Description: calcium-dependent protein kinase
  misc_feature (1)..(394): Homolog of NCBI NO: 30699042 NR Description: calcium-dependent protein kinase, putative (CDPK)
  misc_feature (1)..(394): Homolog of NCBI NO: 28416563 NR Description: At1g18890 [Arabidopsis thaliana]
  misc_feature (1)..(393): Homolog of NCBI NO: 14484895 NR Description: calcium-dependent protein kinase [Funaria
  misc_feature (1)..(397): Homolog of NCBI NO: 15239742 NR Description: calcium-dependent protein kinase
  misc_feature (1)..(394): Homolog of NCBI NO: 28416563 NR Description: At1g18890 [Arabidopsis thaliana]
  misc_feature (1)..(397): Homolog of NCBI NO: 22331739 NR Description: calcium-dependent protein kinase
  misc_feature (1)..(397): Homolog of NCBI NO: 17064926 NR Description: calcium-dependent protein kinase [Arabidopsis
  misc_feature (1)..(397): Homolog of NCBI NO: 34907990 NR Description: putative calcium-dependent protein kinase
  misc_feature (1)..(294): Homolog of NCBI NO: 11259886 NR Description: calcium dependent protein kinase
  misc_feature (1)..(394): Homolog of NCBI NO: 25287677 NR Description: calcium-dependent protein kinase 1
  misc_feature (1)..(394): Homolog of NCBI NO: 30699042 NR Description: calcium-dependent protein kinase, putative (CDPK)
  misc_feature (1)..(397): Homolog of NCBI NO: 18416872 NR Description: calcium-dependent protein kinase-like protein
  misc_feature (1)..(394): Homolog of NCBI NO: 25287677 NR Description: calcium-dependent protein kinase 1
  misc_feature (1)..(294): Homolog of NCBI NO: 11259886 NR Description: calcium dependent protein kinase
  misc_feature (1)..(397): Homolog of NCBI NO: 34907990 NR Description: putative calcium-dependent protein kinase
  misc_feature (1)..(397): Homolog of NCBI NO: 17064926 NR Description: calcium-dependent protein kinase [Arabidopsis
  misc_feature (1)..(397): Homolog of NCBI NO: 22331739 NR Description: calcium-dependent protein kinase
MELCEGGELFDRIVARGHYTERAAAGVTKTIVEVVQLCHKHGVIHRDLKPENFLFANKKENSPLKAIDFGLSIFFKPGEKFSEIVGSPYYMAPEVLKRNYGPEIDIWSAGVILYILLCGVPPFWAESEQGVAQAILRGVIDFKREPWPNISETAKNLVRQMLEPDPKRRLTAKQVLEHPWIQNAKKAPNVPLGDVVKSRLKQFSVMNRFKRKALRVIAEFLSTEEVEDIKVMFNKMDTDNDGIVSIEELKAGLRDFSTQLAESEVQMLIEAVDTKGKGTLDYGEFVAVSLHLQKVANDEHLRKAFSYFDKDGNGYILPQELCDALKEDGGDDCVDVANDIFQEVDTDKDGRISYEEFAAMMKTGTDWRKASRHYSRGRFNSLSIKLMKDGSLNLGNE

SEQ ID NO: 46539 - DNA, 2742 bp, Arabidopsis thaliana
  misc_feature (1)..(2742): Ceres Seq. ID no. 12574600
  misc_feature: MA Experiment ID: 108462 Result: Up-regulated in Transcription
  misc_feature: MA Experiment 108462 PARAMETER Experiment Name: At_Germinating_Seeds_cDNA_P Parameter: Age (day) Value: 2 vs. 0
  misc_feature: MA Experiment 108462 PARAMETER Experiment Name: At_Germinating_Seeds_cDNA_P Parameter: Tissue Value: Germinating Seeds
  misc_feature: MA Experiment ID: 108464 Result: Up-regulated in Transcription
  misc_feature: MA Experiment 108464 PARAMETER Experiment Name: At_Germinating_Seeds_cDNA_P Parameter: Age (day) Value: 4 vs. 0
  misc_feature: MA Experiment 108464 PARAMETER Experiment Name: At_Germinating_Seeds_cDNA_P Parameter: Tissue Value: Germinating Seeds
  misc_feature: MA Experiment ID: 108577 Result: Down-regulated in Transcription
  misc_feature: MA Experiment 108577 PARAMETER Experiment Name: At_42deg_Heat_cDNA_P Parameter: Temperature (deg C) Value: 42 vs. 22
  misc_feature: MA Experiment 108577 PARAMETER Experiment Name: At_42deg_Heat_cDNA_P Parameter: Timepoint (hr) Value: 6
  misc_feature: MA Experiment 108577 PARAMETER Experiment Name: At_42deg_Heat_cDNA_P Parameter: Tissue Value: Aerial
  misc_feature: MA Experiment ID: 108579 Result: Down-regulated in Transcription
  misc_feature: MA Experiment 108579 PARAMETER Experiment Name: At_4deg_Cold_cDNA_P Parameter: Temperature (deg C) Value: 4 vs. 22
  misc_feature: MA Experiment 108579 PARAMETER Experiment Name: At_4deg_Cold_cDNA_P Parameter: Timepoint (hr) Value: 6
  misc_feature: MA Experiment 108579 PARAMETER Experiment Name: At_4deg_Cold_cDNA_P Parameter: Tissue Value: Aerial
  misc_feature: MA Experiment ID: 108585 Result: Down-regulated in Transcription
  misc_feature: MA Experiment 108585 PARAMETER Experiment Name: At_5mM_NaNP_cDNA_P Parameter: Timepoint (hr) Value: 6
  misc_feature: MA Experiment 108585 PARAMETER Experiment Name: At_5mM_NaNP_cDNA_P Parameter: Tissue Value: Aerial
  misc_feature: MA Experiment 108585 PARAMETER Experiment Name: At_5mM_NaNP_cDNA_P Parameter: Treatment Value: null
  misc_feature: MA Experiment ID: 20000111 Result: Down-regulated in Transcription
  misc_feature: MA Experiment 20000111 PARAMETER Experiment Name: At_42deg_Heat_cDNA_P Parameter: Temperature (deg C) Value: 42 vs. 22
  misc_feature: MA Experiment 20000111 PARAMETER Experiment Name: At_42deg_Heat_cDNA_P Parameter: Timepoint (hr) Value: 6
  misc_feature: MA Experiment 20000111 PARAMETER Experiment Name: At_42deg_Heat_cDNA_P Parameter: Tissue Value: Aerial
  misc_feature: MA Experiment ID: 20000112 Result: Down-regulated in Transcription
  misc_feature: MA Experiment 20000112 PARAMETER Experiment Name: At_42deg_Heat_cDNA_P Parameter: Temperature (deg C) Value: 42 vs. 22
  misc_feature: MA Experiment 20000112 PARAMETER Experiment Name: At_42deg_Heat_cDNA_P Parameter: Timepoint (hr) Value: 2
  misc_feature: MA Experiment 20000112 PARAMETER Experiment Name: At_42deg_Heat_cDNA_P Parameter: Tissue Value: Aerial
  misc_feature: MA Experiment ID: 20000113 Result: Down-regulated in Transcription
  misc_feature: MA Experiment 20000113 PARAMETER Experiment Name: At_42deg_Heat_cDNA_P Parameter: Temperature (deg C) Value: 42 vs. 22
  misc_feature: MA Experiment 20000113 PARAMETER Experiment Name: At_42deg_Heat_cDNA_P Parameter: Timepoint (hr) Value: 8
  misc_feature: MA Experiment 20000113 PARAMETER Experiment Name: At_42deg_Heat_cDNA_P Parameter: Tissue Value: Aerial
  misc_feature: MA Experiment ID: 20000144 Result: Down-regulated in Transcription
  misc_feature: MA Experiment 20000144 PARAMETER Experiment Name: At_42deg_Heat_cDNA_P Parameter: Temperature (deg C) Value: 42 vs. 22
  misc_feature: MA Experiment 20000144 PARAMETER Experiment Name: At_42deg_Heat_cDNA_P Parameter: Timepoint (hr) Value: 1
  misc_feature: MA Experiment 20000144 PARAMETER Experiment Name: At_42deg_Heat_cDNA_P Parameter: Tissue Value: Aerial
  misc_feature: MA Experiment ID: 20000224 Result: Up-regulated in Transcription
  misc_feature: MA Experiment ID: 20001557 Result: Down-regulated in Transcription
  misc_feature: MA Experiment 20001557 PARAMETER Experiment Name: At_Drought_Soil_Dry_P Parameter: Age (day) Value: 27
  misc_feature: MA Experiment 20001557 PARAMETER Experiment Name: At_Drought_Soil_Dry_P Parameter: Organism Value: A. thaliana
  misc_feature: MA Experiment 20001557 PARAMETER Experiment Name: At_Drought_Soil_Dry_P Parameter: Plant Line Value: WS
  misc_feature: MA Experiment 20001557 PARAMETER Experiment Name: At_Drought_Soil_Dry_P Parameter: Post Timepoint (hr) Value: 3
  misc_feature: MA Experiment 20001557 PARAMETER Experiment Name: At_Drought_Soil_Dry_P Parameter: Post-Treatment Value: Re-Water vs. No Drought
  misc_feature: MA Experiment 20001557 PARAMETER Experiment Name: At_Drought_Soil_Dry_P Parameter: Timepoint (day) Value: 13
  misc_feature: MA Experiment 20001557 PARAMETER Experiment Name: At_Drought_Soil_Dry_P Parameter: Treatment Value: Drought vs. No Drought
  misc_feature: MA Experiment ID: 20001905 Result: Down-regulated in Transcription
  misc_feature: MA Experiment 20001905 PARAMETER Experiment Name: At_Drought_Reproduction_P Parameter: Age (day) Value: 40
  misc_feature: MA Experiment 20001905 PARAMETER Experiment Name: At_Drought_Reproduction_P Parameter: Organism Value: A. thaliana
  misc_feature: MA Experiment 20001905 PARAMETER Experiment Name: At_Drought_Reproduction_P Parameter: Plant Line Value: WS
  misc_feature: MA Experiment 20001905 PARAMETER Experiment Name: At_Drought_Reproduction_P Parameter: Timepoint (day) Value: 10
  misc_feature: MA Experiment 20001905 PARAMETER Experiment Name: At_Drought_Reproduction_P Parameter: Tissue Value: Rosettes
  misc_feature: MA Experiment 20001905 PARAMETER Experiment Name: At_Drought_Reproduction_P Parameter: Treatment Value: Drought vs. No Drought
aaagagacagaagaaacaagaaccatttgtgaaatcaagaaccatcattattccatcaccagacacagaattgttcaatcatttgacaaaaaccttctaatccatacccttttgtcaaaatcaacacttgggttttcaatagtttatagctttaaacccataagaacgaatctggttctgtttctctggttaatgattgagattcttcaaagttttgattttttttgtagattgcttcatcttcaattttcacttttcatttgtattaaacattttcttgttccgaggggttttcttgtttctgacaaataaaaaaaaactttccttttctctctctgttttgaatttacattaatcaattatctgtctcctgaggttttatgacaactcaagttgtcttcttgttcaaagttctgcaataaattataataattgataagtttagagttctttttcctttgttcctaactaccattctttacattggatacgttgagtttgttgtctttgtctccattccactcccacttccacttttttttttgtcagatattggatctcgttcaggtcaaatgttgatttcagctgaaaaaggagagatcttgatccctcaatctccacttagctctgaatctgttgttcctttggtctatactgatgtcaatgttgttcctgaacatgaaagtaatcagcttgagaagtcaatatcaaaccttgaagaagaagtttttgaattgaagttgaagcttaagtctttggatgaaaagagaaagcaagttctgaataagattatagacactaaaggaagtatacgtgtgttttgtagagttagaccatttctattaacggaaaggagaccgattagggaacctgtttcgtttggaccagataatgttgttataagatctgctggaagtagtaaagaatttgagtttgataaagtttttcatcaatcagcaactcaagaagaagttttcggagaagtgaaaccgattcttagatctgctcttgatggtcacaatgtatgtgtcttggcgtatggtcaaacgggaactggcaagacttttaccatggatggcacaagtgagcaaccaggtcttgctcctagagctattaaagagcttttcaatgaagcttcaatggaccaaacacattccgtgacatttaggatgagtatgttggaaatctacatgggtaacttgaaagatttgttgtctgcaagacagtctttgaagtcatatgaagcctcagctaaatgtaaccttaatattcaagtagactcaaagggttcggttgaaattgagggtttgactgaagtggaagtaatggattttacaaaggctagatggtggtataacaaagggagacgagtgagatcaacttcttggacaaatgtaaacgaaacttcgagcagatctcattgtttaacaaggatcacgatctttcgtcgtggagatgcggtggggtcaaaaactgaagttagcaagctttggatgatagatcttggaggaagtgagaggctcttgaaaacaggagctatagggcaaactatggatgaaggtagagccataaacctctcactttccgctcttggagacgtgattgcagcgttaaggagaaagaagggacatgtgccttacagaaacagcaagctaactcaaattcttaaagattctctaggtactagatcaaaagttctgatgcttgtgcacataagtccacgtgatgaagatgttggtgaaacaatctgctctctcagctttactaaacgtgcgagagctgtagagtctaacagaggattaacagcagaactacaaaagctaagagaaaagaaaatatcggaacttgaagaggaaatggaagaaactcaagaaggttgcaagaagatcaaagcgcggttacaggaagtagagtgtctggttaatgaacacaagaaactcttttggatcaccaatgataagtatctagaagacattgaaaagaaagctatttcgcctttagatcatctgaaagacaccgatgcaactccaatatcatctgataaactagtcaaaataaggaagagttctggttttgtcccacgtttcatgacttcaactgttgctagtcgccaaaggcaaacaatgtcagagaaggaaatcaatgcaaaggctcagagcatacgatcagtggctaaaaatcttactcagttctccacttctcagtcgcttagtctctctgactcacgaagcaaagctctcctaagaagatcatacacaaaaccgcttcaagctgcagctaacagtggaacaccaccagaaacgcctaaaagacatatcaaagataattctttacagagaaagaatatgaatgatacttcttcaccaaggagcaagatggttacttcatcggatccaaatgtgagagctaaactgtgtcaccacaaacgaagaatgtcaagcttgacatgatctaacagttatctttcttttccatctgttgtgaaagtgctgagttgtttttagacttgtggtttgagcctgagtaggatgaggcggtgtcctccatagaaaccacttggctaatggtcccattttaagaccattggaactcgtggagtttgcggttctggttttaaaaggatatgttttgtttgtgattgtttcacagaatttttctttgggttggtgatagtttggtgttggatgtttgtatggggttcacagaaactggatcataattaatattccagattctttcttc

SEQ ID NO: 46540 - protein, 625 aa, Arabidopsis thaliana
  peptide (1)..(625): Ceres Seq. ID no. 12574601
  misc_feature (40)..(437): Homolog of NCBI NO: 14124976 NR Description: Similar to kinesin family member C3 [Homo sapiens]
  misc_feature (40)..(437): Homolog of NCBI NO: 19923321 NR Description: kinesin family member C3 [Homo sapiens]
  misc_feature (40)..(437): Homolog of NCBI NO: 3249735 NR Description: microtubule-based motor [Homo sapiens]
  misc_feature (45)..(405): Homolog of NCBI NO: 1762638 NR Description: microtubule-based motor protein
  misc_feature (1)..(476): Homolog of NCBI NO: 15218418 NR Description: kinesin-related protein; protein id: At1g72250.1
  misc_feature (57)..(447): Homolog of NCBI NO: 15240982 NR Description: kinesin-related protein; protein id: At5g27550.1
  misc_feature (15)..(515): Homolog of NCBI NO: 34902974 NR Description: unnamed protein product [Oryza sativa (japonica
  misc_feature (20)..(532): Homolog of NCBI NO: 18405421 NR Description: kinesin-related protein; protein id: At1g55550.1
  misc_feature (429)..(625): Homolog of NCBI NO: 21555226 NR Description: unknown [Arabidopsis thaliana]
  misc_feature (14)..(624): Homolog of NCBI NO: 13536981 NR Description: BY-2 kinesin-like protein 5 [Nicotiana tabacum]
MLISAEKGEILIPQSPLSSESVVPLVYTDVNVVPEHESNQLEKSISNLEEEVFELKLKLKSLDEKRKQVLNKIIDTKGSIRVFCRVRPFLLTERRPIREPVSFGPDNVVIRSAGSSKEFEFDKVFHQSATQEEVFGEVKPILRSALDGHNVCVLAYGQTGTGKTFTMDGTSEQPGLAPRAIKELFNEASMDQTHSVTFRMSMLEIYMGNLKDLLSARQSLKSYEASAKCNLNIQVDSKGSVEIEGLTEVEVMDFTKARWWYNKGRRVRSTSWTNVNETSSRSHCLTRITIFRRGDAVGSKTEVSKLWMIDLGGSERLLKTGAIGQTMDEGRAINLSLSALGDVIAALRRKKGHVPYRNSKLTQILKDSLGTRSKVLMLVHISPRDEDVGETICSLSFTKRARAVESNRGLTAELQKLREKKISELEEEMEETQEGCKKIKARLQEVECLVNEHKKLFWITNDKYLEDIEKKAISPLDHLKDTDATPISSDKLVKIRKSSGFVPRFMTSTVASRQRQTMSEKEINAKAQSIRSVAKNLTQFSTSQSLSLSDSRSKALLRRSYTKPLQAAANSGTPPETPKRHIKDNSLQRKNMNDTSSPRSKMVTSSDPNVRAKLCHHKRRMSSLT

SEQ ID NO: 46541 - protein, 459 aa, Arabidopsis thaliana
  peptide (1)..(459): Ceres Seq. ID no. 12574602
  misc_feature (1)..(271): Homolog of NCBI NO: 26996539 NR Description: Unknown (protein for MGC:47520) [Homo sapiens]
  misc_feature (1)..(271): Homolog of NCBI NO: 14124976 NR Description: Similar to kinesin family member C3 [Homo sapiens]
  misc_feature (1)..(271): Homolog of NCBI NO: 3249735 NR Description: microtubule-based motor [Homo sapiens]
  misc_feature (1)..(239): Homolog of NCBI NO: 1762638 NR Description: microtubule-based motor protein
  misc_feature (1)..(310): Homolog of NCBI NO: 15218418 NR Description: kinesin-related protein; protein id: At1g72250.1
  misc_feature (1)..(281): Homolog of NCBI NO: 15240982 NR Description: kinesin-related protein; protein id: At5g27550.1
  misc_feature (1)..(349): Homolog of NCBI NO: 34902974 NR Description: unnamed protein product [Oryza sativa (japonica
  misc_feature (1)..(366): Homolog of NCBI NO: 18405421 NR Description: kinesin-related protein; protein id: At1g55550.1
  misc_feature (263)..(459): Homolog of NCBI NO: 21555226 NR Description: unknown [Arabidopsis thaliana]
  misc_feature (1)..(458): Homolog of NCBI NO: 13536981 NR Description: BY-2 kinesin-like protein 5 [Nicotiana tabacum]
MDGTSEQPGLAPRAIKELFNEASMDQTHSVTFRMSMLEIYMGNLKDLLSARQSLKSYEASAKCNLNIQVDSKGSVEIEGLTEVEVMDFTKARWWYNKGRRVRSTSWTNVNETSSRSHCLTRITIFRRGDAVGSKTEVSKLWMIDLGGSERLLKTGAIGQTMDEGRAINLSLSALGDVIAALRRKKGHVPYRNSKLTQILKDSLGTRSKVLMLVHISPRDEDVGETICSLSFTKRARAVESNRGLTAELQKLREKKISELEEEMEETQEGCKKIKARLQEVECLVNEHKKLFWITNDKYLEDIEKKAISPLDHLKDTDATPISSDKLVKIRKSSGFVPRFMTSTVASRQRQTMSEKEINAKAQSIRSVAKNLTQFSTSQSLSLSDSRSKALLRRSYTKPLQAAANSGTPPETPKRHIKDNSLQRKNMNDTSSPRSKMVTSSDPNVRAKLCHHKRRMSSLT

SEQ ID NO: 46542 - protein, 436 aa, Arabidopsis thaliana
  peptide (1)..(436): Ceres Seq. ID no. 12574603
  misc_feature (1)..(248): Homolog of NCBI NO: 19923321 NR Description: kinesin family member C3 [Homo sapiens]
  misc_feature (1)..(248): Homolog of NCBI NO: 26996539 NR Description: Unknown (protein for MGC:47520) [Homo sapiens]
  misc_feature (1)..(248): Homolog of NCBI NO: 3249735 NR Description: microtubule-based motor [Homo sapiens]
  misc_feature (1)..(216): Homolog of NCBI NO: 1762638 NR Description: microtubule-based motor protein
  misc_feature (1)..(287): Homolog of NCBI NO: 15218418 NR Description: kinesin-related protein; protein id: At1g72250.1
  misc_feature (1)..(258): Homolog of NCBI NO: 15240982 NR Description: kinesin-related protein; protein id: At5g27550.1
  misc_feature (1)..(326): Homolog of NCBI NO: 34902974 NR Description: unnamed protein product [Oryza sativa (japonica
  misc_feature (1)..(343): Homolog of NCBI NO: 18405421 NR Description: kinesin-related protein; protein id: At1g55550.1
  misc_feature (240)..(436): Homolog of NCBI NO: 21555226 NR Description: unknown [Arabidopsis thaliana]
  misc_feature (1)..(435): Homolog of NCBI NO: 13536981 NR Description: BY-2 kinesin-like protein 5 [Nicotiana tabacum]
MDQTHSVTFRMSMLEIYMGNLKDLLSARQSLKSYEASAKCNLNIQVDSKGSVEIEGLTEVEVMDFTKARWWYNKGRRVRSTSWTNVNETSSRSHCLTRITIFRRGDAVGSKTEVSKLWMIDLGGSERLLKTGAIGQTMDEGRAINLSLSALGDVIAALRRKKGHVPYRNSKLTQILKDSLGTRSKVLMLVHISPRDEDVGETICSLSFTKRARAVESNRGLTAELQKLREKKISELEEEMEETQEGCKKIKARLQEVECLVNEHKKLFWITNDKYLEDIEKKAISPLDHLKDTDATPISSDKLVKIRKSSGFVPRFMTSTVASRQRQTMSEKEINAKAQSIRSVAKNLTQFSTSQSLSLSDSRSKALLRRSYTKPLQAAANSGTPPETPKRHIKDNSLQRKNMNDTSSPRSKMVTSSDPNVRAKLCHHKRRMSSLT

SEQ ID NO: 46543 - DNA, 2374 bp, Arabidopsis thaliana
  misc_feature (1)..(2374): Ceres Seq. ID no. 12601157
  misc_feature: MA Experiment ID: 20000173 Result: Up-regulated in Transcription
  misc_feature: MA Experiment 20000173 PARAMETER Experiment Name: At_42deg_Heat_P Parameter: Age (day) Value: 14
  misc_feature: MA Experiment 20000173 PARAMETER Experiment Name: At_42deg_Heat_P Parameter: Organism Value: A. thaliana
  misc_feature: MA Experiment 20000173 PARAMETER Experiment Name: At_42deg_Heat_P Parameter: Plant Line Value: WS
  misc_feature: MA Experiment 20000173 PARAMETER Experiment Name: At_42deg_Heat_P Parameter: Temperature (deg C) Value: 42 vs. 22
  misc_feature: MA Experiment 20000173 PARAMETER Experiment Name: At_42deg_Heat_P Parameter: Timepoint (hr) Value: 6
  misc_feature: MA Experiment 20000173 PARAMETER Experiment Name: At_42deg_Heat_P Parameter: Tissue Value: Aerial
  misc_feature: MA Experiment ID: 20001905 Result: Up-regulated in Transcription
  misc_feature: MA Experiment 20001905 PARAMETER Experiment Name: At_Drought_Reproduction_P Parameter: Age (day) Value: 40
  misc_feature: MA Experiment 20001905 PARAMETER Experiment Name: At_Drought_Reproduction_P Parameter: Organism Value: A. thaliana
  misc_feature: MA Experiment 20001905 PARAMETER Experiment Name: At_Drought_Reproduction_P Parameter: Plant Line Value: WS
  misc_feature: MA Experiment 20001905 PARAMETER Experiment Name: At_Drought_Reproduction_P Parameter: Timepoint (day) Value: 10
  misc_feature: MA Experiment 20001905 PARAMETER Experiment Name: At_Drought_Reproduction_P Parameter: Tissue Value: Rosettes
  misc_feature: MA Experiment 20001905 PARAMETER Experiment Name: At_Drought_Reproduction_P Parameter: Treatment Value: Drought vs. No Drought
aattctcttcttctcatccatagcttccgacgagagagaagaagcaaagcaaaattcgatcgctctgggtttttgatcttttagggtttctggcaaatttggatggaaacctcaactttatccaaagataatcataaaggaagaagctttcgttgttgtttccattgttgcagctccttcaaaaactcttgtctctattgctttcacagctaagaattctcgattccatcgttgtcgttttcgattttgacgaaattgggttcttctagattttggttatggaccgtatagctcaatcagatctctctttaggattcggtagctcccacgctttacctctacctcatcctcctagaatcccaatcgctgatgactcaatcacgcttcagattgattccagcttccgtccttcgtctaatcctatgcctcctgttcctcttcagttacttgagcagagattcgatgtcaccggatcctgtagccgagttgttgaggaggacgatgaggttgttggtgataatgatgatgatgatcaaagagaagaggagcaatttattctcttgggtcatcctatgaagttgaaacgaggtagaggtgggaattcgtattcattggcatcatcaagtccttgtaagagatttgtagttgattcagggattgaaagtaggcgagctgttgttagagcttggggtaatcagtcgattgaagaagctgatcctgagattcatgagtttatggaaaaggagaagcagagacaatttagaggtattgagcttatagcttctgagaatttcgtgtgtagagctgtgatggaagctttaggaagtcatttgactaataagtactctgaaggaatgcctggagctagatactatacggggaatcagtatattgatcagattgagattctttgccaagagcgtgcgcttgcagcttttggactaaatcatgagaaatggggagttaatgtgcagccttattcgtgcacttctgccaatttcgctgttttcactggtcttttgatgcccggtgaacgaattatgggattggattctccctcaggtggtcatatgagtcatgggtattatacaccaggtgggaagaaagtctctggtgcgtctatattctttgagagctttccatataaggttgaccctcgtacagggtatattgattacgataagcttgaggaaaaggcgcttgactatcgtcctaagatacttatttgtggtgggagttcatatccgagggactgggaattccctaggtttaggcatattgcagacaaatgtggagctgttttgatgtttgacatggcacagattagtggtcttgtcgctgccaaggaaagtccaaatccattcgattattgcgatattgttacctcaacaacacacaagtctctccgtggccctaggggcggcatcatattttacaagagaggcttgaagcccaagaagcaaagcataaatcttaatcactgtgagagcaatatccagtatgattttgaagaaaaaatcaacttttctgtctttccatcgttgcaaggggggcctcacaataaccatatagctgctctagccattgccctcaagcaggccgcttcaccagagtacaagctttacatgcgacaggtcaaaaaaaatgctaaggctttagcatctgctttgataagcagaaagtgcaagctgataacaggtggcaccgataatcatttgcttctctgggatctgactcctttgggcttgacaggcaaggtgtatgagaaagtttgcgagatgtgccatatcacggtcaacaaagtggccattttcagcgaaaacggtgttatttcccctggaggagtgagaataggcagtccggctatgacctcaagaggttgtttagaaccagaatttgagacaatggctgattttctatatagagctgctcagatagctagtgctgcacaaagggaacacgggaagttgcaaaaggaaccgctcaaaagcatctatcactgtaaagagattgcagatcttcggaaccaagtcgaagcttttgctactcagtttgcaatgcctgcctttgacatgtgagtcagcctgaagaacgagaccagctcaatctctcttcattttttgttgccatggtaatccatacacccatttctctgttttacaatgtcaacattccctaaattcttagtttaatatttgggggcaaaacaaacttgtgtgtgtttctatggtcgtttattcttcaatgcgtgtgtacatagacattgggctgtgttgggtattagtgtatccctctgtgttcttttagaatggtaataataatgcagttgaaatttatttttctagaaaagggaatgatatgctttcaagatgtt

SEQ ID NO: 46544 - protein, 599 aa, Arabidopsis thaliana
  peptide (1)..(599): Ceres Seq. ID no. 12601158
  misc_feature (142)..(547): Pfam Name: Serine hydroxymethyltransferase Pfam Description: Serine hydroxymethyltransferase
  misc_feature (142)..(599): Homolog of NCBI NO: 39581013 NR Description: Hypothetical protein CBG19673 [Caenorhabditis
  misc_feature (142)..(595): Homolog of NCBI NO: 25144732 NR Description: Serine hydroxymethyltransferase, Maternal Effect
  misc_feature (134)..(597): Homolog of NCBI NO: 15236371 NR Description: glycine hydroxymethyltransferase - like protein
  misc_feature (134)..(599): Homolog of NCBI NO: 11762130 NR Description: AT4g13930 [Arabidopsis thaliana]
  misc_feature (134)..(599): Homolog of NCBI NO: 21592544 NR Description: hydroxymethyltransferase [Arabidopsis thaliana]
  misc_feature (134)..(599): Homolog of NCBI NO: 15236375 NR Description: hydroxymethyltransferase
  misc_feature (104)..(599): Homolog of NCBI NO: 34907298 NR Description: putative hydroxymethyltransferase
  misc_feature (22)..(596): Homolog of NCBI NO: 21537165 NR Description: putative hydroxymethyltransferase [Arabidopsis
  misc_feature (22)..(596): Homolog of NCBI NO: 25286207 NR Description: probable hydroxymethyltransferase, 49598-47322
  misc_feature (5)..(596): Homolog of NCBI NO: 18400090 NR Description: putative hydroxymethyltransferase
MDRIAQSDLSLGFGSSHALPLPHPPRIPIADDSITLQIDSSFRPSSNPMPPVPLQLLEQRFDVTGSCSRVVEEDDEVVGDNDDDDQREEEQFILLGHPMKLKRGRGGNSYSLASSSPCKRFVVDSGIESRRAVVRAWGNQSIEEADPEIHEFMEKEKQRQFRGIELIASENFVCRAVMEALGSHLTNKYSEGMPGARYYTGNQYIDQIEILCQERALAAFGLNHEKWGVNVQPYSCTSANFAVFTGLLMPGERIMGLDSPSGGHMSHGYYTPGGKKVSGASIFFESFPYKVDPRTGYIDYDKLEEKALDYRPKILICGGSSYPRDWEFPRFRHIADKCGAVLMFDMAQISGLVAAKESPNPFDYCDIVTSTTHKSLRGPRGGIIFYKRGLKPKKQSINLNHCESNIQYDFEEKINFSVFPSLQGGPHNNHIAALAIALKQAASPEYKLYMRQVKKNAKALASALISRKCKLITGGTDNHLLLWDLTPLGLTGKVYEKVCEMCHITVNKVAIFSENGVISPGGVRIGSPAMTSRGCLEPEFETMADFLYRAAQIASAAQREHGKLQKEPLKSIYHCKEIADLRNQVEAFATQFAMPAFDM

SEQ ID NO: 46545 - protein, 551 aa, Arabidopsis thaliana
  peptide (1)..(551): Ceres Seq. ID no. 12601159
  misc_feature (94)..(499): Pfam Name: Serine hydroxymethyltransferase Pfam Description: Serine hydroxymethyltransferase
  misc_feature (94)..(551): Homolog of NCBI NO: 39581013 NR Description: Hypothetical protein CBG19673 [Caenorhabditis
  misc_feature (94)..(547): Homolog of NCBI NO: 25144732 NR Description: Serine hydroxymethyltransferase, Maternal Effect
  misc_feature (86)..(549): Homolog of NCBI NO: 15236371 NR Description: glycine hydroxymethyltransferase - like protein
  misc_feature (86)..(551): Homolog of NCBI NO: 11762130 NR Description: AT4g13930 [Arabidopsis thaliana]
  misc_feature (86)..(551): Homolog of NCBI NO: 21592544 NR Description: hydroxymethyltransferase [Arabidopsis thaliana]
  misc_feature (86)..(551): Homolog of NCBI NO: 15236375 NR Description: hydroxymethyltransferase
  misc_feature (56)..(551): Homolog of NCBI NO: 34907298 NR Description: putative hydroxymethyltransferase
  misc_feature (1)..(548): Homolog of NCBI NO: 21537165 NR Description: putative hydroxymethyltransferase [Arabidopsis
  misc_feature (1)..(548): Homolog of NCBI NO: 25286207 NR Description: probable hydroxymethyltransferase, 49598-47322
  misc_feature (1)..(548): Homolog of NCBI NO: 18400090 NR Description: putative hydroxymethyltransferase
MPPVPLQLLEQRFDVTGSCSRVVEEDDEVVGDNDDDDQREEEQFILLGHPMKLKRGRGGNSYSLASSSPCKRFVVDSGIESRRAVVRAWGNQSIEEADPEIHEFMEKEKQRQFRGIELIASENFVCRAVMEALGSHLTNKYSEGMPGARYYTGNQYIDQIEILCQERALAAFGLNHEKWGVNVQPYSCTSANFAVFTGLLMPGERIMGLDSPSGGHMSHGYYTPGGKKVSGASIFFESFPYKVDPRTGYIDYDKLEEKALDYRPKILICGGSSYPRDWEFPRFRHIADKCGAVLMFDMAQISGLVAAKESPNPFDYCDIVTSTTHKSLRGPRGGIIFYKRGLKPKKQSINLNHCESNIQYDFEEKINFSVFPSLQGGPHNNHIAALAIALKQAASPEYKLYMRQVKKNAKALASALISRKCKLITGGTDNHLLLWDLTPLGLTGKVYEKVCEMCHITVNKVAIFSENGVISPGGVRIGSPAMTSRGCLEPEFETMADFLYRAAQIASAAQREHGKLQKEPLKSIYHCKEIADLRNQVEAFATQFAMPAFDM

SEQ ID NO: 46546 - protein, 501 aa, Arabidopsis thaliana
  peptide (1)..(501): Ceres Seq. ID no. 12601160
  misc_feature (44)..(449): Pfam Name: Serine hydroxymethyltransferase Pfam Description: Serine hydroxymethyltransferase
  misc_feature (44)..(501): Homolog of NCBI NO: 39581013 NR Description: Hypothetical protein CBG19673 [Caenorhabditis
  misc_feature (44)..(497): Homolog of NCBI NO: 25144732 NR Description: Serine hydroxymethyltransferase, Maternal Effect
  misc_feature (36)..(499): Homolog of NCBI NO: 15236371 NR Description: glycine hydroxymethyltransferase - like protein
  misc_feature (36)..(501): Homolog of NCBI NO: 11762130 NR Description: AT4g13930 [Arabidopsis thaliana]
  misc_feature (36)..(501): Homolog of NCBI NO: 21592544 NR Description: hydroxymethyltransferase [Arabidopsis thaliana]
  misc_feature (36)..(501): Homolog of NCBI NO: 15236375 NR Description: hydroxymethyltransferase
  misc_feature (6)..(501): Homolog of NCBI NO: 34907298 NR Description: putative hydroxymethyltransferase
  misc_feature (1)..(498): Homolog of NCBI NO: 21537165 NR Description: putative hydroxymethyltransferase [Arabidopsis
  misc_feature (1)..(498): Homolog of NCBI NO: 25286207 NR Description: probable hydroxymethyltransferase, 49598-47322
  misc_feature (1)..(498): Homolog of NCBI NO: 18400090 NR Description: putative hydroxymethyltransferase
MKLKRGRGGNSYSLASSSPCKRFVVDSGIESRRAVVRAWGNQSIEEADPEIHEFMEKEKQRQFRGIELIASENFVCRAVMEALGSHLTNKYSEGMPGARYYTGNQYIDQIEILCQERALAAFGLNHEKWGVNVQPYSCTSANFAVFTGLLMPGERIMGLDSPSGGHMSHGYYTPGGKKVSGASIFFESFPYKVDPRTGYIDYDKLEEKALDYRPKILICGGSSYPRDWEFPRFRHIADKCGAVLMFDMAQISGLVAAKESPNPFDYCDIVTSTTHKSLRGPRGGIIFYKRGLKPKKQSINLNHCESNIQYDFEEKINFSVFPSLQGGPHNNHIAALAIALKQAASPEYKLYMRQVKKNAKALASALISRKCKLITGGTDNHLLLWDLTPLGLTGKVYEKVCEMCHITVNKVAIFSENGVISPGGVRIGSPAMTSRGCLEPEFETMADFLYRAAQIASAAQREHGKLQKEPLKSIYHCKEIADLRNQVEAFATQFAMPAFDM

SEQ ID NO: 46547 - DNA, 1619 bp, Arabidopsis thaliana
  misc_feature (1)..(1619): Ceres Seq. ID no. 14315711
  misc_feature: MA Experiment ID: 20000794 Result: Up-regulated in Transcription
  misc_feature: MA Experiment 20000794 PARAMETER Experiment Name: At_Petals_P Parameter: Age (day) Value: 23-25 days
  misc_feature: MA Experiment 20000794 PARAMETER Experiment Name: At_Petals_P Parameter: Plant Line Value: WS
  misc_feature: MA Experiment 20000794 PARAMETER Experiment Name: At_Petals_P Parameter: Tissue Value: Petals vs. Whole plant
ggttgtctttctcttgcactctctctagttccaaaccctagcaattcctctgttttcaccattttcggagattatcaccttctccccgattcgccgccttgtgattacatctacgtaaagagtttctggtagaaattttccctcttttagctgcagattggcatcagattccgttctggatgtgtaggtgatcgattttacgcgtcggtgatgatagctaacggattcgagagtatggataaagaacgagtcaggaaacgtcctcgtatgacctgggacgaggccccagctgaaccagaggctaaaagggctgtgattaaaggacatggaagcgatgggaggattttgtcaccaccattaagggacgatgatcgtgatggtcattatgttttcagtttgagggacaatctcactcctagatataaaatacttagcaagatgggtgaaggcacatttggtcgggttttggaatgttgggatcgtgatacaaaagaatatgtggcaataaagataattcgaagcattaagaaataccgggatgcagcaatgattgaaattgatgtacttcagaaacttgttaagagtgataaaggccgcacacgctgtgtacagatgaagaactggtttgattaccgaaatcatatttgcattgtgttcgagaagcttgggccaagtttgtttgactttctaaagagaaataaatactccgcatttcctctggcccttgttcgggattttggatgccagcttttggaatctgtagcatatatgcacgagttacagttagttcacaccgacctcaagcctgagaacattctgttggtgtcttctgaaaatgtaaagcttcctgacaataagaggagtgctgcaaatgagacacatttcaggtgcttaccaaagtcaagcgccattaaactgattgattttggcagtactgtttgtgataaccggattcatcactccattgtccaaacaagacattacagatcccccgaggtcattttaggtctaggatggagttaccagtgtgacttatggagtataggttgtatactatttgaactatgcacgggtgaggctctctttcagacgcatgataacctagaacatctagctatgatggagagggcgcttggacctttacctgaacatatgactcgaaaagccagccggggtgctgagaaatatttcaggagagggtgtcggttgaattggccagaaggagccaactctagagaaagtattagggctgtaaaaagacttgatcgtctcaaggatatggtatcgaaacatgttgacaacacgagatctagatttgcagatctattgtatggtttattggcatatgatccatctgagcgtctcacagcaaacgaagctcttgaccatcctttctttaagagctcaagttgagaagaagcaaaatcagaaccataaaatgtagaattttacttggtaacaagtttttttgttagattcctctaaagctcccgttctcagtagcaccaaacagtagtattcctatttcagttacgagtttggctacgtttattctggaaaatacctctgttgtacattgtgttgttgagaatataaaacttgcatcatattttgaaacc

SEQ ID NO: 46548 - protein, 400 aa, Arabidopsis thaliana
  peptide (1)..(400): Ceres Seq. ID no. 14315712
  misc_feature (71)..(396): Pfam Name: Protein kinase domain Pfam Description: Protein kinase domain
  misc_feature (62)..(396): Homolog of NCBI NO: 7211773 NR Description: protein kinase MK5 [Mesembryanthemum crystallinum]
  misc_feature (25)..(396): Homolog of NCBI NO: 15233948 NR Description: protein kinase (AFC2) [Arabidopsis thaliana]
  misc_feature (29)..(396): Homolog of NCBI NO: 7489189 NR Description: protein kinase PK12 (EC 2.7.1.-),
  misc_feature (47)..(399): Homolog of NCBI NO: 601787 NR Description: protein kinase
  misc_feature (47)..(399): Homolog of NCBI NO: 30693861 NR Description: protein kinase (AME2/AFC1) [Arabidopsis thaliana]
  misc_feature (44)..(396): Homolog of NCBI NO: 34908100 NR Description: putative protein kinase AFC1
  misc_feature (47)..(399): Homolog of NCBI NO: 15231839 NR Description: protein kinase (AME2/AFC1) [Arabidopsis thaliana]
  misc_feature (7)..(400): Homolog of NCBI NO: 34912246 NR Description: putative protein kinase AFC3
  misc_feature (6)..(400): Homolog of NCBI NO: 601791 NR Description: protein kinase
  misc_feature (1)..(400): Homolog of NCBI NO: 15233872 NR Description: protein kinase AFC3 [Arabidopsis thaliana]
MIANGFESMDKERVRKRPRMTWDEAPAEPEAKRAVIKGHGSDGRILSPPLRDDDRDGHYVFSLRDNLTPRYKILSKMGEGTFGRVLECWDRDTKEYVAIKIIRSIKKYRDAAMIEIDVLQKLVKSDKGRTRCVQMKNWFDYRNHICIVFEKLGPSLFDFLKRNKYSAFPLALVRDFGCQLLESVAYMHELQLVHTDLKPENILLVSSENVKLPDNKRSAANETHFRCLPKSSAIKLIDFGSTVCDNRIHHSIVQTRHYRSPEVILGLGWSYQCDLWSIGCILFELCTGEALFQTHDNLEHLAMMERALGPLPEHMTRKASRGAEKYFRRGCRLNWPEGANSRESIRAVKRLDRLKDMVSKHVDNTRSRFADLLYGLLAYDPSERLTANEALDHPFFKSSS

SEQ ID NO: 46549 - protein, 392 aa, Arabidopsis thaliana
  peptide (1)..(392): Ceres Seq. ID no. 14315713
  misc_feature (63)..(388): Pfam Name: Protein kinase domain Pfam Description: Protein kinase domain
  misc_feature (54)..(388): Homolog of NCBI NO: 7211773 NR Description: protein kinase MK5 [Mesembryanthemum crystallinum]
  misc_feature (17)..(388): Homolog of NCBI NO: 15233948 NR Description: protein kinase (AFC2) [Arabidopsis thaliana]
  misc_feature (21)..(388): Homolog of NCBI NO: 7489189 NR Description: protein kinase PK12 (EC 2.7.1.-),
  misc_feature (39)..(391): Homolog of NCBI NO: 601787 NR Description: protein kinase
  misc_feature (36)..(388): Homolog of NCBI NO: 34908100 NR Description: putative protein kinase AFC1
  misc_feature (39)..(391): Homolog of NCBI NO: 30693861 NR Description: protein kinase (AME2/AFC1) [Arabidopsis thaliana]
  misc_feature (39)..(391): Homolog of NCBI NO: 15231839 NR Description: protein kinase (AME2/AFC1) [Arabidopsis thaliana]
  misc_feature (1)..(392): Homolog of NCBI NO: 34912246 NR Description: putative protein kinase AFC3
  misc_feature (1)..(392): Homolog of NCBI NO: 601791 NR Description: protein kinase
  misc_feature (1)..(392): Homolog of NCBI NO: 15233872 NR Description: protein kinase AFC3 [Arabidopsis thaliana]
MDKERVRKRPRMTWDEAPAEPEAKRAVIKGHGSDGRILSPPLRDDDRDGHYVFSLRDNLTPRYKILSKMGEGTFGRVLECWDRDTKEYVAIKIIRSIKKYRDAAMIEIDVLQKLVKSDKGRTRCVQMKNWFDYRNHICIVFEKLGPSLFDFLKRNKYSAFPLALVRDFGCQLLESVAYMHELQLVHTDLKPENILLVSSENVKLPDNKRSAANETHFRCLPKSSAIKLIDFGSTVCDNRIHHSIVQTRHYRSPEVILGLGWSYQCDLWSIGCILFELCTGEALFQTHDNLEHLAMMERALGPLPEHMTRKASRGAEKYFRRGCRLNWPEGANSRESIRAVKRLDRLKDMVSKHVDNTRSRFADLLYGLLAYDPSERLTANEALDHPFFKSSS

SEQ ID NO: 46550 - protein, 381 aa, Arabidopsis thaliana
  peptide (1)..(381): Ceres Seq. ID no. 14315714
  misc_feature (52)..(377): Pfam Name: Protein kinase domain Pfam Description: Protein kinase domain
  misc_feature (43)..(377): Homolog of NCBI NO: 7211773 NR Description: protein kinase MK5 [Mesembryanthemum crystallinum]
  misc_feature (6)..(377): Homolog of NCBI NO: 15233948 NR Description: protein kinase (AFC2) [Arabidopsis thaliana]
  misc_feature (10)..(377): Homolog of NCBI NO: 7489189 NR Description: protein kinase PK12 (EC 2.7.1.-),
  misc_feature (28)..(380): Homolog of NCBI NO: 601787 NR Description: protein kinase
  misc_feature (25)..(377): Homolog of NCBI NO: 34908100 NR Description: putative protein kinase AFC1
  misc_feature (28)..(380): Homolog of NCBI NO: 30693861 NR Description: protein kinase (AME2/AFC1) [Arabidopsis thaliana]
  misc_feature (28)..(380): Homolog of NCBI NO: 15231839 NR Description: protein kinase (AME2/AFC1) [Arabidopsis thaliana]
  misc_feature (1)..(381): Homolog of NCBI NO: 34912246 NR Description: putative protein kinase AFC3
  misc_feature (1)..(381): Homolog of NCBI NO: 601791 NR Description: protein kinase
  misc_feature (1)..(381): Homolog of NCBI NO: 15233872 NR Description: protein kinase AFC3 [Arabidopsis thaliana]
MTWDEAPAEPEAKRAVIKGHGSDGRILSPPLRDDDRDGHYVFSLRDNLTPRYKILSKMGEGTFGRVLECWDRDTKEYVAIKIIRSIKKYRDAAMIEIDVLQKLVKSDKGRTRCVQMKNWFDYRNHICIVFEKLGPSLFDFLKRNKYSAFPLALVRDFGCQLLESVAYMHELQLVHTDLKPENILLVSSENVKLPDNKRSAANETHFRCLPKSSAIKLIDFGSTVCDNRIHHSIVQTRHYRSPEVILGLGWSYQCDLWSIGCILFELCTGEALFQTHDNLEHLAMMERALGPLPEHMTRKASRGAEKYFRRGCRLNWPEGANSRESIRAVKRLDRLKDMVSKHVDNTRSRFADLLYGLLAYDPSERLTANEALDHPFFKSSS

SEQ ID NO: 46551 - DNA, 2452 bp, Arabidopsis thaliana
  misc_feature (1)..(2452): Ceres Seq. ID no. 14309946
  misc_feature: MA Experiment ID: 20000171 Result: Down-regulated in Transcription
  misc_feature: MA Experiment 20000171 PARAMETER Experiment Name: At_42deg_Heat_P Parameter: Age (day) Value: 14
  misc_feature: MA Experiment 20000171 PARAMETER Experiment Name: At_42deg_Heat_P Parameter: Organism Value: A. thaliana
  misc_feature: MA Experiment 20000171 PARAMETER Experiment Name: At_42deg_Heat_P Parameter: Plant Line Value: WS
  misc_feature: MA Experiment 20000171 PARAMETER Experiment Name: At_42deg_Heat_P Parameter: Temperature (deg C) Value: 42 vs. 22
  misc_feature: MA Experiment 20000171 PARAMETER Experiment Name: At_42deg_Heat_P Parameter: Timepoint (hr) Value: 1
  misc_feature: MA Experiment 20000171 PARAMETER Experiment Name: At_42deg_Heat_P Parameter: Tissue Value: Aerial
  misc_feature: MA Experiment ID: 20000173 Result: Down-regulated in Transcription
  misc_feature: MA Experiment 20000173 PARAMETER Experiment Name: At_42deg_Heat_P Parameter: Age (day) Value: 14
  misc_feature: MA Experiment 20000173 PARAMETER Experiment Name: At_42deg_Heat_P Parameter: Organism Value: A. thaliana
  misc_feature: MA Experiment 20000173 PARAMETER Experiment Name: At_42deg_Heat_P Parameter: Plant Line Value: WS
  misc_feature: MA Experiment 20000173 PARAMETER Experiment Name: At_42deg_Heat_P Parameter: Temperature (deg C) Value: 42 vs. 22
  misc_feature: MA Experiment 20000173 PARAMETER Experiment Name: At_42deg_Heat_P Parameter: Timepoint (hr) Value: 6
  misc_feature: MA Experiment 20000173 PARAMETER Experiment Name: At_42deg_Heat_P Parameter: Tissue Value: Aerial
  misc_feature: MA Experiment ID: 20000180 Result: Up-regulated in Transcription
  misc_feature: MA Experiment 20000180 PARAMETER Experiment Name: At_Germinating_Seeds_P Parameter: Age (hr) Value: 24 vs. 0
  misc_feature: MA Experiment 20000180 PARAMETER Experiment Name: At_Germinating_Seeds_P Parameter: Tissue Value: Germinating Seeds
  misc_feature: MA Experiment ID: 20000213 Result: Up-regulated in Transcription
  misc_feature: MA Experiment 20000213 PARAMETER Experiment Name: At_4deg_Cold_P Parameter: Timepoint (hr) Value: 2
  misc_feature: MA Experiment ID: 20000235 Result: Up-regulated in Transcription
  misc_feature: MA Experiment 20000235 PARAMETER Experiment Name: At_Siliques_P Parameter: Age (day) Value: 21
  misc_feature: MA Experiment 20000235 PARAMETER Experiment Name: At_Siliques_P Parameter: Organism Value: A. thaliana
  misc_feature: MA Experiment 20000235 PARAMETER Experiment Name: At_Siliques_P Parameter: Plant Line Value: WS
  misc_feature: MA Experiment 20000235 PARAMETER Experiment Name: At_Siliques_P Parameter: Tissue Value: 5-10mm Siliques vs. Whole Plant
  misc_feature: MA Experiment ID: 20000437 Result: Down-regulated in Transcription
  misc_feature: MA Experiment 20000437 PARAMETER Experiment Name: At_Drought_P Parameter: Age (day) Value: 8
  misc_feature: MA Experiment 20000437 PARAMETER Experiment Name: At_Drought_P Parameter: Organism Value: A. thaliana
  misc_feature: MA Experiment 20000437 PARAMETER Experiment Name: At_Drought_P Parameter: Plant Line Value: WS
  misc_feature: MA Experiment 20000437 PARAMETER Experiment Name: At_Drought_P Parameter: Timepoint (hr) Value: 24
  misc_feature: MA Experiment 20000437 PARAMETER Experiment Name: At_Drought_P Parameter: Tissue Value: Whole Plant
  misc_feature: MA Experiment 20000437 PARAMETER Experiment Name: At_Drought_P Parameter: Treatment Value: Drought vs. No Drought
  misc_feature: MA Experiment ID: 20001451 Result: Down-regulated in Transcription
  misc_feature: MA Experiment 20001451 PARAMETER Experiment Name: At_Far-red-induction_P Parameter: Age (day) Value: 7
  misc_feature: MA Experiment 20001451 PARAMETER Experiment Name: At_Far-red-induction_P Parameter: Light Value: Far-red vs. White
  misc_feature: MA Experiment 20001451 PARAMETER Experiment Name: At_Far-red-induction_P Parameter: Organism Value: A. thaliana
  misc_feature: MA Experiment 20001451 PARAMETER Experiment Name: At_Far-red-induction_P Parameter: Plant Line Value: Columbia
  misc_feature: MA Experiment 20001451 PARAMETER Experiment Name: At_Far-red-induction_P Parameter: Timepoint (hr) Value: 24
  misc_feature: MA Experiment 20001451 PARAMETER Experiment Name: At_Far-red-induction_P Parameter: Tissue Value: Whole Plant
  misc_feature: MA Experiment ID: 20001557 Result: Up-regulated in Transcription
  misc_feature: MA Experiment 20001557 PARAMETER Experiment Name: At_Drought_Soil_Dry_P Parameter: Age (day) Value: 27
  misc_feature: MA Experiment 20001557 PARAMETER Experiment Name: At_Drought_Soil_Dry_P Parameter: Organism Value: A. thaliana
  misc_feature: MA Experiment 20001557 PARAMETER Experiment Name: At_Drought_Soil_Dry_P Parameter: Plant Line Value: WS
  misc_feature: MA Experiment 20001557 PARAMETER Experiment Name: At_Drought_Soil_Dry_P Parameter: Post Timepoint (hr) Value: 3
  misc_feature: MA Experiment 20001557 PARAMETER Experiment Name: At_Drought_Soil_Dry_P Parameter: Post-Treatment Value: Re-Water vs. No Drought
  misc_feature: MA Experiment 20001557 PARAMETER Experiment Name: At_Drought_Soil_Dry_P Parameter: Timepoint (day) Value: 13
  misc_feature: MA Experiment 20001557 PARAMETER Experiment Name: At_Drought_Soil_Dry_P Parameter: Treatment Value: Drought vs. No Drought
  misc_feature: MA Experiment ID: 20001558 Result: Up-regulated in Transcription
  misc_feature: MA Experiment 20001558 PARAMETER Experiment Name: At_Drought_Soil_Dry_P Parameter: Age (day) Value: 27
  misc_feature: MA Experiment 20001558 PARAMETER Experiment Name: At_Drought_Soil_Dry_P Parameter: Organism Value: A. thaliana
  misc_feature: MA Experiment 20001558 PARAMETER Experiment Name: At_Drought_Soil_Dry_P Parameter: Plant Line Value: WS
  misc_feature: MA Experiment 20001558 PARAMETER Experiment Name: At_Drought_Soil_Dry_P Parameter: Post Timepoint (hr) Value: 6
  misc_feature: MA Experiment 20001558 PARAMETER Experiment Name: At_Drought_Soil_Dry_P Parameter: Post-Treatment Value: Re-Water vs. No Drought
  misc_feature: MA Experiment 20001558 PARAMETER Experiment Name: At_Drought_Soil_Dry_P Parameter: Timepoint (day) Value: 13
  misc_feature: MA Experiment 20001558 PARAMETER Experiment Name: At_Drought_Soil_Dry_P Parameter: Treatment Value: Drought vs. No Drought
  misc_feature: MA Experiment ID: 20001560 Result: Up-regulated in Transcription
  misc_feature: MA Experiment 20001560 PARAMETER Experiment Name: At_Drought_Soil_Dry_P Parameter: Age (day) Value: 28
  misc_feature: MA Experiment 20001560 PARAMETER Experiment Name: At_Drought_Soil_Dry_P Parameter: Organism Value: A. thaliana
  misc_feature: MA Experiment 20001560 PARAMETER Experiment Name: At_Drought_Soil_Dry_P Parameter: Plant Line Value: WS
  misc_feature: MA Experiment 20001560 PARAMETER Experiment Name: At_Drought_Soil_Dry_P Parameter: Post Timepoint (hr) Value: None
  misc_feature: MA Experiment 20001560 PARAMETER Experiment Name: At_Drought_Soil_Dry_P Parameter: Post-Treatment Value: None
  misc_feature: MA Experiment 20001560 PARAMETER Experiment Name: At_Drought_Soil_Dry_P Parameter: Timepoint (day) Value: 14
  misc_feature: MA Experiment 20001560 PARAMETER Experiment Name: At_Drought_Soil_Dry_P Parameter: Treatment Value: Drought vs. No Drought
  misc_feature: MA Experiment ID: 20001757 Result: Down-regulated in Transcription
  misc_feature: MA Experiment 20001757 PARAMETER Experiment Name: At_50mM_NH4NO3_L-to-H_P Parameter: Timepoint (hr) Value: 6
  misc_feature: MA Experiment 20001757 PARAMETER Experiment Name: At_50mM_NH4NO3_L-to-H_P Parameter: Tissue Value: Leaf
  misc_feature: MA Experiment 20001757 PARAMETER Experiment Name: At_50mM_NH4NO3_L-to-H_P Parameter: Treatment Value: 50mM NH4NO3 vs 100mM Mannitol
  misc_feature: MA Experiment ID: 20001906 Result: Down-regulated in Transcription
  misc_feature: MA Experiment 20001906 PARAMETER Experiment Name: At_Drought_Reproduction_P Parameter: Age (day) Value: 35
  misc_feature: MA Experiment 20001906 PARAMETER Experiment Name: At_Drought_Reproduction_P Parameter: Organism Value: A. thaliana
  misc_feature: MA Experiment 20001906 PARAMETER Experiment Name: At_Drought_Reproduction_P Parameter: Plant Line Value: WS
  misc_feature: MA Experiment 20001906 PARAMETER Experiment Name: At_Drought_Reproduction_P Parameter: Timepoint (day) Value: 5
  misc_feature: MA Experiment 20001906 PARAMETER Experiment Name: At_Drought_Reproduction_P Parameter: Tissue Value: Siliques
  misc_feature: MA Experiment 20001906 PARAMETER Experiment Name: At_Drought_Reproduction_P Parameter: Treatment Value: Drought vs. No Drought
  misc_feature: MA Experiment ID: 20001908 Result: Down-regulated in Transcription
  misc_feature: MA Experiment 20001908 PARAMETER Experiment Name: At_Drought_Reproduction_P Parameter: Age (day) Value: 40
  misc_feature: MA Experiment 20001908 PARAMETER Experiment Name: At_Drought_Reproduction_P Parameter: Organism Value: A. thaliana
  misc_feature: MA Experiment 20001908 PARAMETER Experiment Name: At_Drought_Reproduction_P Parameter: Plant Line Value: WS
  misc_feature: MA Experiment 20001908 PARAMETER Experiment Name: At_Drought_Reproduction_P Parameter: Timepoint (day) Value: 10
  misc_feature: MA Experiment 20001908 PARAMETER Experiment Name: At_Drought_Reproduction_P Parameter: Tissue Value: Siliques
  misc_feature: MA Experiment 20001908 PARAMETER Experiment Name: At_Drought_Reproduction_P Parameter: Treatment Value: Drought vs. No Drought
  misc_feature: MA Experiment ID: 20001911 Result: Down-regulated in Transcription
  misc_feature: MA Experiment 20001911 PARAMETER Experiment Name: At_Drought_Reproduction_P Parameter: Age (day) Value: 40
  misc_feature: MA Experiment 20001911 PARAMETER Experiment Name: At_Drought_Reproduction_P Parameter: Organism Value: A. thaliana
  misc_feature: MA Experiment 20001911 PARAMETER Experiment Name: At_Drought_Reproduction_P Parameter: Plant Line Value: WS
  misc_feature: MA Experiment 20001911 PARAMETER Experiment Name: At_Drought_Reproduction_P Parameter: Timepoint (day) Value: 10
  misc_feature: MA Experiment 20001911 PARAMETER Experiment Name: At_Drought_Reproduction_P Parameter: Tissue Value: Flowers
  misc_feature: MA Experiment 20001911 PARAMETER Experiment Name: At_Drought_Reproduction_P Parameter: Treatment Value: Drought vs. No Drought
gaatttccaacatgttttgtttatagaaattgaataaaatcaaacgcgccttcatcttcaagttaaaaatcaaatcttaattagtgaagacaaagaagaagaagacattattttaagtgagttctctctctgtcacactcacaaagctttatactttctggctactgcaagctcatcactgaaaagagcttaaaccagagagatctgataagagaaattttagagtctctctgcttcaacaagatctacatcgaccaggaaattagaaagaatcatgggttctaagcataacccaccagggaataacagatcgagaagtacactatctctactcgttgtggttggtttatgttgtttcttctatcttcttggagcatggcaaaagagtgggtttggtaaaggagatagcatagctatggagattacaaagcaagcgcagtgtactgacattgtcactgatcttgattttgaacctcatcacaacacagtgaagatcccacataaagctgatcccaaacctgtttctttcaaaccgtgtgatgtgaagctcaaggattacacgccttgtcaagagcaagaccgagctatgaagttcccgagagagaacatgatttacagagagagacattgtcctcctgataatgagaagctgcgttgtcttgttccagctcctaaagggtatatgactcctttcccttggcctaaaagcagagattatgttcactatgctaatgctcctttcaagagcttgactgtcgaaaaagctggacagaattgggttcagtttcaagggaatgtgtttaaattccctggtggaggaactatgtttcctcaaggtgctgatgcgtatattgaagagctagcttctgttatccctatcaaagatggctctgttagaaccgcattggacactggatgtggggttgctagttggggtgcttatatgcttaagaggaatgttttgactatgtcgtttgcgccaagggataaccacgaagcacaagtccagtttgcgcttgagagaggtgttccagcgattatcgctgttcttggatcaatccttcttccttaccctgcaagagcctttgacatggctcaatgctctcgatgcttgataccatggaccgcaaacgagggaacatacttaatggaagtagatagagtcttgagacctggaggttactgggtcttatcgggtcctccaatcaactggaagacatggcacaagacgtggaaccgaactaaagcagagctaaatgccgagcaaaagagaatagagggaatcgcagagtccttatgctgggagaagaagtatgagaagggagacattgcaattttcagaaagaaaataaacgatagatcatgcgatagatcaacaccggttgacacctgcaaaagaaaggacactgacgatgtctggtacaaggagatagaaacgtgtgtaacaccattccctaaagtatcaaacgaagaagaagttgctggaggaaagctaaagaagttccccgagaggctattcgcagtgcctccaagtatctctaaaggtttgattaatggcgtcgacgaggaatcataccaagaagacatcaatctatggaagaagcgagtgaccggatacaagagaattaacagactgataggttccaccagataccgtaatgtgatggatatgaacgccggtcttggtggattcgctgctgcgcttgaatagcctaaatcatgggttatgaatgtgattccaaccattaacaagaacacattgagtgttgtttatgagagaggtctcattggtatctatcatgactggtgtgaaggcttttcaacttatccaagaacatacgatttcattcacgctagtggtgtcttcagcttgtatcagcacagctgcaaacttgaggatattcttcttgaaactgatcggattttacgaccggaagggattgtgattttccgggatgaggttgatgttttgaatgatgtgaggaagatcgttgatggaatgagatgggatactaagttaatggatcatgaagacggtcctctcgtgccggagaagattcttgtcgccacgaagcagtattgggtagccggcgacgatggaaacaattctccgtcgtcttctaatagtgaagaagaataaaacaaaaacaaaaaactcctcaggttactaagcttgaagtgtagatctattttacaacataaaattcttatcaaaaaaggaaggaatcagaatttccattaaagaaaggtgtcaaaaaaaagttgtaaaactatatagtagtgatcaagacgaatatgtgcatttatgttttatttttgttccctagtttttaattttatttttgaaggaagaaaaaattagttccatgtgtttttgcaagatagttgaaaccttggacgcttgttatgtatgatgcgatcttgacattttttaataacagttattttaaat

SEQ ID NO: 46552 - protein, 478 aa, Arabidopsis thaliana
  peptide (1)..(478): Ceres Seq. ID no. 14309947
  misc_feature (94)..(478): Pfam Name: Putative methyltransferase Pfam Description: Putative methyltransferase
  misc_feature (263)..(478): Homolog of NCBI NO: 9665165 NR Description: Unknown Protein [Arabidopsis thaliana]
  misc_feature (62)..(478): Homolog of NCBI NO: 18398763 NR Description: dehydration-induced protein family [Arabidopsis
  misc_feature (10)..(478): Homolog of NCBI NO: 37535962 NR Description: unknown protein [Oryza sativa (japonica
  misc_feature (2)..(478): Homolog of NCBI NO: 24413975 NR Description: hypothetical protein~similar to Oryza sativa
  misc_feature (5)..(478): Homolog of NCBI NO: 15235080 NR Description: dehydration-induced protein family [Arabidopsis
  misc_feature (10)..(478): Homolog of NCBI NO: 25372106 NR Description: T2P11.4 protein - Arabidopsis thaliana
  misc_feature (33)..(478): Homolog of NCBI NO: 37537004 NR Description: hypothetical protein [Oryza sativa (japonica
  misc_feature (11)..(478): Homolog of NCBI NO: 18071395 NR Description: hypothetical protein [Oryza sativa]
  misc_feature (10)..(478): Homolog of NCBI NO: 18396075 NR Description: dehydration-induced protein family [Arabidopsis
  misc_feature (1)..(478): Homolog of NCBI NO: 6752888 NR Description: unknown [Malus x domestica]
MGSKHNPPGNNRSRSTLSLLVVVGLCCFFYLLGAWQKSGFGKGDSIAMEITKQAQCTDIVTDLDFEPHHNTVKIPHKADPKPVSFKPCDVKLKDYTPCQEQDRAMKFPRENMIYRERHCPPDNEKLRCLVPAPKGYMTPFPWPKSRDYVHYANAPFKSLTVEKAGQNWVQFQGNVFKFPGGGTMFPQGADAYIEELASVIPIKDGSVRTALDTGCGVASWGAYMLKRNVLTMSFAPRDNHEAQVQFALERGVPAIIAVLGSILLPYPARAFDMAQCSRCLIPWTANEGTYLMEVDRVLRPGGYWVLSGPPINWKTWHKTWNRTKAELNAEQKRIEGIAESLCWEKKYEKGDIAIFRKKINDRSCDRSTPVDTCKRKDTDDVWYKEIETCVTPFPKVSNEEEVAGGKLKKFPERLFAVPPSISKGLINGVDEESYQEDINLWKKRVTGYKRINRLIGSTRYRNVMDMNAGLGGFAAALE

SEQ ID NO: 46553 - protein, 431 aa, Arabidopsis thaliana
  peptide (1)..(431): Ceres Seq. ID no. 14309948
  misc_feature (47)..(431): Pfam Name: Putative methyltransferase Pfam Description: Putative methyltransferase
  misc_feature (216)..(431): Homolog of NCBI NO: 9665165 NR Description: Unknown Protein [Arabidopsis thaliana]
  misc_feature (15)..(431): Homolog of NCBI NO: 18398763 NR Description: dehydration-induced protein family [Arabidopsis
  misc_feature (1)..(431): Homolog of NCBI NO: 37535962 NR Description: unknown protein [Oryza sativa (japonica
  misc_feature (1)..(431): Homolog of NCBI NO: 24413975 NR Description: hypothetical protein~similar to Oryza sativa
  misc_feature (1)..(431): Homolog of NCBI NO: 15235080 NR Description: dehydration-induced protein family [Arabidopsis
  misc_feature (1)..(431): Homolog of NCBI NO: 25372106 NR Description: T2P11.4 protein - Arabidopsis thaliana
  misc_feature (1)..(431): Homolog of NCBI NO: 37537004 NR Description: hypothetical protein [Oryza sativa (japonica
  misc_feature (1)..(431): Homolog of NCBI NO: 18071395 NR Description: hypothetical protein [Oryza sativa]
  misc_feature (1)..(431): Homolog of NCBI NO: 18396075 NR Description: dehydration-induced protein family [Arabidopsis
  misc_feature (1)..(431): Homolog of NCBI NO: 6752888 NR Description: unknown [Malus x domestica]
MEITKQAQCTDIVTDLDFEPHHNTVKIPHKADPKPVSFKPCDVKLKDYTPCQEQDRAMKFPRENMIYRERHCPPDNEKLRCLVPAPKGYMTPFPWPKSRDYVHYANAPFKSLTVEKAGQNWVQFQGNVFKFPGGGTMFPQGADAYIEELASVIPIKDGSVRTALDTGCGVASWGAYMLKRNVLTMSFAPRDNHEAQVQFALERGVPAIIAVLGSILLPYPARAFDMAQCSRCLIPWTANEGTYLMEVDRVLRPGGYWVLSGPPINWKTWHKTWNRTKAELNAEQKRIEGIAESLCWEKKYEKGDIAIFRKKINDRSCDRSTPVDTCKRKDTDDVWYKEIETCVTPFPKVSNEEEVAGGKLKKFPERLFAVPPSISKGLINGVDEESYQEDINLWKKRVTGYKRINRLIGSTRYRNVMDMNAGLGGFAAALE

SEQ ID NO: 46554 - protein, 374 aa, Arabidopsis thaliana
  peptide (1)..(374): Ceres Seq. ID no. 14309949
  misc_feature (1)..(374): Pfam Name: Putative methyltransferase Pfam Description: Putative methyltransferase
  misc_feature (159)..(374): Homolog of NCBI NO: 9665165 NR Description: Unknown Protein [Arabidopsis thaliana]
  misc_feature (1)..(374): Homolog of NCBI NO: 18398763 NR Description: dehydration-induced protein family [Arabidopsis
  misc_feature (1)..(374): Homolog of NCBI NO: 37535962 NR Description: unknown protein [Oryza sativa (japonica
  misc_feature (1)..(374): Homolog of NCBI NO: 24413975 NR Description: hypothetical protein~similar to Oryza sativa
  misc_feature (1)..(374): Homolog of NCBI NO: 15235080 NR Description: dehydration-induced protein family [Arabidopsis
  misc_feature (1)..(374): Homolog of NCBI NO: 25372106 NR Description: T2P11.4 protein - Arabidopsis thaliana
  misc_feature (1)..(374): Homolog of NCBI NO: 37537004 NR Description: hypothetical protein [Oryza sativa (japonica
  misc_feature (1)..(374): Homolog of NCBI NO: 18071395 NR Description: hypothetical protein [Oryza sativa]
  misc_feature (1)..(374): Homolog of NCBI NO: 18396075 NR Description: dehydration-induced protein family [Arabidopsis
  misc_feature (1)..(374): Homolog of NCBI NO: 6752888 NR Description: unknown [Malus x domestica]
MKFPRENMIYRERHCPPDNEKLRCLVPAPKGYMTPFPWPKSRDYVHYANAPFKSLTVEKAGQNWVQFQGNVFKFPGGGTMFPQGADAYIEELASVIPIKDGSVRTALDTGCGVASWGAYMLKRNVLTMSFAPRDNHEAQVQFALERGVPAIIAVLGSILLPYPARAFDMAQCSRCLIPWTANEGTYLMEVDRVLRPGGYWVLSGPPINWKTWHKTWNRTKAELNAEQKRIEGIAESLCWEKKYEKGDIAIFRKKINDRSCDRSTPVDTCKRKDTDDVWYKEIETCVTPFPKVSNEEEVAGGKLKKFPERLFAVPPSISKGLINGVDEESYQEDINLWKKRVTGYKRINRLIGSTRYRNVMDMNAGLGGFAAALE

SEQ ID NO: 46555 - DNA, 2125 bp, Arabidopsis thaliana
  misc_feature (1)..(2125): Ceres Seq. ID no. 12575278
  misc_feature: MA Experiment ID: 20000184 Result: Down-regulated in Transcription
  misc_feature: MA Experiment 20000184 PARAMETER Experiment Name: At_Shoots__P Parameter: Age (day) Value: 7
  misc_feature: MA Experiment 20000184 PARAMETER Experiment Name: At_Shoots__P Parameter: Tissue Value: Shoots vs. Whole Plant
  misc_feature: MA Experiment ID: 20000235 Result: Down-regulated in Transcription
  misc_feature: MA Experiment 20000235 PARAMETER Experiment Name: At_Siliques_P Parameter: Age (day) Value: 21
  misc_feature: MA Experiment 20000235 PARAMETER Experiment Name: At_Siliques_P Parameter: Organism Value: A. thaliana
  misc_feature: MA Experiment 20000235 PARAMETER Experiment Name: At_Siliques_P Parameter: Plant Line Value: WS
  misc_feature: MA Experiment 20000235 PARAMETER Experiment Name: At_Siliques_P Parameter: Tissue Value: 5-10mm Siliques vs. Whole Plant
  misc_feature: MA Experiment ID: 20001248 Result: Up-regulated in Transcription
  misc_feature: MA Experiment 20001248 PARAMETER Experiment Name: At_Far-red-induction_P Parameter: Age (day) Value: 7
  misc_feature: MA Experiment 20001248 PARAMETER Experiment Name: At_Far-red-induction_P Parameter: Light Value: Far-red vs. White
  misc_feature: MA Experiment 20001248 PARAMETER Experiment Name: At_Far-red-induction_P Parameter: Organism Value: A. thaliana
  misc_feature: MA Experiment 20001248 PARAMETER Experiment Name: At_Far-red-induction_P Parameter: Plant Line Value: Columbia
  misc_feature: MA Experiment 20001248 PARAMETER Experiment Name: At_Far-red-induction_P Parameter: Timepoint (hr) Value: 4
  misc_feature: MA Experiment 20001248 PARAMETER Experiment Name: At_Far-red-induction_P Parameter: Tissue Value: Whole Plant
  misc_feature: MA Experiment ID: 20001451 Result: Up-regulated in Transcription
  misc_feature: MA Experiment 20001451 PARAMETER Experiment Name: At_Far-red-induction_P Parameter: Age (day) Value: 7
  misc_feature: MA Experiment 20001451 PARAMETER Experiment Name: At_Far-red-induction_P Parameter: Light Value: Far-red vs. White
  misc_feature: MA Experiment 20001451 PARAMETER Experiment Name: At_Far-red-induction_P Parameter: Organism Value: A. thaliana
  misc_feature: MA Experiment 20001451 PARAMETER Experiment Name: At_Far-red-induction_P Parameter: Plant Line Value: Columbia
  misc_feature: MA Experiment 20001451 PARAMETER Experiment Name: At_Far-red-induction_P Parameter: Timepoint (hr) Value: 24
  misc_feature: MA Experiment 20001451 PARAMETER Experiment Name: At_Far-red-induction_P Parameter: Tissue Value: Whole Plant
  misc_feature: MA Experiment ID: 20001911 Result: Up-regulated in Transcription
  misc_feature: MA Experiment 20001911 PARAMETER Experiment Name: At_Drought_Reproduction_P Parameter: Age (day) Value: 40
  misc_feature: MA Experiment 20001911 PARAMETER Experiment Name: At_Drought_Reproduction_P Parameter: Organism Value: A. thaliana
  misc_feature: MA Experiment 20001911 PARAMETER Experiment Name: At_Drought_Reproduction_P Parameter: Plant Line Value: WS
  misc_feature: MA Experiment 20001911 PARAMETER Experiment Name: At_Drought_Reproduction_P Parameter: Timepoint (day) Value: 10
  misc_feature: MA Experiment 20001911 PARAMETER Experiment Name: At_Drought_Reproduction_P Parameter: Tissue Value: Flowers
  misc_feature: MA Experiment 20001911 PARAMETER Experiment Name: At_Drought_Reproduction_P Parameter: Treatment Value: Drought vs. No Drought
aaggagagaatctgaagaagctgaaccagacgaaccataaaccgaggcgagagaggagagagcgagggaggtgatctcttaccacctcttcgtctccggcggcgagaaattcagtttcaatcggagaagagaggaaaaacaaagcgatacgcgagagaaaaagttgtgcaacgatgtcaaagaagaaatcggctgccatgacgcttaaggacttccatggcggctcaataccatctgatctccctctcccttccgctcctggagtgactccgaaggttattccggatcgacctgtttttgatagagcgccttgggggaattcaattggcaggccagatcagagagcaagaccgagttcgtctcatgctattagaaatctcgatgataaatcactgtttctgcctcacaatgtcaatatcggacgtaatttcagtgaagatgaacggaagcctctggatggtcactctgctcctcgtagagtggtcagtgatgatgtttttcggtttgcgaataaccgtttggagatgaaagcagactcggttttagctgggaggcatagtggttgggcagctggtcctttgactcattctgggactggtaatattgagaactcagtgtcaggaaatcactctaatatttggaatgggaggaaggaggtatcagttgctaacaatgagcctggacagtctccatggactaaacaaccagctgtttcgaatttggtccatacaagtgcgcttgaccaagtgtcttcaggaggatggcagtccaagcttttggttccttctcagatgggttttgatgttgttaagcattcagagatagataccagagtttataagactaatagccctgtgattagtcaaggggttgagccacatggaacacatgtagaacgggcactgattgctgaagatgggatccagcgtgggaaaaaactctcccgtgagtatgagaaaatccctggtccaacttatgtggatgctaaggaagcgaaaattgtagcaaacaccaacgataaacctcatccaaaatactctgacgttaagcctgctggacatttggtgcagccaactgccccttctgaagttgtggaaagacctaagctgaacctgcttcctcggacaaaaccacttgaaagtgtggagaaacctgtgaatgacgaaaaactggaaaatagtgcttcagtccttatacaacgtgaaaatgcgacacagaaaagtttcaacaattcaaaatctggtttgtctacagatgagattcctaaccagccggctgagcggcccaagttgaatctgaagcctgtggcacagttgcttgagcagccagaagttaaaactgaaaaggacagaagtgcggtttttggtggtgccagaccacgagagctggtgttgaaggagagaggcattgatgagcccgagcatcacaaattggatcaaccgacagataggatggtcctcaaaccgattgaaagagttccagagcatgcaagtcaaaggccagtgagttctccacgtgacatgagaacgaggaaattcgaccaaaaggatgggcgaaatgtaagcgacattgccagatccgaaactcagaggagaaactggcgtgaaaatgaaaacaagagcgcaagacagcaacagcagactcaggagaagacaagacatccatcaccagagacatggcgaaagccggttccccagaaactggattcaccaaatggaacagggattcgtcacggaaaagcagcttctgctcttgagctagctcaagcctattctcctttctctgaccctaaatctggaattggaagcagcaacagttttaacaaaagccgcaacaaccaaacgcagcagcaacccttctctcggttggtaggatcgacaacaacaggaagacagattaatgggtactgagtcatcgttcgtttgttctctcgaattggttttagtcccgattaattggatcttaataacacatcttatgtggtttgggatcgttattggagatttgaatgtgatatgttcccttaagaacggggtcgggttacataagccagatatgattacactgtgttcttcattcttctttggttatacattttattttaaccgttcgtttggaagatttg

SEQ ID NO: 46556 - protein, 578 aa, Arabidopsis thaliana
  peptide (1)..(578): Ceres Seq. ID no. 12575279
  misc_feature (1)..(443): Homolog of NCBI NO: 34898492 NR Description: OJ1612_A04.2 [Oryza sativa (japonica
  misc_feature (299)..(578): Homolog of NCBI NO: 34898492 NR Description: OJ1612_A04.2 [Oryza sativa (japonica
  misc_feature (27)..(102): Homolog of NCBI NO: 33146526 NR Description: unknown protein [Oryza sativa (japonica
  misc_feature (1)..(45): Homolog of NCBI NO: 33146526 NR Description: unknown protein [Oryza sativa (japonica
  misc_feature (154)..(578): Homolog of NCBI NO: 33146526 NR Description: unknown protein [Oryza sativa (japonica
  misc_feature (264)..(406): Homolog of NCBI NO: 25402665 NR Description: protein T23J18.15 [imported] - Arabidopsis
  misc_feature (427)..(578): Homolog of NCBI NO: 25402665 NR Description: protein T23J18.15 [imported] - Arabidopsis
  misc_feature (1)..(333): Homolog of NCBI NO: 25402665 NR Description: protein T23J18.15 [imported] - Arabidopsis
  misc_feature (1)..(578): Homolog of NCBI NO: 18391283 NR Description: expressed protein
MSKKKSAAMTLKDFHGGSIPSDLPLPSAPGVTPKVIPDRPVFDRAPWGNSIGRPDQRARPSSSHAIRNLDDKSLFLPHNVNIGRNFSEDERKPLDGHSAPRRVVSDDVFRFANNRLEMKADSVLAGRHSGWAAGPLTHSGTGNIENSVSGNHSNIWNGRKEVSVANNEPGQSPWTKQPAVSNLVHTSALDQVSSGGWQSKLLVPSQMGFDVVKHSEIDTRVYKTNSPVISQGVEPHGTHVERALIAEDGIQRGKKLSREYEKIPGPTYVDAKEAKIVANTNDKPHPKYSDVKPAGHLVQPTAPSEVVERPKLNLLPRTKPLESVEKPVNDEKLENSASVLIQRENATQKSFNNSKSGLSTDEIPNQPAERPKLNLKPVAQLLEQPEVKTEKDRSAVFGGARPRELVLKERGIDEPEHHKLDQPTDRMVLKPIERVPEHASQRPVSSPRDMRTRKFDQKDGRNVSDIARSETQRRNWRENENKSARQQQQTQEKTRHPSPETWRKPVPQKLDSPNGTGIRHGKAASALELAQAYSPFSDPKSGIGSSNSFNKSRNNQTQQQPFSRLVGSTTTGRQINGY

SEQ ID NO: 46557 - protein, 570 aa, Arabidopsis thaliana
  peptide (1)..(570): Ceres Seq. ID no. 12575280
  misc_feature (1)..(435): Homolog of NCBI NO: 34898492 NR Description: OJ1612_A04.2 [Oryza sativa (japonica
  misc_feature (291)..(570): Homolog of NCBI NO: 34898492 NR Description: OJ1612_A04.2 [Oryza sativa (japonica
  misc_feature (19)..(94): Homolog of NCBI NO: 33146526 NR Description: unknown protein [Oryza sativa (japonica
  misc_feature (1)..(37): Homolog of NCBI NO: 33146526 NR Description: unknown protein [Oryza sativa (japonica
  misc_feature (146)..(570): Homolog of NCBI NO: 33146526 NR Description: unknown protein [Oryza sativa (japonica
  misc_feature (256)..(398): Homolog of NCBI NO: 25402665 NR Description: protein T23J18.15 [imported] - Arabidopsis
  misc_feature (419)..(570): Homolog of NCBI NO: 25402665 NR Description: protein T23J18.15 [imported] - Arabidopsis
  misc_feature (1)..(325): Homolog of NCBI NO: 25402665 NR Description: protein T23J18.15 [imported] - Arabidopsis
  misc_feature (1)..(570): Homolog of NCBI NO: 18391283 NR Description: expressed protein
MTLKDFHGGSIPSDLPLPSAPGVTPKVIPDRPVFDRAPWGNSIGRPDQRARPSSSHAIRNLDDKSLFLPHNVNIGRNFSEDERKPLDGHSAPRRVVSDDVFRFANNRLEMKADSVLAGRHSGWAAGPLTHSGTGNIENSVSGNHSNIWNGRKEVSVANNEPGQSPWTKQPAVSNLVHTSALDQVSSGGWQSKLLVPSQMGFDVVKHSEIDTRVYKTNSPVISQGVEPHGTHVERALIAEDGIQRGKKLSREYEKIPGPTYVDAKEAKIVANTNDKPHPKYSDVKPAGHLVQPTAPSEVVERPKLNLLPRTKPLESVEKPVNDEKLENSASVLIQRENATQKSFNNSKSGLSTDEIPNQPAERPKLNLKPVAQLLEQPEVKTEKDRSAVFGGARPRELVLKERGIDEPEHHKLDQPTDRMVLKPIERVPEHASQRPVSSPRDMRTRKFDQKDGRNVSDIARSETQRRNWRENENKSARQQQQTQEKTRHPSPETWRKPVPQKLDSPNGTGIRHGKAASALELAQAYSPFSDPKSGIGSSNSFNKSRNNQTQQQPFSRLVGSTTTGRQINGY

SEQ ID NO: 46558 - protein, 461 aa, Arabidopsis thaliana
  peptide (1)..(461): Ceres Seq. ID no. 12575281
  misc_feature (1)..(326): Homolog of NCBI NO: 34898492 NR Description: OJ1612_A04.2 [Oryza sativa (japonica
  misc_feature (182)..(461): Homolog of NCBI NO: 34898492 NR Description: OJ1612_A04.2 [Oryza sativa (japonica
  misc_feature (37)..(461): Homolog of NCBI NO: 33146526 NR Description: unknown protein [Oryza sativa (japonica
  misc_feature (147)..(289): Homolog of NCBI NO: 25402665 NR Description: protein T23J18.15 [imported] - Arabidopsis
  misc_feature (310)..(461): Homolog of NCBI NO: 25402665 NR Description: protein T23J18.15 [imported] - Arabidopsis
  misc_feature (1)..(216): Homolog of NCBI NO: 25402665 NR Description: protein T23J18.15 [imported] - Arabidopsis
  misc_feature (1)..(461): Homolog of NCBI NO: 18391283 NR Description: expressed protein
MKADSVLAGRHSGWAAGPLTHSGTGNIENSVSGNHSNIWNGRKEVSVANNEPGQSPWTKQPAVSNLVHTSALDQVSSGGWQSKLLVPSQMGFDVVKHSEIDTRVYKTNSPVISQGVEPHGTHVERALIAEDGIQRGKKLSREYEKIPGPTYVDAKEAKIVANTNDKPHPKYSDVKPAGHLVQPTAPSEVVERPKLNLLPRTKPLESVEKPVNDEKLENSASVLIQRENATQKSFNNSKSGLSTDEIPNQPAERPKLNLKPVAQLLEQPEVKTEKDRSAVFGGARPRELVLKERGIDEPEHHKLDQPTDRMVLKPIERVPEHASQRPVSSPRDMRTRKFDQKDGRNVSDIARSETQRRNWRENENKSARQQQQTQEKTRHPSPETWRKPVPQKLDSPNGTGIRHGKAASALELAQAYSPFSDPKSGIGSSNSFNKSRNNQTQQQPFSRLVGSTTTGRQINGY

SEQ ID NO: 46559 - DNA, 1882 bp, Arabidopsis thaliana
  misc_feature (1)..(1882): Ceres Seq. ID no. 12575282
  misc_feature: MA Experiment ID: 20001905 Result: Up-regulated in Transcription
  misc_feature: MA Experiment 20001905 PARAMETER Experiment Name: At_Drought_Reproduction_P Parameter: Age (day) Value: 40
  misc_feature: MA Experiment 20001905 PARAMETER Experiment Name: At_Drought_Reproduction_P Parameter: Organism Value: A. thaliana
  misc_feature: MA Experiment 20001905 PARAMETER Experiment Name: At_Drought_Reproduction_P Parameter: Plant Line Value: WS
  misc_feature: MA Experiment 20001905 PARAMETER Experiment Name: At_Drought_Reproduction_P Parameter: Timepoint (day) Value: 10
  misc_feature: MA Experiment 20001905 PARAMETER Experiment Name: At_Drought_Reproduction_P Parameter: Tissue Value: Rosettes
  misc_feature: MA Experiment 20001905 PARAMETER Experiment Name: At_Drought_Reproduction_P Parameter: Treatment Value: Drought vs. No Drought
tctctctctcttctgagatttttccgtcgaaatattaaaaagaaatttgcagatacagaacttgttctaatctctctctgttttttttccctatgaattttatataatacgaaagagacacacaacactgtattatctttgcttctctcttctctctctttctatctctacagagtaaagttctgatcgtgtctcttatcgtttacccaaaaacccttgtttgatctctcgtctcttgttttcttctgccctcgaagttttcaggttatgtggtggaggttgtttccaatttaaagtatgtacctttaggttagaaattaggcttatttgtttctccagtgggtttcattgtagaaacaaattgaattttaggtgttaatgtgagattaggaaacagaatctctgcttttaacaaggtaataggagaatagggtttagtagaagaaaggttaaaactttgtgatgggtaataagttgggaaggaagaggcaagtggtggaagaaaggtatacaaagcctcaaggtttgtatgtgaataaagatgtcgacgttaaaaagctcagaaaactgattgtggagtctaagcttgctccttgctatcctggagacgatgaaagctgtcatgatcttgaagaatgtccaatttgttttctgtactatcctagcctcaatagatcaagatgttgcatgaaaagcatttgtacagagtgttttttgcaaatgaagaatcctaattcagctcggcctactcagtgccctttttgtaaaactcccaactatgctgtcgagtatcgtggagtcaagtcaaaggaggaaaagggcattgaacaagttgaagagcaacgggtaatagaagccaaaataaggatgaggcagaaagaaatgcaggatgatgaagagaaaatgcagaaacgtcttgaatcatgttcctctagcacaagcgcaatgactggcgagatggaatatggttcaacttcagccatatcttataactccctcatggatgacggggaaattgctccatcgcagaacgcatctgttgttagacaacattcccgcccgcgaggaaacagggaggatgaggttgacgttgaccttgaggaattgatggtcatggaagcaatatggctctctgttcaggaaacagggacgcagagaaattcagcttcaggggaaattacctcttctaggcagtatgtaacagataatcatagttatgtttcttcaccaccacgagtgactccaatcgtagaaccagcaacaccgtcttcatcatctggtgggctttcttgtgcaatctccgcacttgctgaacgccaaatggttggcgaatcctccagtcacaatcataatcacaatgtcaacgtttcttcatacagtatgcttcccggaaattgtgacagttactacgacatagaacaagaggtagatggcatagacaaccatcatcatcatcgtcatcattacgagatgggagaaacaggaagcagcaacagctatgtaagttcttacatgacaggcgagggcttccacaactttcctcctcctccacctctggtcattgttccagagagttttgaggaacagatgatgatggctatggctgtgtctatggcagaggttcatgccacgacgacatgtgcaccaactgaagttacctggcaataaataggataataatggaaactcatgggtctgaatctgatgatgattataacttcattcatatatgtctgttcctataggaagaaagaaaagaaacgaaatgatttccagttttaatagaaaaaggttgggttgtgttacagcttctttaattctttgtggttcttctttttcaatctgcattgacaaaaaatttgaagatcacttgttttgtgtc

SEQ ID NO: 46560 - protein, 401 aa, Arabidopsis thaliana
  peptide (1)..(401): Ceres Seq. ID no. 12575283
  misc_feature (66)..(329): Homolog of NCBI NO: 18394446 NR Description: Expressed protein
  misc_feature (1)..(97): Homolog of NCBI NO: 8052547 NR Description: F3F9.7 [Arabidopsis thaliana]
  misc_feature (1)..(329): Homolog of NCBI NO: 25373045 NR Description: F20D23.17 protein - Arabidopsis thaliana
  misc_feature (1)..(315): Homolog of NCBI NO: 18394446 NR Description: Expressed protein
  misc_feature (46)..(401): Homolog of NCBI NO: 8052547 NR Description: F3F9.7 [Arabidopsis thaliana]
  misc_feature (1)..(401): Homolog of NCBI NO: 18411948 NR Description: expressed protein
MGNKLGRKRQVVEERYTKPQGLYVNKDVDVKKLRKLIVESKLAPCYPGDDESCHDLEECPICFLYYPSLNRSRCCMKSICTECFLQMKNPNSARPTQCPFCKTPNYAVEYRGVKSKEEKGIEQVEEQRVIEAKIRMRQKEMQDDEEKMQKRLESCSSSTSAMTGEMEYGSTSAISYNSLMDDGEIAPSQNASVVRQHSRPRGNREDEVDVDLEELMVMEAIWLSVQETGTQRNSASGEITSSRQYVTDNHSYVSSPPRVTPIVEPATPSSSSGGLSCAISALAERQMVGESSSHNHNHNVNVSSYSMLPGNCDSYYDIEQEVDGIDNHHHHRHHYEMGETGSSNSYVSSYMTGEGFHNFPPPPPLVIVPESFEEQMMMAMAVSMAEVHATTTCAPTEVTWQ

SEQ ID NO: 46561 - protein, 326 aa, Arabidopsis thaliana
  peptide (1)..(326): Ceres Seq. ID no. 12575284
  misc_feature (1)..(254): Homolog of NCBI NO: 18394446 NR Description: Expressed protein
  misc_feature (1)..(22): Homolog of NCBI NO: 8052547 NR Description: F3F9.7 [Arabidopsis thaliana]
  misc_feature (1)..(254): Homolog of NCBI NO: 25373045 NR Description: F20D23.17 protein - Arabidopsis thaliana
  misc_feature (1)..(240): Homolog of NCBI NO: 18394446 NR Description: Expressed protein
  misc_feature (1)..(326): Homolog of NCBI NO: 8052547 NR Description: F3F9.7 [Arabidopsis thaliana]
  misc_feature (1)..(326): Homolog of NCBI NO: 18411948 NR Description: expressed protein
MKSICTECFLQMKNPNSARPTQCPFCKTPNYAVEYRGVKSKEEKGIEQVEEQRVIEAKIRMRQKEMQDDEEKMQKRLESCSSSTSAMTGEMEYGSTSAISYNSLMDDGEIAPSQNASVVRQHSRPRGNREDEVDVDLEELMVMEAIWLSVQETGTQRNSASGEITSSRQYVTDNHSYVSSPPRVTPIVEPATPSSSSGGLSCAISALAERQMVGESSSHNHNHNVNVSSYSMLPGNCDSYYDIEQEVDGIDNHHHHRHHYEMGETGSSNSYVSSYMTGEGFHNFPPPPPLVIVPESFEEQMMMAMAVSMAEVHATTTCAPTEVTWQ

SEQ ID NO: 46562 - protein, 315 aa, Arabidopsis thaliana
  peptide (1)..(315): Ceres Seq. ID no. 12575285
  misc_feature (1)..(243): Homolog of NCBI NO: 18394446 NR Description: Expressed protein
  misc_feature (1)..(11): Homolog of NCBI NO: 8052547 NR Description: F3F9.7 [Arabidopsis thaliana]
  misc_feature (1)..(243): Homolog of NCBI NO: 25373045 NR Description: F20D23.17 protein - Arabidopsis thaliana
  misc_feature (1)..(229): Homolog of NCBI NO: 18394446 NR Description: Expressed protein
  misc_feature (1)..(315): Homolog of NCBI NO: 8052547 NR Description: F3F9.7 [Arabidopsis thaliana]
  misc_feature (1)..(315): Homolog of NCBI NO: 18411948 NR Description: expressed protein
MKNPNSARPTQCPFCKTPNYAVEYRGVKSKEEKGIEQVEEQRVIEAKIRMRQKEMQDDEEKMQKRLESCSSSTSAMTGEMEYGSTSAISYNSLMDDGEIAPSQNASVVRQHSRPRGNREDEVDVDLEELMVMEAIWLSVQETGTQRNSASGEITSSRQYVTDNHSYVSSPPRVTPIVEPATPSSSSGGLSCAISALAERQMVGESSSHNHNHNVNVSSYSMLPGNCDSYYDIEQEVDGIDNHHHHRHHYEMGETGSSNSYVSSYMTGEGFHNFPPPPPLVIVPESFEEQMMMAMAVSMAEVHATTTCAPTEVTWQ

SEQ ID NO: 46563 - DNA, 1357 bp, Arabidopsis thaliana
  misc_feature (1)..(1357): Ceres Seq. ID no. 14309927
  misc_feature: MA Experiment ID: 108595 Result: Up-regulated in Transcription
  misc_feature: MA Experiment 108595 PARAMETER Experiment Name: At_Ler-pi_Ovule_cDNA_P Parameter: Plant Line Value: null
  misc_feature: MA Experiment ID: 20000111 Result: Down-regulated in Transcription
  misc_feature: MA Experiment 20000111 PARAMETER Experiment Name: At_42deg_Heat_cDNA_P Parameter: Temperature (deg C) Value: 42 vs. 22
  misc_feature: MA Experiment 20000111 PARAMETER Experiment Name: At_42deg_Heat_cDNA_P Parameter: Timepoint (hr) Value: 6
  misc_feature: MA Experiment 20000111 PARAMETER Experiment Name: At_42deg_Heat_cDNA_P Parameter: Tissue Value: Aerial
  misc_feature: MA Experiment ID: 20000794 Result: Up-regulated in Transcription
  misc_feature: MA Experiment 20000794 PARAMETER Experiment Name: At_Petals_P Parameter: Age (day) Value: 23-25 days
  misc_feature: MA Experiment 20000794 PARAMETER Experiment Name: At_Petals_P Parameter: Plant Line Value: WS
  misc_feature: MA Experiment 20000794 PARAMETER Experiment Name: At_Petals_P Parameter: Tissue Value: Petals vs. Whole plant
aagagcagatcctcagctcgttgaagacttggagaagcatctttatgtaaatgccgctttagagcgtttggagcagagaaaattgtactggaatgagcataagctctctatttacagcaaagtgtgcacaacggctagaaatcagactcaatcattgtcacctcctgatgtttctcgagttggttatcaagcacccagctggggccatggagcgccagatagcggctccaatgatcaagataaatcaactgaagattcttcagcggataagtcagatggagaatctcaatcaagtttggaaaagggttgtgataatgatcttggtcatcctctagaagatcaagacgcaccgtcgtcttcctcatgcaatggaagtaaaggtttcctgtctcaccaaattgacaccaaagacctgaaggacaacgacgcgtacaacttttatcagtctgttgatggtcagcacattatccttcacactttgaatgtgaagtgccttctgcatcactatggaagctatgactttcttccaccaagattgagtggaaagatactggaaatggaaaccattacccaatcagaagcgataaggagacgctaccgctttttaagtcatttttctttatcaactacacttcagatatgtgagattgatatgaaggaatccttgcctcctgatgcatttgctccatttatacatgaaattaagaagcgtgagaagcagcggaaagaacgtgcttggaaggatcgaaaaaataaaatcaaagctgaagtagctgcagctgcagagcttgtaccattgatggccagttttgggcagtcgtcttctagtgatgactttcccccattttccttggatgactttgaagctctgggaaactctgccccaatatcatcaagccctccaaacattggagagagaagttccttctcacatgtgacaaggctcggtttcgcagctggtcacgactccccaaacctgaataacgagccaacaaacgttcaaagcagcagcagcagcagtgaagtctcaaacgcaaccacaggtgcaagaaacacaaacataacatccttcgcgagtgtagcttcaagaacaacaacaccaatggcaccaaccgtcaaagagcccggtaagagagggaagaaacagagccgagtacttctatcgacaactagtgtacgccgttactgaaaaggcctatggatttgtgtatgtataataatcttttcatctaagaaaaactgaataaagaaagaaccagagattatggtgagtgagtaagtgtaaaactcaaacttgggctttgtttctttttgcaacccatgtgactgataatgaaggtgtctctcattactactc

SEQ ID NO: 46564 - protein, 395 aa, Arabidopsis thaliana
  peptide (1)..(395): Ceres Seq. ID no. 14309928
  misc_feature (138)..(325): Homolog of NCBI NO: 35192993 NR Description: Unknown (protein for MGC:66973) [Mus musculus]
  misc_feature (138)..(325): Homolog of NCBI NO: 34872649 NR Description: similar to ring finger protein 10 [Rattus
  misc_feature (91)..(325): Homolog of NCBI NO: 34452681 NR Description: ring finger protein 10 [Homo sapiens]
  misc_feature (91)..(325): Homolog of NCBI NO: 30584221 NR Description: Homo sapiens ring finger protein 10 [synthetic
  misc_feature (91)..(325): Homolog of NCBI NO: 21619487 NR Description: ring finger protein 10 [Homo sapiens]
  misc_feature (91)..(325): Homolog of NCBI NO: 9367867 NR Description: RNF10, ring finger 10
  misc_feature (119)..(342): Homolog of NCBI NO: 40675653 NR Description: Unknown (protein for MGC:75603) [Silurana
  misc_feature (1)..(150): Homolog of NCBI NO: 1402890 NR Description: unknown [Arabidopsis thaliana]
  misc_feature (186)..(376): Homolog of NCBI NO: 1402891 NR Description: unknown [Arabidopsis thaliana]
  misc_feature (1)..(395): Homolog of NCBI NO: 22331355 NR Description: zinc finger (C3HC4-type RING finger) protein
RADPQLVEDLEKHLYVNAALERLEQRKLYWNEHKLSIYSKVCTTARNQTQSLSPPDVSRVGYQAPSWGHGAPDSGSNDQDKSTEDSSADKSDGESQSSLEKGCDNDLGHPLEDQDAPSSSSCNGSKGFLSHQIDTKDLKDNDAYNFYQSVDGQHIILHTLNVKCLLHHYGSYDFLPPRLSGKILEMETITQSEAIRRRYRFLSHFSLSTTLQICEIDMKESLPPDAFAPFIHEIKKREKQRKERAWKDRKNKIKAEVAAAAELVPLMASFGQSSSSDDFPPFSLDDFEALGNSAPISSSPPNIGERSSFSHVTRLGFAAGHDSPNLNNEPTNVQSSSSSSEVSNATTGARNTNITSFASVASRTTTPMAPTVKEPGKRGKKQSRVLLSTTSVRRY

SEQ ID NO: 46565 - protein, 210 aa, Arabidopsis thaliana
  peptide (1)..(210): Ceres Seq. ID no. 14309929
  misc_feature (1)..(140): Homolog of NCBI NO: 16307585 NR Description: ring finger protein 10 [Mus musculus]
  misc_feature (1)..(140): Homolog of NCBI NO: 35192993 NR Description: Unknown (protein for MGC:66973) [Mus musculus]
  misc_feature (1)..(140): Homolog of NCBI NO: 34872649 NR Description: similar to ring finger protein 10 [Rattus
  misc_feature (1)..(140): Homolog of NCBI NO: 34452681 NR Description: ring finger protein 10 [Homo sapiens]
  misc_feature (1)..(140): Homolog of NCBI NO: 30584221 NR Description: Homo sapiens ring finger protein 10 [synthetic
  misc_feature (1)..(140): Homolog of NCBI NO: 21619487 NR Description: ring finger protein 10 [Homo sapiens]
  misc_feature (1)..(140): Homolog of NCBI NO: 9367867 NR Description: RNF10, ring finger 10
  misc_feature (1)..(157): Homolog of NCBI NO: 40675653 NR Description: Unknown (protein for MGC:75603) [Silurana
  misc_feature (1)..(191): Homolog of NCBI NO: 1402891 NR Description: unknown [Arabidopsis thaliana]
  misc_feature (1)..(210): Homolog of NCBI NO: 22331355 NR Description: zinc finger (C3HC4-type RING finger) protein
METITQSEAIRRRYRFLSHFSLSTTLQICEIDMKESLPPDAFAPFIHEIKKREKQRKERAWKDRKNKIKAEVAAAAELVPLMASFGQSSSSDDFPPFSLDDFEALGNSAPISSSPPNIGERSSFSHVTRLGFAAGHDSPNLNNEPTNVQSSSSSSEVSNATTGARNTNITSFASVASRTTTPMAPTVKEPGKRGKKQSRVLLSTTSVRRY

SEQ ID NO: 46566 - DNA, 1882 bp, Arabidopsis thaliana
  misc_feature (1)..(1882): Ceres Seq. ID no. 13591806
  misc_feature: MA Experiment ID: 20000171 Result: Down-regulated in Transcription
  misc_feature: MA Experiment 20000171 PARAMETER Experiment Name: At_42deg_Heat_P Parameter: Age (day) Value: 14
  misc_feature: MA Experiment 20000171 PARAMETER Experiment Name: At_42deg_Heat_P Parameter: Organism Value: A. thaliana
  misc_feature: MA Experiment 20000171 PARAMETER Experiment Name: At_42deg_Heat_P Parameter: Plant Line Value: WS
  misc_feature: MA Experiment 20000171 PARAMETER Experiment Name: At_42deg_Heat_P Parameter: Temperature (deg C) Value: 42 vs. 22
  misc_feature: MA Experiment 20000171 PARAMETER Experiment Name: At_42deg_Heat_P Parameter: Timepoint (hr) Value: 1
  misc_feature: MA Experiment 20000171 PARAMETER Experiment Name: At_42deg_Heat_P Parameter: Tissue Value: Aerial
  misc_feature: MA Experiment ID: 20000184 Result: Up-regulated in Transcription
  misc_feature: MA Experiment 20000184 PARAMETER Experiment Name: At_Shoots__P Parameter: Age (day) Value: 7
  misc_feature: MA Experiment 20000184 PARAMETER Experiment Name: At_Shoots__P Parameter: Tissue Value: Shoots vs. Whole Plant
agtttttaaaaaccttctctcatcctcttcctcaagcctccctcctcctctttaatctcaccagtcaccatgaaagtttagagattttttgaaagaacaaacagatatcgaattcgagttttgcaaaaatggtatcggtggaggaacctttatctcattccaattccactcgctttccgttaacaaccgatttctacggttcatcatcgccgtcggcggcgaggttacaccgtcaagctggccggtcgatgagaacagtgagatctaacttctatcaaagcggagatcaatcttgctcattcgtcggctcaatcggcgataaatcagagtatgcgtcggagtttctctcggattccgtcatcgacatgagactcggcgagcttgctttgaaaaacagtaattctctcaattcaaacgcttcctcaatgaaagaggaagcgtttctcgacatttctcaggcgtttagtgatttttccgcttgtagtagtgatatctccggcgagttacagcgtcttgcttgcttgccgtcgccggaggctgatagaaatgagagcggcggagataacgaagcggagcatgatccagagttagagagagagccttgtctagggtttctacagagagaaaacttctctacagagattatcgagtgtatttcgccggaagatctgcagccaactgtgaaactatgcatcgacggacttcgttcctcttcggtggcgataaagcgatctgctgcggcgaagctacggctattggcgaagaatcgagcggataatcgtgtgttgattggggaatctggagctattcaagctttgattccacttcttcgttgtaacgatccatggacgcaagagcacgcagttacagctctgttaaacctcctcgttacacgaccagaacaaagctgtaatcgccgcaggaggagcgattaaatcactagtgtgggtactcaaaacggggacggagacttcaaagcagaacgctgcatgtgctttgcttagtttggcgctattggaggagaacaaaggctcaatcggagcttgcggtgctattccgccgctggtttctcttctgttgaacggatcttgcaggggaaagaaggatgcgttgacgacgctctacaagctgtgtacgcttcagcaaaacaaggagagagcggtcactgctggagcggtgaagccgttggtggaccttgtggctgaggaagggactggtatggcggagaaagctatggtggttctgagtagccttgcagcgatagatgatggcaaagaggctattgtcgaggaaggagggatcgcagcgcttgttgaggccatcgaggatggatctgtgaaagggaaagaatttgcgatcttgacgctgttgcagctttgttctgatagcgttagaaaccgtgggttgcttgtgagggaaggcgcgattcctccgcttgtgggcctctctcagagcggctccgtcagtgttagagctaagcgcaaggcagaaagacttctggggtatcttcgggagccaaggaaggaggcaagttcatcaagcccatgaaatgcaaccatgtggaggtttcatcagtctagtatgtatatactgagtgtatgtttggtgggttttgtatagcgtcttttgtgtagactgtaaaagagagatcaaatgattaccagaaacttgactgacttttgatctctctcatgtattgatggttaagctagtttttgaggagtttcaagggagagtgcttatttatttggtttacaagtctagcattcaggttttggcttctggtttgtgagggtgggtggattatgctgatttttaaggcaaaaagctttgtagtagcgtcggcaaatggcttgttcaagaactaagcaatttttaatcg

SEQ ID NO: 46567 - protein, 268 aa, Arabidopsis thaliana
  peptide (1)..(268): Ceres Seq. ID no. 13591807
  misc_feature (180)..(254): Homolog of NCBI NO: 28974687 NR Description: arm repeat-containing protein [Nicotiana tabacum]
  misc_feature (172)..(252): Homolog of NCBI NO: 16226454 NR Description: AT3g01400/T13O15_4 [Arabidopsis thaliana]
  misc_feature (194)..(254): Homolog of NCBI NO: 34393600 NR Description: arm repeat-containing protein-like protein
  misc_feature (172)..(252): Homolog of NCBI NO: 21592960 NR Description: unknown [Arabidopsis thaliana]
  misc_feature (172)..(252): Homolog of NCBI NO: 18395805 NR Description: expressed protein [Arabidopsis thaliana]
  misc_feature (1)..(252): Homolog of NCBI NO: 7485180 NR Description: hypothetical protein - Arabidopsis thaliana
  misc_feature (24)..(260): Homolog of NCBI NO: 34901076 NR Description: arm repeat containing protein homolog-like
  misc_feature (24)..(260): Homolog of NCBI NO: 34393717 NR Description: arm repeat containing protein homolog-like
  misc_feature (1)..(268): Homolog of NCBI NO: 18414673 NR Description: expressed protein [Arabidopsis thaliana]
  misc_feature (1)..(252): Homolog of NCBI NO: 26452478 NR Description: unknown protein [Arabidopsis thaliana]
MVSVEEPLSHSNSTRFPLTTDFYGSSSPSAARLHRQAGRSMRTVRSNFYQSGDQSCSFVGSIGDKSEYASEFLSDSVIDMRLGELALKNSNSLNSNASSMKEEAFLDISQAFSDFSACSSDISGELQRLACLPSPEADRNESGGDNEAEHDPELEREPCLGFLQRENFSTEIIECISPEDLQPTVKLCIDGLRSSSVAIKRSAAAKLRLLAKNRADNRVLIGESGAIQALIPLLRCNDPWTQEHAVTALLNLLVTRPEQSCNRRRRSD

SEQ ID NO: 46568 - protein, 228 aa, Arabidopsis thaliana
  peptide (1)..(228): Ceres Seq. ID no. 13591808
  misc_feature (140)..(214): Homolog of NCBI NO: 28974687 NR Description: arm repeat-containing protein [Nicotiana tabacum]
  misc_feature (132)..(212): Homolog of NCBI NO: 16226454 NR Description: AT3g01400/T13O15_4 [Arabidopsis thaliana]
  misc_feature (154)..(214): Homolog of NCBI NO: 34393600 NR Description: arm repeat-containing protein-like protein
  misc_feature (132)..(212): Homolog of NCBI NO: 21592960 NR Description: unknown [Arabidopsis thaliana]
  misc_feature (132)..(212): Homolog of NCBI NO: 18395805 NR Description: expressed protein [Arabidopsis thaliana]
  misc_feature (1)..(212): Homolog of NCBI NO: 7485180 NR Description: hypothetical protein - Arabidopsis thaliana
  misc_feature (1)..(220): Homolog of NCBI NO: 34901076 NR Description: arm repeat containing protein homolog-like
  misc_feature (1)..(220): Homolog of NCBI NO: 34393717 NR Description: arm repeat containing protein homolog-like
  misc_feature (1)..(228): Homolog of NCBI NO: 18414673 NR Description: expressed protein [Arabidopsis thaliana]
  misc_feature (1)..(212): Homolog of NCBI NO: 26452478 NR Description: unknown protein [Arabidopsis thaliana]
MRTVRSNFYQSGDQSCSFVGSIGDKSEYASEFLSDSVIDMRLGELALKNSNSLNSNASSMKEEAFLDISQAFSDFSACSSDISGELQRLACLPSPEADRNESGGDNEAEHDPELEREPCLGFLQRENFSTEIIECISPEDLQPTVKLCIDGLRSSSVAIKRSAAAKLRLLAKNRADNRVLIGESGAIQALIPLLRCNDPWTQEHAVTALLNLLVTRPEQSCNRRRRSD

SEQ ID NO: 46569 - protein, 189 aa, Arabidopsis thaliana
  peptide (1)..(189): Ceres Seq. ID no. 13591809
  misc_feature (101)..(175): Homolog of NCBI NO: 28974687 NR Description: arm repeat-containing protein [Nicotiana tabacum]
  misc_feature (93)..(173): Homolog of NCBI NO: 16226454 NR Description: AT3g01400/T13O15_4 [Arabidopsis thaliana]
  misc_feature (115)..(175): Homolog of NCBI NO: 34393600 NR Description: arm repeat-containing protein-like protein
  misc_feature (93)..(173): Homolog of NCBI NO: 21592960 NR Description: unknown [Arabidopsis thaliana]
  misc_feature (93)..(173): Homolog of NCBI NO: 18395805 NR Description: expressed protein [Arabidopsis thaliana]
  misc_feature (1)..(173): Homolog of NCBI NO: 7485180 NR Description: hypothetical protein - Arabidopsis thaliana
  misc_feature (1)..(181): Homolog of NCBI NO: 34901076 NR Description: arm repeat containing protein homolog-like
  misc_feature (1)..(181): Homolog of NCBI NO: 34393717 NR Description: arm repeat containing protein homolog-like
  misc_feature (1)..(189): Homolog of NCBI NO: 18414673 NR Description: expressed protein [Arabidopsis thaliana]
  misc_feature (1)..(173): Homolog of NCBI NO: 26452478 NR Description: unknown protein [Arabidopsis thaliana]
MRLGELALKNSNSLNSNASSMKEEAFLDISQAFSDFSACSSDISGELQRLACLPSPEADRNESGGDNEAEHDPELEREPCLGFLQRENFSTEIIECISPEDLQPTVKLCIDGLRSSSVAIKRSAAAKLRLLAKNRADNRVLIGESGAIQALIPLLRCNDPWTQEHAVTALLNLLVTRPEQSCNRRRRSD

SEQ ID NO: 46570 - DNA, 1776 bp, Arabidopsis thaliana
  misc_feature (1)..(1776): Ceres Seq. ID no. 13579260
  misc_feature: MA Experiment ID: 20000169 Result: Up-regulated in Transcription
  misc_feature: MA Experiment 20000169 PARAMETER Experiment Name: At_100uM_ABA_P Parameter: Age (day) Value: 14
  misc_feature: MA Experiment 20000169 PARAMETER Experiment Name: At_100uM_ABA_P Parameter: Organism Value: A. thaliana
  misc_feature: MA Experiment 20000169 PARAMETER Experiment Name: At_100uM_ABA_P Parameter: Plant Line Value: WS
  misc_feature: MA Experiment 20000169 PARAMETER Experiment Name: At_100uM_ABA_P Parameter: Timepoint (hr) Value: 6
  misc_feature: MA Experiment 20000169 PARAMETER Experiment Name: At_100uM_ABA_P Parameter: Tissue Value: Aerial
  misc_feature: MA Experiment 20000169 PARAMETER Experiment Name: At_100uM_ABA_P Parameter: Treatment Value: 100uM ABA vs. No Treatment
  misc_feature: MA Experiment ID: 20000180 Result: Up-regulated in Transcription
  misc_feature: MA Experiment 20000180 PARAMETER Experiment Name: At_Germinating_Seeds_P Parameter: Age (hr) Value: 24 vs. 0
  misc_feature: MA Experiment 20000180 PARAMETER Experiment Name: At_Germinating_Seeds_P Parameter: Tissue Value: Germinating Seeds
  misc_feature: MA Experiment ID: 20000185 Result: Down-regulated in Transcription
  misc_feature: MA Experiment 20000185 PARAMETER Experiment Name: At_Roots__P Parameter: Age (day) Value: 7 vs. 21
  misc_feature: MA Experiment 20000185 PARAMETER Experiment Name: At_Roots__P Parameter: Organism Value: A. thaliana
  misc_feature: MA Experiment 20000185 PARAMETER Experiment Name: At_Roots__P Parameter: Tissue Value: Roots vs. Whole Plant
  misc_feature: MA Experiment ID: 20000214 Result: Down-regulated in Transcription
  misc_feature: MA Experiment 20000214 PARAMETER Experiment Name: At_4deg_Cold_P Parameter: Timepoint (hr) Value: 6
  misc_feature: MA Experiment ID: 20000267 Result: Up-regulated in Transcription
  misc_feature: MA Experiment 20000267 PARAMETER Experiment Name: At_Drought_P Parameter: Age (day) Value: 7
  misc_feature: MA Experiment 20000267 PARAMETER Experiment Name: At_Drought_P Parameter: Organism Value: A. thaliana
  misc_feature: MA Experiment 20000267 PARAMETER Experiment Name: At_Drought_P Parameter: Plant Line Value: WS
  misc_feature: MA Experiment 20000267 PARAMETER Experiment Name: At_Drought_P Parameter: Timepoint (hr) Value: 6
  misc_feature: MA Experiment 20000267 PARAMETER Experiment Name: At_Drought_P Parameter: Tissue Value: Whole Plant
  misc_feature: MA Experiment 20000267 PARAMETER Experiment Name: At_Drought_P Parameter: Treatment Value: Drought vs. No Drought
  misc_feature: MA Experiment ID: 20000268 Result: Up-regulated in Transcription
  misc_feature: MA Experiment 20000268 PARAMETER Experiment Name: At_100mM_NaCl__P Parameter: Age (day) Value: 14
  misc_feature: MA Experiment 20000268 PARAMETER Experiment Name: At_100mM_NaCl__P Parameter: Organism Value: A. thaliana
  misc_feature: MA Experiment 20000268 PARAMETER Experiment Name: At_100mM_NaCl__P Parameter: Plant Line Value: WS
  misc_feature: MA Experiment 20000268 PARAMETER Experiment Name: At_100mM_NaCl__P Parameter: Timepoint (hr) Value: 6
  misc_feature: MA Experiment 20000268 PARAMETER Experiment Name: At_100mM_NaCl__P Parameter: Tissue Value: Whole Plant
  misc_feature: MA Experiment 20000268 PARAMETER Experiment Name: At_100mM_NaCl__P Parameter: Treatment Value: 100mM NaCl vs. No Treatment
  misc_feature: MA Experiment ID: 20000436 Result: Up-regulated in Transcription
  misc_feature: MA Experiment 20000436 PARAMETER Experiment Name: At_Drought_P Parameter: Age (day) Value: 7
  misc_feature: MA Experiment 20000436 PARAMETER Experiment Name: At_Drought_P Parameter: Organism Value: A. thaliana
  misc_feature: MA Experiment 20000436 PARAMETER Experiment Name: At_Drought_P Parameter: Plant Line Value: WS
  misc_feature: MA Experiment 20000436 PARAMETER Experiment Name: At_Drought_P Parameter: Timepoint (hr) Value: 12
  misc_feature: MA Experiment 20000436 PARAMETER Experiment Name: At_Drought_P Parameter: Tissue Value: Whole Plant
  misc_feature: MA Experiment 20000436 PARAMETER Experiment Name: At_Drought_P Parameter: Treatment Value: Drought vs. No Drought
  misc_feature: MA Experiment ID: 20000437 Result: Up-regulated in Transcription
  misc_feature: MA Experiment 20000437 PARAMETER Experiment Name: At_Drought_P Parameter: Age (day) Value: 8
  misc_feature: MA Experiment 20000437 PARAMETER Experiment Name: At_Drought_P Parameter: Organism Value: A. thaliana
  misc_feature: MA Experiment 20000437 PARAMETER Experiment Name: At_Drought_P Parameter: Plant Line Value: WS
  misc_feature: MA Experiment 20000437 PARAMETER Experiment Name: At_Drought_P Parameter: Timepoint (hr) Value: 24
  misc_feature: MA Experiment 20000437 PARAMETER Experiment Name: At_Drought_P Parameter: Tissue Value: Whole Plant
  misc_feature: MA Experiment 20000437 PARAMETER Experiment Name: At_Drought_P Parameter: Treatment Value: Drought vs. No Drought
  misc_feature: MA Experiment ID: 20000439 Result: Down-regulated in Transcription
  misc_feature: MA Experiment 20000439 PARAMETER Experiment Name: At_Roots__P Parameter: Age (day) Value: 14 vs. 21
  misc_feature: MA Experiment 20000439 PARAMETER Experiment Name: At_Roots__P Parameter: Organism Value: A. thaliana
  misc_feature: MA Experiment 20000439 PARAMETER Experiment Name: At_Roots__P Parameter: Tissue Value: Roots vs. Whole Plant
  misc_feature: MA Experiment ID: 20000453 Result: Up-regulated in Transcription
  misc_feature: MA Experiment 20000453 PARAMETER Experiment Name: At_100uM_ABA_P Parameter: Age (day) Value: 15
  misc_feature: MA Experiment 20000453 PARAMETER Experiment Name: At_100uM_ABA_P Parameter: Organism Value: A. thaliana
  misc_feature: MA Experiment 20000453 PARAMETER Experiment Name: At_100uM_ABA_P Parameter: Plant Line Value: WS
  misc_feature: MA Experiment 20000453 PARAMETER Experiment Name: At_100uM_ABA_P Parameter: Timepoint (hr) Value: 24
  misc_feature: MA Experiment 20000453 PARAMETER Experiment Name: At_100uM_ABA_P Parameter: Tissue Value: Aerial
  misc_feature: MA Experiment 20000453 PARAMETER Experiment Name: At_100uM_ABA_P Parameter: Treatment Value: 100uM ABA vs. No Treatment
  misc_feature: MA Experiment ID: 20000794 Result: Up-regulated in Transcription
  misc_feature: MA Experiment 20000794 PARAMETER Experiment Name: At_Petals_P Parameter: Age (day) Value: 23-25 days
  misc_feature: MA Experiment 20000794 PARAMETER Experiment Name: At_Petals_P Parameter: Plant Line Value: WS
  misc_feature: MA Experiment 20000794 PARAMETER Experiment Name: At_Petals_P Parameter: Tissue Value: Petals vs. Whole plant
  misc_feature: MA Experiment ID: 20001248 Result: Up-regulated in Transcription
  misc_feature: MA Experiment 20001248 PARAMETER Experiment Name: At_Far-red-induction_P Parameter: Age (day) Value: 7
  misc_feature: MA Experiment 20001248 PARAMETER Experiment Name: At_Far-red-induction_P Parameter: Light Value: Far-red vs. White
  misc_feature: MA Experiment 20001248 PARAMETER Experiment Name: At_Far-red-induction_P Parameter: Organism Value: A. thaliana
  misc_feature: MA Experiment 20001248 PARAMETER Experiment Name: At_Far-red-induction_P Parameter: Plant Line Value: Columbia
  misc_feature: MA Experiment 20001248 PARAMETER Experiment Name: At_Far-red-induction_P Parameter: Timepoint (hr) Value: 4
  misc_feature: MA Experiment 20001248 PARAMETER Experiment Name: At_Far-red-induction_P Parameter: Tissue Value: Whole Plant
  misc_feature: MA Experiment ID: 20001554 Result: Up-regulated in Transcription
  misc_feature: MA Experiment 20001554 PARAMETER Experiment Name: At_Drought_Soil_Dry_P Parameter: Age (day) Value: 21
  misc_feature: MA Experiment 20001554 PARAMETER Experiment Name: At_Drought_Soil_Dry_P Parameter: Organism Value: A. thaliana
  misc_feature: MA Experiment 20001554 PARAMETER Experiment Name: At_Drought_Soil_Dry_P Parameter: Plant Line Value: WS
  misc_feature: MA Experiment 20001554 PARAMETER Experiment Name: At_Drought_Soil_Dry_P Parameter: Post Timepoint (hr) Value: None
  misc_feature: MA Experiment 20001554 PARAMETER Experiment Name: At_Drought_Soil_Dry_P Parameter: Post-Treatment Value: None
  misc_feature: MA Experiment 20001554 PARAMETER Experiment Name: At_Drought_Soil_Dry_P Parameter: Timepoint (day) Value: 7
  misc_feature: MA Experiment 20001554 PARAMETER Experiment Name: At_Drought_Soil_Dry_P Parameter: Treatment Value: Drought vs. No Drought
  misc_feature: MA Experiment ID: 20001555 Result: Up-regulated in Transcription
  misc_feature: MA Experiment 20001555 PARAMETER Experiment Name: At_Drought_Soil_Dry_P Parameter: Age (day) Value: 24
  misc_feature: MA Experiment 20001555 PARAMETER Experiment Name: At_Drought_Soil_Dry_P Parameter: Organism Value: A. thaliana
  misc_feature: MA Experiment 20001555 PARAMETER Experiment Name: At_Drought_Soil_Dry_P Parameter: Plant Line Value: WS
  misc_feature: MA Experiment 20001555 PARAMETER Experiment Name: At_Drought_Soil_Dry_P Parameter: Post Timepoint (hr) Value: None
  misc_feature: MA Experiment 20001555 PARAMETER Experiment Name: At_Drought_Soil_Dry_P Parameter: Post-Treatment Value: None
  misc_feature: MA Experiment 20001555 PARAMETER Experiment Name: At_Drought_Soil_Dry_P Parameter: Timepoint (day) Value: 10
  misc_feature: MA Experiment 20001555 PARAMETER Experiment Name: At_Drought_Soil_Dry_P Parameter: Treatment Value: Drought vs. No Drought
  misc_feature: MA Experiment ID: 20001556 Result: Up-regulated in Transcription
  misc_feature: MA Experiment 20001556 PARAMETER Experiment Name: At_Drought_Soil_Dry_P Parameter: Age (day) Value: 26
  misc_feature: MA Experiment 20001556 PARAMETER Experiment Name: At_Drought_Soil_Dry_P Parameter: Organism Value: A. thaliana
  misc_feature: MA Experiment 20001556 PARAMETER Experiment Name: At_Drought_Soil_Dry_P Parameter: Plant Line Value: WS
  misc_feature: MA Experiment 20001556 PARAMETER Experiment Name: At_Drought_Soil_Dry_P Parameter: Post Timepoint (hr) Value: None
  misc_feature: MA Experiment 20001556 PARAMETER Experiment Name: At_Drought_Soil_Dry_P Parameter: Post-Treatment Value: None
  misc_feature: MA Experiment 20001556 PARAMETER Experiment Name: At_Drought_Soil_Dry_P Parameter: Timepoint (day) Value: 12
  misc_feature: MA Experiment 20001556 PARAMETER Experiment Name: At_Drought_Soil_Dry_P Parameter: Treatment Value: Drought vs. No Drought
  misc_feature: MA Experiment ID: 20001756 Result: Up-regulated in Transcription
  misc_feature: MA Experiment 20001756 PARAMETER Experiment Name: At_50mM_NH4NO3_L-to-H_P Parameter: Timepoint (hr) Value: 4
  misc_feature: MA Experiment 20001756 PARAMETER Experiment Name: At_50mM_NH4NO3_L-to-H_P Parameter: Tissue Value: Leaf
  misc_feature: MA Experiment 20001756 PARAMETER Experiment Name: At_50mM_NH4NO3_L-to-H_P Parameter: Treatment Value: 50mM NH4NO3 vs 100mM Mannitol
  misc_feature: MA Experiment ID: 20001904 Result: Up-regulated in Transcription
  misc_feature: MA Experiment 20001904 PARAMETER Experiment Name: At_Drought_Reproduction_P Parameter: Age (day) Value: 37
  misc_feature: MA Experiment 20001904 PARAMETER Experiment Name: At_Drought_Reproduction_P Parameter: Organism Value: A. thaliana
  misc_feature: MA Experiment 20001904 PARAMETER Experiment Name: At_Drought_Reproduction_P Parameter: Plant Line Value: WS
  misc_feature: MA Experiment 20001904 PARAMETER Experiment Name: At_Drought_Reproduction_P Parameter: Timepoint (day) Value: 7
  misc_feature: MA Experiment 20001904 PARAMETER Experiment Name: At_Drought_Reproduction_P Parameter: Tissue Value: Rosettes
  misc_feature: MA Experiment 20001904 PARAMETER Experiment Name: At_Drought_Reproduction_P Parameter: Treatment Value: Drought vs. No Drought
  misc_feature: MA Experiment ID: 20001905 Result: Up-regulated in Transcription
  misc_feature: MA Experiment 20001905 PARAMETER Experiment Name: At_Drought_Reproduction_P Parameter: Age (day) Value: 40
  misc_feature: MA Experiment 20001905 PARAMETER Experiment Name: At_Drought_Reproduction_P Parameter: Organism Value: A. thaliana
  misc_feature: MA Experiment 20001905 PARAMETER Experiment Name: At_Drought_Reproduction_P Parameter: Plant Line Value: WS
  misc_feature: MA Experiment 20001905 PARAMETER Experiment Name: At_Drought_Reproduction_P Parameter: Timepoint (day) Value: 10
  misc_feature: MA Experiment 20001905 PARAMETER Experiment Name: At_Drought_Reproduction_P Parameter: Tissue Value: Rosettes
  misc_feature: MA Experiment 20001905 PARAMETER Experiment Name: At_Drought_Reproduction_P Parameter: Treatment Value: Drought vs. No Drought
attcgccgacttattctcctctgttctctgcatttggattgatgccactttaatactttgaggatcaagacttcgtaaaagattgtttctgtaaaacgcaacaccatgcctctgtttgagcttttcaggctcaccaaagctaagcttgaatctgctcaagacaggaacccttctccacctgtagatgaagttgtggagctggtgtgggaaaatggtcagatatcaactcaaagtcagtcaagtagatcgaggaacattcctccaccacaagcaaactcttctagagctagagagattggaaatggctcaaagacgactatggtggacgagatccctatgtcagtgccatcactaatgacgggtttgagtcaagacgatgactttgttccatggttgaatcatcatccctcccttgatggatattgctctgatttcttgcgtgatgtgtcgtctcctgttactgtcaacgagcaagagagtgatatggcggtaaaccaaactgctttcccgttgtttcagagaagaaaggatggcaatgaatcagctcctgctgcttcttcgtcgcagtataacggtttccaatcgcattctctgtatggaagtgatagagctagagatcttcctagccaacaaaccaatccggatcggtttactcagacgcaggaaccactaattactagtaacaagcctagtttggtcaacttttcacatttcttacgccctgcaacttttgcgaagactactaataataaccttcatgacactaaagaaaagagtcctcaaagcccgccaaatgtgtttcagaccagagttcttggagctaaagactctgaagataaggttcttaacgagtctgttgcttctgctacgcctaaagataaccaaaaggcttgcctaatatcagaggactcatgtagaaaagaccaagagagtgaaaaagcagttgtatgttcttctgttggctcgggtaatagtctcgatggcccatccgaaagtccttcactttctttaaagagaaagcattcgaatattcaagacattgactgtcatagtgaagatgtggaagaagaatcaggagatggaagaaaggaagcaggtccatctcgaacgggtttgggttcaaagagaagccgctctgcagaagtgcataatctgtctgaaaggagacggcgtgataggatcaacgagaagatgcgtgccctgcaagaactcattccaaactgtaacaaggtggacaaagcttcgatgctagatgaagccatcgagtatctcaagtcactccaacttcaagtgcagatcatgtcaatggcgtctggttactatctgccaccggcggttatgttcccaccgggtatggggcattacccggcagcagctgctgcaatggcaatgggtatgggaatgccttatgcaatgggcttgcctgatttgagccgtggtggttcatcggttaaccacggaccacagttccaagtctcggggatgcaacaacaaccagtggcgatgggtattccacgtgtctctggtggtggtatctttgccggttcttcgacgattggcaatggctcgactagagatttatctggttctaaagatcaaacaacgacgaataacaacagtaacttgaaaccaataaagagaaaacaggggtcttctgatcagttttgtggatcgtcgtgacataaatacaaacttatgaactgatgtattgtttatttgtagcattcaaacaaatctattttataatcctaaacaaaattaatttgtgttcgttat

SEQ ID NO: 46571 - protein, 524 aa, Arabidopsis thaliana
  peptide (1)..(524): Ceres Seq. ID no. 13579261
  misc_feature (344)..(393): Pfam Name: Helix-loop-helix DNA-binding domain Pfam Description: Helix-loop-helix DNA-binding domain
  misc_feature (344)..(393): Pfam Name: Helix-loop-helix DNA-binding domain Pfam Description: Helix-loop-helix DNA-binding domain
  misc_feature (283)..(433): Homolog of NCBI NO: 30680903 NR Description: (bHLH015) putative bHLH transcription factor
  misc_feature (277)..(447): Homolog of NCBI NO: 34902556 NR Description: P0498A12.24 [Oryza sativa (japonica
  misc_feature (25)..(193): Homolog of NCBI NO: 20127070 NR Description: putative bHLH transcription factor [Arabidopsis
  misc_feature (271)..(475): Homolog of NCBI NO: 20127070 NR Description: putative bHLH transcription factor [Arabidopsis
  misc_feature (25)..(193): Homolog of NCBI NO: 30694924 NR Description: bHLH protein family [Arabidopsis thaliana]
  misc_feature (283)..(433): Homolog of NCBI NO: 30680903 NR Description: (bHLH015) putative bHLH transcription factor
  misc_feature (25)..(193): Homolog of NCBI NO: 20127070 NR Description: putative bHLH transcription factor [Arabidopsis
  misc_feature (25)..(193): Homolog of NCBI NO: 30694924 NR Description: bHLH protein family [Arabidopsis thaliana]
  misc_feature (1)..(524): Homolog of NCBI NO: 15217533 NR Description: phytochrome interacting factor 3 (PIF3)
  misc_feature (1)..(524): Homolog of NCBI NO: 4093153 NR Description: phytochrome-associated protein 3 [Arabidopsis
  misc_feature (271)..(475): Homolog of NCBI NO: 30694919 NR Description: bHLH protein family [Arabidopsis thaliana]
  misc_feature (25)..(193): Homolog of NCBI NO: 30694919 NR Description: bHLH protein family [Arabidopsis thaliana]
  misc_feature (271)..(475): Homolog of NCBI NO: 30694924 NR Description: bHLH protein family [Arabidopsis thaliana]
  misc_feature (271)..(475): Homolog of NCBI NO: 20127070 NR Description: putative bHLH transcription factor [Arabidopsis
  misc_feature (277)..(447): Homolog of NCBI NO: 34902556 NR Description: P0498A12.24 [Oryza sativa (japonica
  misc_feature (271)..(475): Homolog of NCBI NO: 30694924 NR Description: bHLH protein family [Arabidopsis thaliana]
  misc_feature (25)..(193): Homolog of NCBI NO: 30694919 NR Description: bHLH protein family [Arabidopsis thaliana]
  misc_feature (271)..(475): Homolog of NCBI NO: 30694919 NR Description: bHLH protein family [Arabidopsis thaliana]
  misc_feature (1)..(524): Homolog of NCBI NO: 4093153 NR Description: phytochrome-associated protein 3 [Arabidopsis
  misc_feature (1)..(524): Homolog of NCBI NO: 15217533 NR Description: phytochrome interacting factor 3 (PIF3)
MPLFELFRLTKAKLESAQDRNPSPPVDEVVELVWENGQISTQSQSSRSRNIPPPQANSSRAREIGNGSKTTMVDEIPMSVPSLMTGLSQDDDFVPWLNHHPSLDGYCSDFLRDVSSPVTVNEQESDMAVNQTAFPLFQRRKDGNESAPAASSSQYNGFQSHSLYGSDRARDLPSQQTNPDRFTQTQEPLITSNKPSLVNFSHFLRPATFAKTTNNNLHDTKEKSPQSPPNVFQTRVLGAKDSEDKVLNESVASATPKDNQKACLISEDSCRKDQESEKAVVCSSVGSGNSLDGPSESPSLSLKRKHSNIQDIDCHSEDVEEESGDGRKEAGPSRTGLGSKRSRSAEVHNLSERRRRDRINEKMRALQELIPNCNKVDKASMLDEAIEYLKSLQLQVQIMSMASGYYLPPAVMFPPGMGHYPAAAAAMAMGMGMPYAMGLPDLSRGGSSVNHGPQFQVSGMQQQPVAMGIPRVSGGGIFAGSSTIGNGSTRDLSGSKDQTTTNNNSNLKPIKRKQGSSDQFCGSS

SEQ ID NO: 46572 - protein, 453 aa, Arabidopsis thaliana
  peptide (1)..(453): Ceres Seq. ID no. 13579262
  misc_feature (273)..(322): Pfam Name: Helix-loop-helix DNA-binding domain Pfam Description: Helix-loop-helix DNA-binding domain
  misc_feature (273)..(322): Pfam Name: Helix-loop-helix DNA-binding domain Pfam Description: Helix-loop-helix DNA-binding domain
  misc_feature (212)..(362): Homolog of NCBI NO: 30680903 NR Description: (bHLH015) putative bHLH transcription factor
  misc_feature (206)..(376): Homolog of NCBI NO: 34902556 NR Description: P0498A12.24 [Oryza sativa (japonica
  misc_feature (1)..(122): Homolog of NCBI NO: 20127070 NR Description: putative bHLH transcription factor [Arabidopsis
  misc_feature (200)..(404): Homolog of NCBI NO: 20127070 NR Description: putative bHLH transcription factor [Arabidopsis
  misc_feature (1)..(122): Homolog of NCBI NO: 30694924 NR Description: bHLH protein family [Arabidopsis thaliana]
  misc_feature (212)..(362): Homolog of NCBI NO: 30680903 NR Description: (bHLH015) putative bHLH transcription factor
  misc_feature (1)..(122): Homolog of NCBI NO: 20127070 NR Description: putative bHLH transcription factor [Arabidopsis
  misc_feature (1)..(122): Homolog of NCBI NO: 30694924 NR Description: bHLH protein family [Arabidopsis thaliana]
  misc_feature (1)..(453): Homolog of NCBI NO: 15217533 NR Description: phytochrome interacting factor 3 (PIF3)
  misc_feature (1)..(453): Homolog of NCBI NO: 4093153 NR Description: phytochrome-associated protein 3 [Arabidopsis
  misc_feature (200)..(404): Homolog of NCBI NO: 30694919 NR Description: bHLH protein family [Arabidopsis thaliana]
  misc_feature (1)..(122): Homolog of NCBI NO: 30694919 NR Description: bHLH protein family [Arabidopsis thaliana]
  misc_feature (200)..(404): Homolog of NCBI NO: 30694924 NR Description: bHLH protein family [Arabidopsis thaliana]
  misc_feature (200)..(404): Homolog of NCBI NO: 20127070 NR Description: putative bHLH transcription factor [Arabidopsis
  misc_feature (206)..(376): Homolog of NCBI NO: 34902556 NR Description: P0498A12.24 [Oryza sativa (japonica
  misc_feature (200)..(404): Homolog of NCBI NO: 30694924 NR Description: bHLH protein family [Arabidopsis thaliana]
  misc_feature (1)..(122): Homolog of NCBI NO: 30694919 NR Description: bHLH protein family [Arabidopsis thaliana]
  misc_feature (200)..(404): Homolog of NCBI NO: 30694919 NR Description: bHLH protein family [Arabidopsis thaliana]
  misc_feature (1)..(453): Homolog of NCBI NO: 4093153 NR Description: phytochrome-associated protein 3 [Arabidopsis
  misc_feature (1)..(453): Homolog of NCBI NO: 15217533 NR Description: phytochrome interacting factor 3 (PIF3)
MVDEIPMSVPSLMTGLSQDDDFVPWLNHHPSLDGYCSDFLRDVSSPVTVNEQESDMAVNQTAFPLFQRRKDGNESAPAASSSQYNGFQSHSLYGSDRARDLPSQQTNPDRFTQTQEPLITSNKPSLVNFSHFLRPATFAKTTNNNLHDTKEKSPQSPPNVFQTRVLGAKDSEDKVLNESVASATPKDNQKACLISEDSCRKDQESEKAVVCSSVGSGNSLDGPSESPSLSLKRKHSNIQDIDCHSEDVEEESGDGRKEAGPSRTGLGSKRSRSAEVHNLSERRRRDRINEKMRALQELIPNCNKVDKASMLDEAIEYLKSLQLQVQIMSMASGYYLPPAVMFPPGMGHYPAAAAAMAMGMGMPYAMGLPDLSRGGSSVNHGPQFQVSGMQQQPVAMGIPRVSGGGIFAGSSTIGNGSTRDLSGSKDQTTTNNNSNLKPIKRKQGSSDQFCGSS

SEQ ID NO: 46573 - protein, 447 aa, Arabidopsis thaliana
  peptide (1)..(447): Ceres Seq. ID no. 13579263
  misc_feature (267)..(316): Pfam Name: Helix-loop-helix DNA-binding domain Pfam Description: Helix-loop-helix DNA-binding domain
  misc_feature (267)..(316): Pfam Name: Helix-loop-helix DNA-binding domain Pfam Description: Helix-loop-helix DNA-binding domain
  misc_feature (206)..(356): Homolog of NCBI NO: 30680903 NR Description: (bHLH015) putative bHLH transcription factor
  misc_feature (200)..(370): Homolog of NCBI NO: 34902556 NR Description: P0498A12.24 [Oryza sativa (japonica
  misc_feature (1)..(116): Homolog of NCBI NO: 20127070 NR Description: putative bHLH transcription factor [Arabidopsis
  misc_feature (194)..(398): Homolog of NCBI NO: 20127070 NR Description: putative bHLH transcription factor [Arabidopsis
  misc_feature (1)..(116): Homolog of NCBI NO: 30694924 NR Description: bHLH protein family [Arabidopsis thaliana]
  misc_feature (206)..(356): Homolog of NCBI NO: 30680903 NR Description: (bHLH015) putative bHLH transcription factor
  misc_feature (1)..(116): Homolog of NCBI NO: 20127070 NR Description: putative bHLH transcription factor [Arabidopsis
  misc_feature (1)..(116): Homolog of NCBI NO: 30694924 NR Description: bHLH protein family [Arabidopsis thaliana]
  misc_feature (1)..(447): Homolog of NCBI NO: 15217533 NR Description: phytochrome interacting factor 3 (PIF3)
  misc_feature (1)..(447): Homolog of NCBI NO: 4093153 NR Description: phytochrome-associated protein 3 [Arabidopsis
  misc_feature (194)..(398): Homolog of NCBI NO: 30694919 NR Description: bHLH protein family [Arabidopsis thaliana]
  misc_feature (1)..(116): Homolog of NCBI NO: 30694919 NR Description: bHLH protein family [Arabidopsis thaliana]
  misc_feature (194)..(398): Homolog of NCBI NO: 30694924 NR Description: bHLH protein family [Arabidopsis thaliana]
  misc_feature (194)..(398): Homolog of NCBI NO: 20127070 NR Description: putative bHLH transcription factor [Arabidopsis
  misc_feature (200)..(370): Homolog of NCBI NO: 34902556 NR Description: P0498A12.24 [Oryza sativa (japonica
  misc_feature (194)..(398): Homolog of NCBI NO: 30694924 NR Description: bHLH protein family [Arabidopsis thaliana]
  misc_feature (1)..(116): Homolog of NCBI NO: 30694919 NR Description: bHLH protein family [Arabidopsis thaliana]
  misc_feature (194)..(398): Homolog of NCBI NO: 30694919 NR Description: bHLH protein family [Arabidopsis thaliana]
  misc_feature (1)..(447): Homolog of NCBI NO: 4093153 NR Description: phytochrome-associated protein 3 [Arabidopsis
  misc_feature (1)..(447): Homolog of NCBI NO: 15217533 NR Description: phytochrome interacting factor 3 (PIF3)
MSVPSLMTGLSQDDDFVPWLNHHPSLDGYCSDFLRDVSSPVTVNEQESDMAVNQTAFPLFQRRKDGNESAPAASSSQYNGFQSHSLYGSDRARDLPSQQTNPDRFTQTQEPLITSNKPSLVNFSHFLRPATFAKTTNNNLHDTKEKSPQSPPNVFQTRVLGAKDSEDKVLNESVASATPKDNQKACLISEDSCRKDQESEKAVVCSSVGSGNSLDGPSESPSLSLKRKHSNIQDIDCHSEDVEEESGDGRKEAGPSRTGLGSKRSRSAEVHNLSERRRRDRINEKMRALQELIPNCNKVDKASMLDEAIEYLKSLQLQVQIMSMASGYYLPPAVMFPPGMGHYPAAAAAMAMGMGMPYAMGLPDLSRGGSSVNHGPQFQVSGMQQQPVAMGIPRVSGGGIFAGSSTIGNGSTRDLSGSKDQTTTNNNSNLKPIKRKQGSSDQFCGSS

SEQ ID NO: 46574 - DNA, 1923 bp, Arabidopsis thaliana
  misc_feature (1)..(1923): Ceres Seq. ID no. 15175511
  misc_feature: MA Experiment ID: 20000171 Result: Down-regulated in Transcription
  misc_feature: MA Experiment 20000171 PARAMETER Experiment Name: At_42deg_Heat_P Parameter: Age (day) Value: 14
  misc_feature: MA Experiment 20000171 PARAMETER Experiment Name: At_42deg_Heat_P Parameter: Organism Value: A. thaliana
  misc_feature: MA Experiment 20000171 PARAMETER Experiment Name: At_42deg_Heat_P Parameter: Plant Line Value: WS
  misc_feature: MA Experiment 20000171 PARAMETER Experiment Name: At_42deg_Heat_P Parameter: Temperature (deg C) Value: 42 vs. 22
  misc_feature: MA Experiment 20000171 PARAMETER Experiment Name: At_42deg_Heat_P Parameter: Timepoint (hr) Value: 1
  misc_feature: MA Experiment 20000171 PARAMETER Experiment Name: At_42deg_Heat_P Parameter: Tissue Value: Aerial
  misc_feature: MA Experiment ID: 20000184 Result: Up-regulated in Transcription
  misc_feature: MA Experiment 20000184 PARAMETER Experiment Name: At_Shoots__P Parameter: Age (day) Value: 7
  misc_feature: MA Experiment 20000184 PARAMETER Experiment Name: At_Shoots__P Parameter: Tissue Value: Shoots vs. Whole Plant
gatcaccagataccaacagctacaagtttttaaaaaccttctctcatcctcttcctcaagcctccctcctcctctttaatctcaccagtcaccatgaaagtttagagattttttgaaagaacaaacagatatcgaattcgagttttgcaaaaatggtatcggtggaggaacctttatctcattccaattccactcgctttccgttaacaaccgatttctacggttcatcatcgccgtcggcggcgaggttacaccgtcaagctggccggtcgatgagaacagtgagatctaacttctatcaaagcggagatcaatcttgctcattcgtcggctcaatcggcgataaatcagagtatgcgtcggagtttctctcggattccgtcatcgacatgagactcggcgagcttgctttgaaaaacagtaattctctcaattcaaacgcttcctcaatgaaagaggaagcgtttctcgacatttctcaggcgtttagtgatttttccgcttgtagtagtgatatctccggcgagttacagcgtcttgcttgcttgccgtcgccggaggctgatagaaatgagagcggcggagataacgaagcggagcatgatccagagttagagagagagccttgtctagggtttctacagagagaaaacttctctacagagattatcgagtgtatttcgccggaagatctgcagccaactgtgaaactatgcatcgacggacttcgttcctcttcggtggcgataaagcgatctgctgcggcgaagctacggctattggcgaagaatcgagcggataatcgtgtgttgattggggaatctggagctattcaagctttgattccacttcttcgttgtaaagatccatggacgcaagagcacgcagttacagctctgttaaacctctcgttacacgaccagaacaaagctgtaatcgccgcaggaggagcgattaaatcactagtgtgggtactcaaaacggggacggagacttcaaagcagaacgctgcatgtgctttgcttagtttggcgctattggaggagaacaaaggctcaatcggagcttgcggtgctattccgccgctggtttctcttctgttgaacggatcttgcaggggaaagaaggatgcgttgacgacgctctacaagctgtgtacgcttcagcaaaacaaggagagagcggtcactgctggagcggtgaagccgttggtggaccttgtggctgaggaagggactggtatggcggagaaagctatggtggttctgagtagccttgcagcgatagatgatggcaaagaggctattgtcgaggaaggagggatcgcagagcttgttgaggccatcgaggatggatctgtgaaagggaaagaatttgcgatcttgacgctgttgcagctttgttctgatagcgttagaaaccgtgggttgcttgtgagggaaggcgcgattcctccgcttgtgggcctctctcagagcggctccgtcagtgttagagctaagcgcaaggcagaaagacttctggggtatcttcgggagccaaggaaggaggcaagttcatcaagcccatgaaatgcaaccatgtggaggtttcatcagtctagtatgtatatactgagtgtatgtttggtgggttttgtatagcgtcttttgtgtagactgtaaaagagagatcaaatgattaccagaaacttgactgacttttgatctctctcatgtattgatggttaagctagtttttgaggagtttcaagggagagtgcttatttatttggtttacaagtctagcattcaggttttggcttctggtttgtgagggtgggtggattatgctgatttttaaggcaaaaagctttgtagtagcgtcggcaaatggcttgttcaagaactaagcaatttttaatcgatatttcttgatcaaaag

SEQ ID NO: 46575 - protein, 472 aa, Arabidopsis thaliana
  peptide (1)..(472): Ceres Seq. ID no. 15175512
  misc_feature (296)..(336): Pfam Name: Armadillo/beta-catenin-like repeat Pfam Description: Armadillo/beta-catenin-like repeat
  misc_feature (194)..(472): Homolog of NCBI NO: 34393600 NR Description: arm repeat-containing protein-like protein
  misc_feature (180)..(464): Homolog of NCBI NO: 28974687 NR Description: arm repeat-containing protein [Nicotiana tabacum]
  misc_feature (172)..(464): Homolog of NCBI NO: 21592960 NR Description: unknown [Arabidopsis thaliana]
  misc_feature (172)..(464): Homolog of NCBI NO: 18395805 NR Description: expressed protein [Arabidopsis thaliana]
  misc_feature (291)..(452): Homolog of NCBI NO: 7485180 NR Description: hypothetical protein - Arabidopsis thaliana
  misc_feature (1)..(320): Homolog of NCBI NO: 7485180 NR Description: hypothetical protein - Arabidopsis thaliana
  misc_feature (24)..(465): Homolog of NCBI NO: 34901076 NR Description: arm repeat containing protein homolog-like
  misc_feature (24)..(465): Homolog of NCBI NO: 34393717 NR Description: arm repeat containing protein homolog-like
  misc_feature (1)..(252): Homolog of NCBI NO: 18414673 NR Description: expressed protein [Arabidopsis thaliana]
  misc_feature (1)..(472): Homolog of NCBI NO: 26452478 NR Description: unknown protein [Arabidopsis thaliana]
MVSVEEPLSHSNSTRFPLTTDFYGSSSPSAARLHRQAGRSMRTVRSNFYQSGDQSCSFVGSIGDKSEYASEFLSDSVIDMRLGELALKNSNSLNSNASSMKEEAFLDISQAFSDFSACSSDISGELQRLACLPSPEADRNESGGDNEAEHDPELEREPCLGFLQRENFSTEIIECISPEDLQPTVKLCIDGLRSSSVAIKRSAAAKLRLLAKNRADNRVLIGESGAIQALIPLLRCKDPWTQEHAVTALLNLSLHDQNKAVIAAGGAIKSLVWVLKTGTETSKQNAACALLSLALLEENKGSIGACGAIPPLVSLLLNGSCRGKKDALTTLYKLCTLQQNKERAVTAGAVKPLVDLVAEEGTGMAEKAMVVLSSLAAIDDGKEAIVEEGGIAELVEAIEDGSVKGKEFAILTLLQLCSDSVRNRGLLVREGAIPPLVGLSQSGSVSVRAKRKAERLLGYLREPRKEASSSSP

SEQ ID NO: 46576 - protein, 432 aa, Arabidopsis thaliana
  peptide (1)..(432): Ceres Seq. ID no. 15175513
  misc_feature (256)..(296): Pfam Name: Armadillo/beta-catenin-like repeat Pfam Description: Armadillo/beta-catenin-like repeat
  misc_feature (154)..(432): Homolog of NCBI NO: 34393600 NR Description: arm repeat-containing protein-like protein
  misc_feature (140)..(424): Homolog of NCBI NO: 28974687 NR Description: arm repeat-containing protein [Nicotiana tabacum]
  misc_feature (132)..(424): Homolog of NCBI NO: 21592960 NR Description: unknown [Arabidopsis thaliana]
  misc_feature (132)..(424): Homolog of NCBI NO: 18395805 NR Description: expressed protein [Arabidopsis thaliana]
  misc_feature (251)..(412): Homolog of NCBI NO: 7485180 NR Description: hypothetical protein - Arabidopsis thaliana
  misc_feature (1)..(280): Homolog of NCBI NO: 7485180 NR Description: hypothetical protein - Arabidopsis thaliana
  misc_feature (1)..(425): Homolog of NCBI NO: 34901076 NR Description: arm repeat containing protein homolog-like
  misc_feature (1)..(425): Homolog of NCBI NO: 34393717 NR Description: arm repeat containing protein homolog-like
  misc_feature (1)..(212): Homolog of NCBI NO: 18414673 NR Description: expressed protein [Arabidopsis thaliana]
  misc_feature (1)..(432): Homolog of NCBI NO: 26452478 NR Description: unknown protein [Arabidopsis thaliana]
MRTVRSNFYQSGDQSCSFVGSIGDKSEYASEFLSDSVIDMRLGELALKNSNSLNSNASSMKEEAFLDISQAFSDFSACSSDISGELQRLACLPSPEADRNESGGDNEAEHDPELEREPCLGFLQRENFSTEIIECISPEDLQPTVKLCIDGLRSSSVAIKRSAAAKLRLLAKNRADNRVLIGESGAIQALIPLLRCKDPWTQEHAVTALLNLSLHDQNKAVIAAGGAIKSLVWVLKTGTETSKQNAACALLSLALLEENKGSIGACGAIPPLVSLLLNGSCRGKKDALTTLYKLCTLQQNKERAVTAGAVKPLVDLVAEEGTGMAEKAMVVLSSLAAIDDGKEAIVEEGGIAELVEAIEDGSVKGKEFAILTLLQLCSDSVRNRGLLVREGAIPPLVGLSQSGSVSVRAKRKAERLLGYLREPRKEASSSSP

SEQ ID NO: 46577 - protein, 393 aa, Arabidopsis thaliana
  peptide (1)..(393): Ceres Seq. ID no. 15175514
  misc_feature (217)..(257): Pfam Name: Armadillo/beta-catenin-like repeat Pfam Description: Armadillo/beta-catenin-like repeat
  misc_feature (115)..(393): Homolog of NCBI NO: 34393600 NR Description: arm repeat-containing protein-like protein
  misc_feature (101)..(385): Homolog of NCBI NO: 28974687 NR Description: arm repeat-containing protein [Nicotiana tabacum]
  misc_feature (93)..(385): Homolog of NCBI NO: 21592960 NR Description: unknown [Arabidopsis thaliana]
  misc_feature (93)..(385): Homolog of NCBI NO: 18395805 NR Description: expressed protein [Arabidopsis thaliana]
  misc_feature (212)..(373): Homolog of NCBI NO: 7485180 NR Description: hypothetical protein - Arabidopsis thaliana
  misc_feature (1)..(241): Homolog of NCBI NO: 7485180 NR Description: hypothetical protein - Arabidopsis thaliana
  misc_feature (1)..(386): Homolog of NCBI NO: 34901076 NR Description: arm repeat containing protein homolog-like
  misc_feature (1)..(386): Homolog of NCBI NO: 34393717 NR Description: arm repeat containing protein homolog-like
  misc_feature (1)..(173): Homolog of NCBI NO: 18414673 NR Description: expressed protein [Arabidopsis thaliana]
  misc_feature (1)..(393): Homolog of NCBI NO: 26452478 NR Description: unknown protein [Arabidopsis thaliana]
MRLGELALKNSNSLNSNASSMKEEAFLDISQAFSDFSACSSDISGELQRLACLPSPEADRNESGGDNEAEHDPELEREPCLGFLQRENFSTEIIECISPEDLQPTVKLCIDGLRSSSVAIKRSAAAKLRLLAKNRADNRVLIGESGAIQALIPLLRCKDPWTQEHAVTALLNLSLHDQNKAVIAAGGAIKSLVWVLKTGTETSKQNAACALLSLALLEENKGSIGACGAIPPLVSLLLNGSCRGKKDALTTLYKLCTLQQNKERAVTAGAVKPLVDLVAEEGTGMAEKAMVVLSSLAAIDDGKEAIVEEGGIAELVEAIEDGSVKGKEFAILTLLQLCSDSVRNRGLLVREGAIPPLVGLSQSGSVSVRAKRKAERLLGYLREPRKEASSSSP

SEQ ID NO: 46578 - DNA, 2082 bp, Arabidopsis thaliana
  misc_feature (1)..(2082): Ceres Seq. ID no. 13578760
  misc_feature: MA Experiment ID: 20000495 Result: Up-regulated in Transcription
  misc_feature: MA Experiment 20000495 PARAMETER Experiment Name: At_Guard_Cells_P Parameter: Harvest Date Value: 8/2/2002
  misc_feature: MA Experiment 20000495 PARAMETER Experiment Name: At_Guard_Cells_P Parameter: Organism Value: A. thaliana
  misc_feature: MA Experiment 20000495 PARAMETER Experiment Name: At_Guard_Cells_P Parameter: Tissue Value: Guard Cells vs. Leaves
  misc_feature: MA Experiment ID: 20001451 Result: Up-regulated in Transcription
  misc_feature: MA Experiment 20001451 PARAMETER Experiment Name: At_Far-red-induction_P Parameter: Age (day) Value: 7
  misc_feature: MA Experiment 20001451 PARAMETER Experiment Name: At_Far-red-induction_P Parameter: Light Value: Far-red vs. White
  misc_feature: MA Experiment 20001451 PARAMETER Experiment Name: At_Far-red-induction_P Parameter: Organism Value: A. thaliana
  misc_feature: MA Experiment 20001451 PARAMETER Experiment Name: At_Far-red-induction_P Parameter: Plant Line Value: Columbia
  misc_feature: MA Experiment 20001451 PARAMETER Experiment Name: At_Far-red-induction_P Parameter: Timepoint (hr) Value: 24
  misc_feature: MA Experiment 20001451 PARAMETER Experiment Name: At_Far-red-induction_P Parameter: Tissue Value: Whole Plant
gatgattggctttgcccacgagagagagagaaagattccacctgggttgggtcgtgaagaaagagaagaagaaaccgaagaagctcgaagaagaacgaaggagattcttcctttccccagatttttcgtttgaagaagaatcgaaaaacttagatttttggttttgctttcggagttattcgaatttgaaatatctgaatctgttgattcatttattctccgcatgaagctgtgttggtgaagtttttcggagatttagggtttctgagttgttcctcgtttggttggtgaataaagcgaagatgaacgtgatgcgtcgtctcaagagcattgcttcgggtcggacctccatttcttcggatcctggtggggactatgcgttgaagagagctaagctggatcaagagaacgacaacttgtgtgttgatccaatgcaggttgaccaaaatagttcttgttttgagatgaaagctgacgttttgtcacaagaaagtgttgctggaacgtcaaatgtgcctgctgtatcggaaaaacccgtggatgatcagcttcccgatgttatgatcgaaatgaagattagagacgagcgaaatgccaaccgcgaggataaggatatggaaacaactgttgtaaacggcagtgggaccgaaacgggacaagttattacgacgacagttgggggtagagatggaaagccaaagcagactatctcatacatggcccagcgagtggttggaaccggctcattcggagtagtgttccaggccaagtgcctggaaacgggtgaacaagttgcaattaagaaggttctgcaggataaaagatacaagaacagagaacttcagatcatgcgtttgcaagaccatcccaacgttgtgcggctgaggcattctttcttttcaacaactgacaaggatgagctgtatctcaaccttgtccttgagtatgttcccgaaactgtatacagagcatcgaagcactataccaaaatgaatcagcatatgccaattatctttgttcagctctatacttatcagatttgccgtgcgctgaactacttacatcgcgtggttggggtgtgtcaccgtgacattaagccacaaaatctactggttaatccccaaactcatcaattaaaaatatgcgattttggaagcgcaaagatgttggtacccggtgaacctaacatatcctatatatgctcccggtactacagggccccagaacttatatttggggcgacagagtataccaatgccattgacatgtggtccggcggttgtgtcatggcagagcttttacttggtcaaccactgtttcccggggaaagtggcattgatcagctggtggagataatcaagattcttgggacgcctacaagagaagaaatacggtgtatgaatccgaattacacagagttcaagtttcctcaaatcaaagctcacccgtggcacaagattttccacaagcgaatgccacctgaagcagtagacctcgtctcaagactccttcagtactcaccaaaccttcgttgcactgcattggaagcttgtgcacaccccttctttgatgacttacgggatccaaatgtttcactgccaaatggaagagcactgcctccattgtttaacttcactgcccaagaacttgcgggtgcatcaacagagctgcgacagcgtctaattccagcacattgccagggaacgggaagtagctcttaggatcatttatagcgtgtccaaatccagctttctttctctccctctatttactgcagtgtgtacatcaattttgaaccacttctgcttccaagcttttgtcgccggaggagagattggaaatctgtacgccgggacctgatgaggtgtgaaataactggggtcatgaagcttcttcttcttcttctgactggcttttctctcaatttgctatccttgttattttcaccttcactttcatttttttgtttttttttccacaaatctgaccccccttatatgtttggtgtatcatttttatgtgtttgtaatccatcaagatcattttcccttgccctaatattgcaagctaagattccgtttc

SEQ ID NO: 46579 - protein, 472 aa, Arabidopsis thaliana
  peptide (1)..(472): Ceres Seq. ID no. 13578761
  misc_feature (138)..(422): Pfam Name: Protein kinase domain Pfam Description: Protein kinase domain
  misc_feature (103)..(466): Homolog of NCBI NO: 25287630 NR Description: hypothetical protein [imported] - Arabidopsis
  misc_feature (1)..(464): Homolog of NCBI NO: 7434275 NR Description: shaggy protein kinase (EC 2.7.1.-) 111
  misc_feature (3)..(466): Homolog of NCBI NO: 3702608 NR Description: shaggy kinase 7 [Petunia x hybrida]
  misc_feature (1)..(466): Homolog of NCBI NO: 10185114 NR Description: wound-induced GSK-3-like protein [Medicago sativa]
  misc_feature (1)..(464): Homolog of NCBI NO: 3236117 NR Description: shaggy kinase 6 [Petunia x hybrida]
  misc_feature (1)..(464): Homolog of NCBI NO: 7434276 NR Description: shaggy protein kinase (EC 2.7.1.-) 59
  misc_feature (1)..(464): Homolog of NCBI NO: 7434277 NR Description: shaggy protein kinase (EC 2.7.1.-) 91
  misc_feature (1)..(464): Homolog of NCBI NO: 7434282 NR Description: shaggy protein kinase (EC 2.7.1.-) 6 - common
  misc_feature (1)..(472): Homolog of NCBI NO: 11132756 NR Description: Shaggy-related protein kinase theta (ASK-theta)
  misc_feature (1)..(472): Homolog of NCBI NO: 15236918 NR Description: Shaggy related protein kinase tetha [Arabidopsis
MNVMRRLKSIASGRTSISSDPGGDYALKRAKLDQENDNLCVDPMQVDQNSSCFEMKADVLSQESVAGTSNVPAVSEKPVDDQLPDVMIEMKIRDERNANREDKDMETTVVNGSGTETGQVITTTVGGRDGKPKQTISYMAQRVVGTGSFGVVFQAKCLETGEQVAIKKVLQDKRYKNRELQIMRLQDHPNVVRLRHSFFSTTDKDELYLNLVLEYVPETVYRASKHYTKMNQHMPIIFVQLYTYQICRALNYLHRVVGVCHRDIKPQNLLVNPQTHQLKICDFGSAKMLVPGEPNISYICSRYYRAPELIFGATEYTNAIDMWSGGCVMAELLLGQPLFPGESGIDQLVEIIKILGTPTREEIRCMNPNYTEFKFPQIKAHPWHKIFHKRMPPEAVDLVSRLLQYSPNLRCTALEACAHPFFDDLRDPNVSLPNGRALPPLFNFTAQELAGASTELRQRLIPAHCQGTGSSS

SEQ ID NO: 46580 - protein, 469 aa, Arabidopsis thaliana
  peptide (1)..(469): Ceres Seq. ID no. 13578762
  misc_feature (135)..(419): Pfam Name: Protein kinase domain Pfam Description: Protein kinase domain
  misc_feature (100)..(463): Homolog of NCBI NO: 25287630 NR Description: hypothetical protein [imported] - Arabidopsis
  misc_feature (1)..(461): Homolog of NCBI NO: 7434275 NR Description: shaggy protein kinase (EC 2.7.1.-) 111
  misc_feature (1)..(463): Homolog of NCBI NO: 3702608 NR Description: shaggy kinase 7 [Petunia x hybrida]
  misc_feature (1)..(463): Homolog of NCBI NO: 10185114 NR Description: wound-induced GSK-3-like protein [Medicago sativa]
  misc_feature (1)..(461): Homolog of NCBI NO: 3236117 NR Description: shaggy kinase 6 [Petunia x hybrida]
  misc_feature (1)..(461): Homolog of NCBI NO: 7434276 NR Description: shaggy protein kinase (EC 2.7.1.-) 59
  misc_feature (1)..(461): Homolog of NCBI NO: 7434277 NR Description: shaggy protein kinase (EC 2.7.1.-) 91
  misc_feature (1)..(461): Homolog of NCBI NO: 7434282 NR Description: shaggy protein kinase (EC 2.7.1.-) 6 - common
  misc_feature (1)..(469): Homolog of NCBI NO: 11132756 NR Description: Shaggy-related protein kinase theta (ASK-theta)
  misc_feature (1)..(469): Homolog of NCBI NO: 15236918 NR Description: Shaggy related protein kinase tetha [Arabidopsis
MRRLKSIASGRTSISSDPGGDYALKRAKLDQENDNLCVDPMQVDQNSSCFEMKADVLSQESVAGTSNVPAVSEKPVDDQLPDVMIEMKIRDERNANREDKDMETTVVNGSGTETGQVITTTVGGRDGKPKQTISYMAQRVVGTGSFGVVFQAKCLETGEQVAIKKVLQDKRYKNRELQIMRLQDHPNVVRLRHSFFSTTDKDELYLNLVLEYVPETVYRASKHYTKMNQHMPIIFVQLYTYQICRALNYLHRVVGVCHRDIKPQNLLVNPQTHQLKICDFGSAKMLVPGEPNISYICSRYYRAPELIFGATEYTNAIDMWSGGCVMAELLLGQPLFPGESGIDQLVEIIKILGTPTREEIRCMNPNYTEFKFPQIKAHPWHKIFHKRMPPEAVDLVSRLLQYSPNLRCTALEACAHPFFDDLRDPNVSLPNGRALPPLFNFTAQELAGASTELRQRLIPAHCQGTGSSS

SEQ ID NO: 46581 - protein, 429 aa, Arabidopsis thaliana
  peptide (1)..(429): Ceres Seq. ID no. 13578763
  misc_feature (95)..(379): Pfam Name: Protein kinase domain Pfam Description: Protein kinase domain
  misc_feature (60)..(423): Homolog of NCBI NO: 25287630 NR Description: hypothetical protein [imported] - Arabidopsis
  misc_feature (1)..(421): Homolog of NCBI NO: 7434275 NR Description: shaggy protein kinase (EC 2.7.1.-) 111
  misc_feature (1)..(423): Homolog of NCBI NO: 3702608 NR Description: shaggy kinase 7 [Petunia x hybrida]
  misc_feature (1)..(423): Homolog of NCBI NO: 10185114 NR Description: wound-induced GSK-3-like protein [Medicago sativa]
  misc_feature (1)..(421): Homolog of NCBI NO: 3236117 NR Description: shaggy kinase 6 [Petunia x hybrida]
  misc_feature (1)..(421): Homolog of NCBI NO: 7434276 NR Description: shaggy protein kinase (EC 2.7.1.-) 59
  misc_feature (1)..(421): Homolog of NCBI NO: 7434277 NR Description: shaggy protein kinase (EC 2.7.1.-) 91
  misc_feature (1)..(421): Homolog of NCBI NO: 7434282 NR Description: shaggy protein kinase (EC 2.7.1.-) 6 - common
  misc_feature (1)..(429): Homolog of NCBI NO: 11132756 NR Description: Shaggy-related protein kinase theta (ASK-theta)
  misc_feature (1)..(429): Homolog of NCBI NO: 15236918 NR Description: Shaggy related protein kinase tetha [Arabidopsis
MQVDQNSSCFEMKADVLSQESVAGTSNVPAVSEKPVDDQLPDVMIEMKIRDERNANREDKDMETTVVNGSGTETGQVITTTVGGRDGKPKQTISYMAQRVVGTGSFGVVFQAKCLETGEQVAIKKVLQDKRYKNRELQIMRLQDHPNVVRLRHSFFSTTDKDELYLNLVLEYVPETVYRASKHYTKMNQHMPIIFVQLYTYQICRALNYLHRVVGVCHRDIKPQNLLVNPQTHQLKICDFGSAKMLVPGEPNISYICSRYYRAPELIFGATEYTNAIDMWSGGCVMAELLLGQPLFPGESGIDQLVEIIKILGTPTREEIRCMNPNYTEFKFPQIKAHPWHKIFHKRMPPEAVDLVSRLLQYSPNLRCTALEACAHPFFDDLRDPNVSLPNGRALPPLFNFTAQELAGASTELRQRLIPAHCQGTGSSS

SEQ ID NO: 46582 - DNA, 1702 bp, Arabidopsis thaliana; identical to SEQ ID NO: 45012
  misc_feature (1)..(1702): Ceres Seq. ID no. 12600391
  misc_feature: MA Experiment ID: 20000179 Result: Up-regulated in Transcription
  misc_feature: MA Experiment 20000179 PARAMETER Experiment Name: At_Germinating_Seeds_P Parameter: Age (hr) Value: 6 vs. 0
  misc_feature: MA Experiment 20000179 PARAMETER Experiment Name: At_Germinating_Seeds_P Parameter: Tissue Value: Germinating Seeds
  misc_feature: MA Experiment ID: 20000180 Result: Up-regulated in Transcription
  misc_feature: MA Experiment 20000180 PARAMETER Experiment Name: At_Germinating_Seeds_P Parameter: Age (hr) Value: 24 vs. 0
  misc_feature: MA Experiment 20000180 PARAMETER Experiment Name: At_Germinating_Seeds_P Parameter: Tissue Value: Germinating Seeds
  misc_feature: MA Experiment ID: 20000265 Result: Up-regulated in Transcription
  misc_feature: MA Experiment 20000265 PARAMETER Experiment Name: At_Open_Flower_P Parameter: Age (day) Value: 21
  misc_feature: MA Experiment 20000265 PARAMETER Experiment Name: At_Open_Flower_P Parameter: Plant Line Value: WS
  misc_feature: MA Experiment 20000265 PARAMETER Experiment Name: At_Open_Flower_P Parameter: Tissue Value: Closed Flower vs. Whole Plant
  misc_feature: MA Experiment ID: 20000437 Result: Down-regulated in Transcription
  misc_feature: MA Experiment 20000437 PARAMETER Experiment Name: At_Drought_P Parameter: Age (day) Value: 8
  misc_feature: MA Experiment 20000437 PARAMETER Experiment Name: At_Drought_P Parameter: Organism Value: A. thaliana
  misc_feature: MA Experiment 20000437 PARAMETER Experiment Name: At_Drought_P Parameter: Plant Line Value: WS
  misc_feature: MA Experiment 20000437 PARAMETER Experiment Name: At_Drought_P Parameter: Timepoint (hr) Value: 24
  misc_feature: MA Experiment 20000437 PARAMETER Experiment Name: At_Drought_P Parameter: Tissue Value: Whole Plant
  misc_feature: MA Experiment 20000437 PARAMETER Experiment Name: At_Drought_P Parameter: Treatment Value: Drought vs. No Drought
  misc_feature: MA Experiment ID: 20000495 Result: Up-regulated in Transcription
  misc_feature: MA Experiment 20000495 PARAMETER Experiment Name: At_Guard_Cells_P Parameter: Harvest Date Value: 8/2/2002
  misc_feature: MA Experiment 20000495 PARAMETER Experiment Name: At_Guard_Cells_P Parameter: Organism Value: A. thaliana
  misc_feature: MA Experiment 20000495 PARAMETER Experiment Name: At_Guard_Cells_P Parameter: Tissue Value: Guard Cells vs. Leaves
  misc_feature: MA Experiment ID: 20000496 Result: Up-regulated in Transcription
  misc_feature: MA Experiment 20000496 PARAMETER Experiment Name: At_Guard_Cells_P Parameter: Harvest Date Value: 7/19/2002
  misc_feature: MA Experiment 20000496 PARAMETER Experiment Name: At_Guard_Cells_P Parameter: Organism Value: Canola
  misc_feature: MA Experiment 20000496 PARAMETER Experiment Name: At_Guard_Cells_P Parameter: Tissue Value: Guard Cells vs. Leaves
  misc_feature: MA Experiment ID: 20000794 Result: Down-regulated in Transcription
  misc_feature: MA Experiment 20000794 PARAMETER Experiment Name: At_Petals_P Parameter: Age (day) Value: 23-25 days
  misc_feature: MA Experiment 20000794 PARAMETER Experiment Name: At_Petals_P Parameter: Plant Line Value: WS
  misc_feature: MA Experiment 20000794 PARAMETER Experiment Name: At_Petals_P Parameter: Tissue Value: Petals vs. Whole plant
  misc_feature: MA Experiment ID: 20001248 Result: Down-regulated in Transcription
  misc_feature: MA Experiment 20001248 PARAMETER Experiment Name: At_Far-red-induction_P Parameter: Age (day) Value: 7
  misc_feature: MA Experiment 20001248 PARAMETER Experiment Name: At_Far-red-induction_P Parameter: Light Value: Far-red vs. White
  misc_feature: MA Experiment 20001248 PARAMETER Experiment Name: At_Far-red-induction_P Parameter: Organism Value: A. thaliana
  misc_feature: MA Experiment 20001248 PARAMETER Experiment Name: At_Far-red-induction_P Parameter: Plant Line Value: Columbia
  misc_feature: MA Experiment 20001248 PARAMETER Experiment Name: At_Far-red-induction_P Parameter: Timepoint (hr) Value: 4
  misc_feature: MA Experiment 20001248 PARAMETER Experiment Name: At_Far-red-induction_P Parameter: Tissue Value: Whole Plant
  misc_feature: MA Experiment ID: 20001556 Result: Down-regulated in Transcription
  misc_feature: MA Experiment 20001556 PARAMETER Experiment Name: At_Drought_Soil_Dry_P Parameter: Age (day) Value: 26
  misc_feature: MA Experiment 20001556 PARAMETER Experiment Name: At_Drought_Soil_Dry_P Parameter: Organism Value: A. thaliana
  misc_feature: MA Experiment 20001556 PARAMETER Experiment Name: At_Drought_Soil_Dry_P Parameter: Plant Line Value: WS
  misc_feature: MA Experiment 20001556 PARAMETER Experiment Name: At_Drought_Soil_Dry_P Parameter: Post Timepoint (hr) Value: None
  misc_feature: MA Experiment 20001556 PARAMETER Experiment Name: At_Drought_Soil_Dry_P Parameter: Post-Treatment Value: None
  misc_feature: MA Experiment 20001556 PARAMETER Experiment Name: At_Drought_Soil_Dry_P Parameter: Timepoint (day) Value: 12
  misc_feature: MA Experiment 20001556 PARAMETER Experiment Name: At_Drought_Soil_Dry_P Parameter: Treatment Value: Drought vs. No Drought
  misc_feature: MA Experiment ID: 20001558 Result: Up-regulated in Transcription
  misc_feature: MA Experiment 20001558 PARAMETER Experiment Name: At_Drought_Soil_Dry_P Parameter: Age (day) Value: 27
  misc_feature: MA Experiment 20001558 PARAMETER Experiment Name: At_Drought_Soil_Dry_P Parameter: Organism Value: A. thaliana
  misc_feature: MA Experiment 20001558 PARAMETER Experiment Name: At_Drought_Soil_Dry_P Parameter: Plant Line Value: WS
  misc_feature: MA Experiment 20001558 PARAMETER Experiment Name: At_Drought_Soil_Dry_P Parameter: Post Timepoint (hr) Value: 6
  misc_feature: MA Experiment 20001558 PARAMETER Experiment Name: At_Drought_Soil_Dry_P Parameter: Post-Treatment Value: Re-Water vs. No Drought
  misc_feature: MA Experiment 20001558 PARAMETER Experiment Name: At_Drought_Soil_Dry_P Parameter: Timepoint (day) Value: 13
  misc_feature: MA Experiment 20001558 PARAMETER Experiment Name: At_Drought_Soil_Dry_P Parameter: Treatment Value: Drought vs. No Drought
  misc_feature: MA Experiment ID: 20001911 Result: Down-regulated in Transcription
  misc_feature: MA Experiment 20001911 PARAMETER Experiment Name: At_Drought_Reproduction_P Parameter: Age (day) Value: 40
  misc_feature: MA Experiment 20001911 PARAMETER Experiment Name: At_Drought_Reproduction_P Parameter: Organism Value: A. thaliana
  misc_feature: MA Experiment 20001911 PARAMETER Experiment Name: At_Drought_Reproduction_P Parameter: Plant Line Value: WS
  misc_feature: MA Experiment 20001911 PARAMETER Experiment Name: At_Drought_Reproduction_P Parameter: Timepoint (day) Value: 10
  misc_feature: MA Experiment 20001911 PARAMETER Experiment Name: At_Drought_Reproduction_P Parameter: Tissue Value: Flowers
  misc_feature: MA Experiment 20001911 PARAMETER Experiment Name: At_Drought_Reproduction_P Parameter: Treatment Value: Drought vs. No Drought

SEQ ID NO: 46583 - protein, 376 aa, Arabidopsis thaliana; identical to SEQ ID NO: 45013
  peptide (1)..(376): Ceres Seq. ID no. 12600392
  misc_feature (61)..(187): Pfam Name: Cyclin, N-terminal domain Pfam Description: Cyclin, N-terminal domain
  misc_feature (61)..(187): Pfam Name: Cyclin, N-terminal domain Pfam Description: Cyclin, N-terminal domain
  misc_feature (31)..(375): Homolog of NCBI NO: 7488731 NR Description: cyclin 4, D-type - alfalfa
  misc_feature (31)..(375): Homolog of NCBI NO: 4583990 NR Description: cyclin D3 [Medicago sativa]
  misc_feature (25)..(375): Homolog of NCBI NO: 3608179 NR Description: cyclin D [Pisum sativum]
  misc_feature (16)..(344): Homolog of NCBI NO: 33517432 NR Description: cyclin D3-2 [Euphorbia esula]
  misc_feature (1)..(369): Homolog of NCBI NO: 29374148 NR Description: cyclin D [Populus alba]
  misc_feature (31)..(375): Homolog of NCBI NO: 7488731 NR Description: cyclin 4, D-type - alfalfa
  misc_feature (25)..(375): Homolog of NCBI NO: 3608179 NR Description: cyclin D [Pisum sativum]
  misc_feature (1)..(369): Homolog of NCBI NO: 29374148 NR Description: cyclin D [Populus alba]
  misc_feature (1)..(376): Homolog of NCBI NO: 15235254 NR Description: Cyclin D3;1; protein id: At4g34160.1 [Arabidopsis
  misc_feature (1)..(376): Homolog of NCBI NO: 3915637 NR Description: Cyclin delta-3
  misc_feature (1)..(358): Homolog of NCBI NO: 4586801 NR Description: NtcycD3-1 [Nicotiana tabacum]
  misc_feature (1)..(347): Homolog of NCBI NO: 4160300 NR Description: cyclin D3.1 protein [Nicotiana tabacum]
  misc_feature (25)..(347): Homolog of NCBI NO: 6434199 NR Description: CycD3;2 [Lycopersicon esculentum]
  misc_feature (16)..(344): Homolog of NCBI NO: 33517432 NR Description: cyclin D3-2 [Euphorbia esula]
  misc_feature (31)..(375): Homolog of NCBI NO: 4583990 NR Description: cyclin D3 [Medicago sativa]
  misc_feature (25)..(347): Homolog of NCBI NO: 6434199 NR Description: CycD3;2 [Lycopersicon esculentum]
  misc_feature (1)..(347): Homolog of NCBI NO: 4160300 NR Description: cyclin D3.1 protein [Nicotiana tabacum]
  misc_feature (1)..(358): Homolog of NCBI NO: 4586801 NR Description: NtcycD3-1 [Nicotiana tabacum]
  misc_feature (1)..(376): Homolog of NCBI NO: 3915637 NR Description: Cyclin delta-3
  misc_feature (1)..(376): Homolog of NCBI NO: 15235254 NR Description: Cyclin D3;1; protein id: At4g34160.1 [Arabidopsis

SEQ ID NO: 46584 - protein, 246 aa, Arabidopsis thaliana; identical to SEQ ID NO: 45014
  peptide (1)..(246): Ceres Seq. ID no. 12600393
  misc_feature (1)..(57): Pfam Name: Cyclin, N-terminal domain Pfam Description: Cyclin, N-terminal domain
  misc_feature (1)..(57): Pfam Name: Cyclin, N-terminal domain Pfam Description: Cyclin, N-terminal domain
  misc_feature (1)..(245): Homolog of NCBI NO: 7488731 NR Description: cyclin 4, D-type - alfalfa
  misc_feature (1)..(245): Homolog of NCBI NO: 4583990 NR Description: cyclin D3 [Medicago sativa]
  misc_feature (1)..(245): Homolog of NCBI NO: 3608179 NR Description: cyclin D [Pisum sativum]
  misc_feature (1)..(214): Homolog of NCBI NO: 33517432 NR Description: cyclin D3-2 [Euphorbia esula]
  misc_feature (1)..(239): Homolog of NCBI NO: 29374148 NR Description: cyclin D [Populus alba]
  misc_feature (1)..(245): Homolog of NCBI NO: 7488731 NR Description: cyclin 4, D-type - alfalfa
  misc_feature (1)..(245): Homolog of NCBI NO: 3608179 NR Description: cyclin D [Pisum sativum]
  misc_feature (1)..(239): Homolog of NCBI NO: 29374148 NR Description: cyclin D [Populus alba]
  misc_feature (1)..(246): Homolog of NCBI NO: 15235254 NR Description: Cyclin D3;1; protein id: At4g34160.1 [Arabidopsis
  misc_feature (1)..(246): Homolog of NCBI NO: 3915637 NR Description: Cyclin delta-3
  misc_feature (1)..(228): Homolog of NCBI NO: 4586801 NR Description: NtcycD3-1 [Nicotiana tabacum]
  misc_feature (1)..(217): Homolog of NCBI NO: 4160300 NR Description: cyclin D3.1 protein [Nicotiana tabacum]
  misc_feature (1)..(217): Homolog of NCBI NO: 6434199 NR Description: CycD3;2 [Lycopersicon esculentum]
  misc_feature (1)..(214): Homolog of NCBI NO: 33517432 NR Description: cyclin D3-2 [Euphorbia esula]
  misc_feature (1)..(245): Homolog of NCBI NO: 4583990 NR Description: cyclin D3 [Medicago sativa]
  misc_feature (1)..(217): Homolog of NCBI NO: 6434199 NR Description: CycD3;2 [Lycopersicon esculentum]
  misc_feature (1)..(217): Homolog of NCBI NO: 4160300 NR Description: cyclin D3.1 protein [Nicotiana tabacum]
  misc_feature (1)..(228): Homolog of NCBI NO: 4586801 NR Description: NtcycD3-1 [Nicotiana tabacum]
  misc_feature (1)..(246): Homolog of NCBI NO: 3915637 NR Description: Cyclin delta-3
  misc_feature (1)..(246): Homolog of NCBI NO: 15235254 NR Description: Cyclin D3;1; protein id: At4g34160.1 [Arabidopsis

SEQ ID NO: 46585 - protein, 203 aa, Arabidopsis thaliana; identical to SEQ ID NO: 45015
  peptide (1)..(203): Ceres Seq. ID no. 12600394
  misc_feature (16)..(139): Pfam Name: Cyclin, C-terminal domain Pfam Description: Cyclin, C-terminal domain
  misc_feature (16)..(139): Pfam Name: Cyclin, C-terminal domain Pfam Description: Cyclin, C-terminal domain
  misc_feature (1)..(202): Homolog of NCBI NO: 7488731 NR Description: cyclin 4, D-type - alfalfa
  misc_feature (1)..(202): Homolog of NCBI NO: 4583990 NR Description: cyclin D3 [Medicago sativa]
  misc_feature (1)..(202): Homolog of NCBI NO: 3608179 NR Description: cyclin D [Pisum sativum]
  misc_feature (1)..(171): Homolog of NCBI NO: 33517432 NR Description: cyclin D3-2 [Euphorbia esula]
  misc_feature (1)..(196): Homolog of NCBI NO: 29374148 NR Description: cyclin D [Populus alba]
  misc_feature (1)..(202): Homolog of NCBI NO: 7488731 NR Description: cyclin 4, D-type - alfalfa
  misc_feature (1)..(202): Homolog of NCBI NO: 3608179 NR Description: cyclin D [Pisum sativum]
  misc_feature (1)..(196): Homolog of NCBI NO: 29374148 NR Description: cyclin D [Populus alba]
  misc_feature (1)..(203): Homolog of NCBI NO: 15235254 NR Description: Cyclin D3;1; protein id: At4g34160.1 [Arabidopsis
  misc_feature (1)..(203): Homolog of NCBI NO: 3915637 NR Description: Cyclin delta-3
  misc_feature (1)..(185): Homolog of NCBI NO: 4586801 NR Description: NtcycD3-1 [Nicotiana tabacum]
  misc_feature (1)..(174): Homolog of NCBI NO: 4160300 NR Description: cyclin D3.1 protein [Nicotiana tabacum]
  misc_feature (1)..(174): Homolog of NCBI NO: 6434199 NR Description: CycD3;2 [Lycopersicon esculentum]
  misc_feature (1)..(171): Homolog of NCBI NO: 33517432 NR Description: cyclin D3-2 [Euphorbia esula]
  misc_feature (1)..(202): Homolog of NCBI NO: 4583990 NR Description: cyclin D3 [Medicago sativa]
  misc_feature (1)..(174): Homolog of NCBI NO: 6434199 NR Description: CycD3;2 [Lycopersicon esculentum]
  misc_feature (1)..(174): Homolog of NCBI NO: 4160300 NR Description: cyclin D3.1 protein [Nicotiana tabacum]
  misc_feature (1)..(185): Homolog of NCBI NO: 4586801 NR Description: NtcycD3-1 [Nicotiana tabacum]
  misc_feature (1)..(203): Homolog of NCBI NO: 3915637 NR Description: Cyclin delta-3
  misc_feature (1)..(203): Homolog of NCBI NO: 15235254 NR Description: Cyclin D3;1; protein id: At4g34160.1 [Arabidopsis

SEQ ID NO: 46586 - DNA, 2257 bp, Arabidopsis thaliana
  misc_feature (1)..(2257): Ceres Seq. ID no. 14309985
  misc_feature: MA Experiment ID: 20000173 Result: Down-regulated in Transcription
  misc_feature: MA Experiment 20000173 PARAMETER Experiment Name: At_42deg_Heat_P Parameter: Age (day) Value: 14
  misc_feature: MA Experiment 20000173 PARAMETER Experiment Name: At_42deg_Heat_P Parameter: Organism Value: A. thaliana
  misc_feature: MA Experiment 20000173 PARAMETER Experiment Name: At_42deg_Heat_P Parameter: Plant Line Value: WS
  misc_feature: MA Experiment 20000173 PARAMETER Experiment Name: At_42deg_Heat_P Parameter: Temperature (deg C) Value: 42 vs. 22
  misc_feature: MA Experiment 20000173 PARAMETER Experiment Name: At_42deg_Heat_P Parameter: Timepoint (hr) Value: 6
  misc_feature: MA Experiment 20000173 PARAMETER Experiment Name: At_42deg_Heat_P Parameter: Tissue Value: Aerial
  misc_feature: MA Experiment ID: 20001557 Result: Down-regulated in Transcription
  misc_feature: MA Experiment 20001557 PARAMETER Experiment Name: At_Drought_Soil_Dry_P Parameter: Age (day) Value: 27
  misc_feature: MA Experiment 20001557 PARAMETER Experiment Name: At_Drought_Soil_Dry_P Parameter: Organism Value: A. thaliana
  misc_feature: MA Experiment 20001557 PARAMETER Experiment Name: At_Drought_Soil_Dry_P Parameter: Plant Line Value: WS
  misc_feature: MA Experiment 20001557 PARAMETER Experiment Name: At_Drought_Soil_Dry_P Parameter: Post Timepoint (hr) Value: 3
  misc_feature: MA Experiment 20001557 PARAMETER Experiment Name: At_Drought_Soil_Dry_P Parameter: Post-Treatment Value: Re-Water vs. No Drought
  misc_feature: MA Experiment 20001557 PARAMETER Experiment Name: At_Drought_Soil_Dry_P Parameter: Timepoint (day) Value: 13
  misc_feature: MA Experiment 20001557 PARAMETER Experiment Name: At_Drought_Soil_Dry_P Parameter: Treatment Value: Drought vs. No Drought
  misc_feature: MA Experiment ID: 20001558 Result: Down-regulated in Transcription
  misc_feature: MA Experiment 20001558 PARAMETER Experiment Name: At_Drought_Soil_Dry_P Parameter: Age (day) Value: 27
  misc_feature: MA Experiment 20001558 PARAMETER Experiment Name: At_Drought_Soil_Dry_P Parameter: Organism Value: A. thaliana
  misc_feature: MA Experiment 20001558 PARAMETER Experiment Name: At_Drought_Soil_Dry_P Parameter: Plant Line Value: WS
  misc_feature: MA Experiment 20001558 PARAMETER Experiment Name: At_Drought_Soil_Dry_P Parameter: Post Timepoint (hr) Value: 6
  misc_feature: MA Experiment 20001558 PARAMETER Experiment Name: At_Drought_Soil_Dry_P Parameter: Post-Treatment Value: Re-Water vs. No Drought
  misc_feature: MA Experiment 20001558 PARAMETER Experiment Name: At_Drought_Soil_Dry_P Parameter: Timepoint (day) Value: 13
  misc_feature: MA Experiment 20001558 PARAMETER Experiment Name: At_Drought_Soil_Dry_P Parameter: Treatment Value: Drought vs. No Drought
  misc_feature: MA Experiment ID: 20001905 Result: Down-regulated in Transcription
  misc_feature: MA Experiment 20001905 PARAMETER Experiment Name: At_Drought_Reproduction_P Parameter: Age (day) Value: 40
  misc_feature: MA Experiment 20001905 PARAMETER Experiment Name: At_Drought_Reproduction_P Parameter: Organism Value: A. thaliana
  misc_feature: MA Experiment 20001905 PARAMETER Experiment Name: At_Drought_Reproduction_P Parameter: Plant Line Value: WS
  misc_feature: MA Experiment 20001905 PARAMETER Experiment Name: At_Drought_Reproduction_P Parameter: Timepoint (day) Value: 10
  misc_feature: MA Experiment 20001905 PARAMETER Experiment Name: At_Drought_Reproduction_P Parameter: Tissue Value: Rosettes
  misc_feature: MA Experiment 20001905 PARAMETER Experiment Name: At_Drought_Reproduction_P Parameter: Treatment Value: Drought vs. No Drought
gttttgtttttgaatcagatccttattcttgacctttcgatcagattcatggcaacgactcaatcacacacctcagatcttacttcagaggagcaacctgctagtttggacatcatgaaggagcagactgtcccggcaaacaacgagacatcagcctcttttaagtcctcccaggaagctccagttgtagttcatccagcaaaagttgctccacttactggaccttatggtttagccggtgattttgccggacacttaccgagcagcatcctctctcctcaagcacaaggcttttactatagaggttatgaaaaccccacaggcgaatgggacgagtattcctcgtatgtcaatgttgaaggattggacatcacatctcctgttggcttcaatgagaatgcttctctggtctaccaaacgggatatggatacaaccctcaaatgccatatgggccatattcccctgcagcaagtcccttgccttctgagggacagttgtattctccacaacagtttccgttttcaggggcatcaccgtattaccagcaggtagttcctcctagcatgcaatatattacttctccaactcagcccgagctcaccagccttgtcggtgttgaccaacaaggtgataacatcggaccacgccagtcctaccatcctcatcccattggaccgtttaatggaaaccagccaaaccttggttttcctgaatggcagcaaggttttgacgggggaatatggtcggattggtccaagccttctgatatgcacaggcattcttcttctatttctccggctttatctcctcagccactcggctcatatggatcatatggccagaacatacccatggggtcacagcgacagagatcattttacggttttggatctggttcgaactcttataacagaggttatatgcatagtggtggtcgtggccagggttctaactatggaagtagactaatttctaatgtgggtatgggaaaccaaggctggattggggttgacaacagtcgagggcgtggaagggttagtgatccatctttgggtggtgcttataatggtacttttgatatcctcaatgagcaaaatcgaggaccaagggcttcaaagcccaagactcaggtcttagaggagcttgattctgctgctgattctaagaaaaataacaaaggcagtgcaaaggagcacgaggaatccaacaacgcagactttgtcaccgactacactaacgccaagttgttcatcatcaagtcttacagtgaagacaatgttcacaaaagcatcaaatacaatgtatgggctagcacccctaatggcaacaaaaagcttgacgctgcttatcgtgaggccaaggatgagaaagaaccgtgtccactttttcttctgttctcggtaaatgcgagctctcaattctgtggtgtagcagagatggttggacctgttgattttgagaagagcgttgattactggcaacaagataaatggagtggacagttcccagtgaagtggcacattatcaaagatgttccaaacagccagttccgccacattatattggaaaacaatgacaataagcctgtgactaatagtcgagacacccaagaagtaaaactggaacagggcatcgagaagctgaagatcttcaagaactacgacgctgacacgtcaatcttggatgatttcgggttttatgaagagcgggagaaaattatacaagaccggaaggcaagaagacagccaagcttgccatctgcaggagtagtagcaggagaaaatgaacataaacctgcttctgctgcattacccacagacttcatgaagaacatgtccaagagttttgcgcaagttgtccgcttggacgaaggcagcaaagaagcagtcaaggccagttcatctccagatgcaattacaacagcagcagtctcttctggtcaatccaactagtaagtaaaagacatcaattagcaaagactatgttttcaaattccataatatgatcttttgtttgttctaagaaggtatttcaaatgaaattttacgtctgaccgggtctggtttttgtgtaaagtaagcctctttcctccgcccttttctgcttcaggggtatttagccaaaatttgattcatttccctcttttcaatgttctataataccctcactcttctgagttgatagaagaagaagatgaagaagataatgtatgaaagacaatataatgtttctcttgtaaagttggcctcatttatc

SEQ ID NO: 46587 - protein, 650 aa, Arabidopsis thaliana
  peptide (1)..(650): Ceres Seq. ID no. 14309986
  misc_feature (464)..(554): Pfam Name: YT521-B-like family Pfam Description: YT521-B-like family
  misc_feature (97)..(202): Homolog of NCBI NO: 15221079 NR Description: expressed protein [Arabidopsis thaliana]
  misc_feature (349)..(580): Homolog of NCBI NO: 15221079 NR Description: expressed protein [Arabidopsis thaliana]
  misc_feature (86)..(588): Homolog of NCBI NO: 25372787 NR Description: Rubisco subunit binding-protein beta subunit
  misc_feature (86)..(601): Homolog of NCBI NO: 18405397 NR Description: expressed protein [Arabidopsis thaliana]
  misc_feature (269)..(628): Homolog of NCBI NO: 38567895 NR Description: OSJNBa0060N03.15 [Oryza sativa (japonica
  misc_feature (18)..(233): Homolog of NCBI NO: 22773231 NR Description: Putative RNA-binding protein
  misc_feature (291)..(582): Homolog of NCBI NO: 22773231 NR Description: Putative RNA-binding protein
  misc_feature (126)..(646): Homolog of NCBI NO: 38636667 NR Description: putative Rubisco subunit binding-protein beta
  misc_feature (148)..(650): Homolog of NCBI NO: 15795138 NR Description: gb|AAF35955.1~gene_id:MGH6.21~strong similarity
  misc_feature (17)..(539): Homolog of NCBI NO: 30682433 NR Description: expressed protein [Arabidopsis thaliana]
VLFLNQILILDLSIRFMATTQSHTSDLTSEEQPASLDIMKEQTVPANNETSASFKSSQEAPVVVHPAKVAPLTGPYGLAGDFAGHLPSSILSPQAQGFYYRGYENPTGEWDEYSSYVNVEGLDITSPVGFNENASLVYQTGYGYNPQMPYGPYSPAASPLPSEGQLYSPQQFPFSGASPYYQQVVPPSMQYITSPTQPELTSLVGVDQQGDNIGPRQSYHPHPIGPFNGNQPNLGFPEWQQGFDGGIWSDWSKPSDMHRHSSSISPALSPQPLGSYGSYGQNIPMGSQRQRSFYGFGSGSNSYNRGYMHSGGRGQGSNYGSRLISNVGMGNQGWIGVDNSRGRGRVSDPSLGGAYNGTFDILNEQNRGPRASKPKTQVLEELDSAADSKKNNKGSAKEHEESNNADFVTDYTNAKLFIIKSYSEDNVHKSIKYNVWASTPNGNKKLDAAYREAKDEKEPCPLFLLFSVNASSQFCGVAEMVGPVDFEKSVDYWQQDKWSGQFPVKWHIIKDVPNSQFRHIILENNDNKPVTNSRDTQEVKLEQGIEKLKIFKNYDADTSILDDFGFYEEREKIIQDRKARRQPSLPSAGVVAGENEHKPASAALPTDFMKNMSKSFAQVVRLDEGSKEAVKASSSPDAITTAAVSSGQSN

SEQ ID NO: 46588 - protein, 634 aa, Arabidopsis thaliana
  peptide (1)..(634): Ceres Seq. ID no. 14309987
  misc_feature (448)..(538): Pfam Name: YT521-B-like family Pfam Description: YT521-B-like family
  misc_feature (81)..(186): Homolog of NCBI NO: 15221079 NR Description: expressed protein [Arabidopsis thaliana]
  misc_feature (333)..(564): Homolog of NCBI NO: 15221079 NR Description: expressed protein [Arabidopsis thaliana]
  misc_feature (70)..(572): Homolog of NCBI NO: 25372787 NR Description: Rubisco subunit binding-protein beta subunit
  misc_feature (70)..(585): Homolog of NCBI NO: 18405397 NR Description: expressed protein [Arabidopsis thaliana]
  misc_feature (253)..(612): Homolog of NCBI NO: 38567895 NR Description: OSJNBa0060N03.15 [Oryza sativa (japonica
  misc_feature (2)..(217): Homolog of NCBI NO: 22773231 NR Description: Putative RNA-binding protein
  misc_feature (275)..(566): Homolog of NCBI NO: 22773231 NR Description: Putative RNA-binding protein
  misc_feature (110)..(630): Homolog of NCBI NO: 38636667 NR Description: putative Rubisco subunit binding-protein beta
  misc_feature (132)..(634): Homolog of NCBI NO: 15795138 NR Description: gb|AAF35955.1~gene_id:MGH6.21~strong similarity
  misc_feature (1)..(523): Homolog of NCBI NO: 30682433 NR Description: expressed protein [Arabidopsis thaliana]
MATTQSHTSDLTSEEQPASLDIMKEQTVPANNETSASFKSSQEAPVVVHPAKVAPLTGPYGLAGDFAGHLPSSILSPQAQGFYYRGYENPTGEWDEYSSYVNVEGLDITSPVGFNENASLVYQTGYGYNPQMPYGPYSPAASPLPSEGQLYSPQQFPFSGASPYYQQVVPPSMQYITSPTQPELTSLVGVDQQGDNIGPRQSYHPHPIGPFNGNQPNLGFPEWQQGFDGGIWSDWSKPSDMHRHSSSISPALSPQPLGSYGSYGQNIPMGSQRQRSFYGFGSGSNSYNRGYMHSGGRGQGSNYGSRLISNVGMGNQGWIGVDNSRGRGRVSDPSLGGAYNGTFDILNEQNRGPRASKPKTQVLEELDSAADSKKNNKGSAKEHEESNNADFVTDYTNAKLFIIKSYSEDNVHKSIKYNVWASTPNGNKKLDAAYREAKDEKEPCPLFLLFSVNASSQFCGVAEMVGPVDFEKSVDYWQQDKWSGQFPVKWHIIKDVPNSQFRHIILENNDNKPVTNSRDTQEVKLEQGIEKLKIFKNYDADTSILDDFGFYEEREKIIQDRKARRQPSLPSAGVVAGENEHKPASAALPTDFMKNMSKSFAQVVRLDEGSKEAVKASSSPDAITTAAVSSGQSN

SEQ ID NO: 46589 - protein, 612 aa, Arabidopsis thaliana
  peptide (1)..(612): Ceres Seq. ID no. 14309988
  misc_feature (426)..(516): Pfam Name: YT521-B-like family Pfam Description: YT521-B-like family
  misc_feature (59)..(164): Homolog of NCBI NO: 15221079 NR Description: expressed protein [Arabidopsis thaliana]
  misc_feature (311)..(542): Homolog of NCBI NO: 15221079 NR Description: expressed protein [Arabidopsis thaliana]
  misc_feature (48)..(550): Homolog of NCBI NO: 25372787 NR Description: Rubisco subunit binding-protein beta subunit
  misc_feature (48)..(563): Homolog of NCBI NO: 18405397 NR Description: expressed protein [Arabidopsis thaliana]
  misc_feature (231)..(590): Homolog of NCBI NO: 38567895 NR Description: OSJNBa0060N03.15 [Oryza sativa (japonica
  misc_feature (1)..(195): Homolog of NCBI NO: 22773231 NR Description: Putative RNA-binding protein
  misc_feature (253)..(544): Homolog of NCBI NO: 22773231 NR Description: Putative RNA-binding protein
  misc_feature (88)..(608): Homolog of NCBI NO: 38636667 NR Description: putative Rubisco subunit binding-protein beta
  misc_feature (110)..(612): Homolog of NCBI NO: 15795138 NR Description: gb|AAF35955.1~gene_id:MGH6.21~strong similarity
  misc_feature (1)..(501): Homolog of NCBI NO: 30682433 NR Description: expressed protein [Arabidopsis thaliana]
MKEQTVPANNETSASFKSSQEAPVVVHPAKVAPLTGPYGLAGDFAGHLPSSILSPQAQGFYYRGYENPTGEWDEYSSYVNVEGLDITSPVGFNENASLVYQTGYGYNPQMPYGPYSPAASPLPSEGQLYSPQQFPFSGASPYYQQVVPPSMQYITSPTQPELTSLVGVDQQGDNIGPRQSYHPHPIGPFNGNQPNLGFPEWQQGFDGGIWSDWSKPSDMHRHSSSISPALSPQPLGSYGSYGQNIPMGSQRQRSFYGFGSGSNSYNRGYMHSGGRGQGSNYGSRLISNVGMGNQGWIGVDNSRGRGRVSDPSLGGAYNGTFDILNEQNRGPRASKPKTQVLEELDSAADSKKNNKGSAKEHEESNNADFVTDYTNAKLFIIKSYSEDNVHKSIKYNVWASTPNGNKKLDAAYREAKDEKEPCPLFLLFSVNASSQFCGVAEMVGPVDFEKSVDYWQQDKWSGQFPVKWHIIKDVPNSQFRHIILENNDNKPVTNSRDTQEVKLEQGIEKLKIFKNYDADTSILDDFGFYEEREKIIQDRKARRQPSLPSAGVVAGENEHKPASAALPTDFMKNMSKSFAQVVRLDEGSKEAVKASSSPDAITTAAVSSGQSN

SEQ ID NO: 46590 - DNA, 2624 bp, Arabidopsis thaliana
  misc_feature (1)..(2624): Ceres Seq. ID no. 14315707
  misc_feature: MA Experiment ID: 20000315 Result: Down-regulated in Transcription
  misc_feature: MA Experiment 20000315 PARAMETER Experiment Name: At_14day_Shoots-Roots_Sub_P Parameter: Age (day) Value: 14
  misc_feature: MA Experiment 20000315 PARAMETER Experiment Name: At_14day_Shoots-Roots_Sub_P Parameter: Organism Value: A. thaliana
  misc_feature: MA Experiment 20000315 PARAMETER Experiment Name: At_14day_Shoots-Roots_Sub_P Parameter: Plant Line Value: WS
  misc_feature: MA Experiment 20000315 PARAMETER Experiment Name: At_14day_Shoots-Roots_Sub_P Parameter: Tissue Value: Shoots vs. Whole Plant
tagtccccccccccccccccccttctcttctctctccattttgggaactttcatccataaacttctatttttctcatcgcaaacttgaaccgtcgtaaccctaaatcaccatcttcatcatcggcaaatcgaatctccgattatatatcaaatagcttaccaaatccgacatgacccaggccctcgttttcggaggactataatgatcggactcttcgtgtcccgtctcgattgcatggggtttgagctatgccggagcttcgccgtggagtccgccgtggccgtgttactgatgctgtagctcccaatcagcttccgcaaacacctacagaaaagaaaccgaagaagagtaccgttaaagctccaaaaccggttgccggcggagttacaggagttgcagagaggccgaggactagattagcggcgaggaaattaaaggaggaagataaagagatacctcaggagattccggttgttgtgccgtctaaggatagcgatatcgataaaaacaagggtaaagaggtagtcgttgaagaagagaagaaagatatggctattggtaatgatagtggtggctctaacaaggcggctgctcaggaagaagaaggaaatactgatcctttccctgagagggttcaagttggaggatcaccactatataaagttgagagaaagctggtgaagggtggttttggacaagtatttgtcggacgtcgtattagtggcggtaatgatcgtagtgcaggagctagcatcttggaggttgctctaaagtttgagcataggagcagcaagggttgcaactatggtcctccacatgagtggcaggtttacaacaccttgggtggtagccatggagtccctagagtacatttcaaaggcaggcaaggagactattatgtcatggttatggacatgcttgggcctagcttatgggatttatggaatacttcagggcaagcaatgtcctcggaaatggtagcttgcattgcggttgaatcactttccatccttgaaaagatgcatgcaaaaggttatgtgcatggggatgttaagccagaaaatttcttactcggccagccttcaacgtctcaagagaaaaaactgtttcttgttgatttgggactagctacaaagtggagagaaggtggtagcggacaacatgttgaatatgatcaacgtcctgatatgtttagagggacagttagatacgcaagtgcacatgctcatttagggagaactgctagcagaagggatgatctggaatcattagcatatacactgatctttcttcaccgaggtagattgccatggcaaggatatcagggagataacaagtcattccttgtttgcaaaaagaagatggcaacatcgccggatatgctttgttgtttttgtccccctcctttcaaacaatttcttgagatcgtggtaaatatgaaatttgatgaagaacccaactatggaaagttagtatctctgtttcaagacctcttgggcgaaaatccggcaattaggcctataaacacagagggtgctcaaaagatcatattccaagttggccagaagcgaggtaggttgagcattggggaggaagaagaagatgcccctaggaaaaaggtccgtctaggagtccctgcaacgcaatggatatcgatttacaatgccaggcaaccaatgaagcagaggtatcattataatgtggctgatataagactggcacagcatattgagagaggtattgcagatggtttgttgataagctgtgtatcatcatgttcgaatctctgggcattgataatggatgctggaactggcttcacgcaccaagtctatgaactctctcctgtattcttgcacaaggaatggattatggagcagtgggagaagaactactacattagttctattgctggtgcaagcaatggaagctccttagttgtcatgtcaaaaggtacgcagtatacacagcagtcttacaaagtaagcgattcattcccgttcaagtggataaacaagaaatggagagaaggcttccatgtaacctcaatggcaacagctggaaatcgatggggtgttgttatgtcccgcaattctggctacagtgaacaggttgtggaacttgattttctgtatccaagtgaaggcatccacaggcgttgggatggtggattcagaatcacatcaacagcagccacaaccgatcaagctgctctcatcctaagcatcccacgtcgtagacttgttgatgagacacaagagacgttacgtacctctcaattccccagcacacacgtcaaggaaaaatggggaaagaatctctaccttgcatcgttaagctatggccgaactgtatcttgagacttattagtaaaaactgttgaaggacgagagaaatatgtttctaagtctcggctcctattccttatccaaccctatggcctctcaggctctgttgtgcttcttcttttttttcagttgaattgtgaagcaaaaatgtggtgattgtgttgtttattccccccttgtgaaggggattgagccataatcaccagtttacctacacatttccctcgaaattgctatatttaatttttaaatcaagaaaagatatttttgtcacc

SEQ ID NO: 46591 - protein, 703 aa, Arabidopsis thaliana
  peptide (1)..(703): Ceres Seq. ID no. 14315708
  misc_feature (384)..(613): Homolog of NCBI NO: 34909426 NR Description: putative casein kinase-like protein
  misc_feature (112)..(703): Homolog of NCBI NO: 18139937 NR Description: serine/threonine protein kinase [Chlamydomonas
  misc_feature (239)..(702): Homolog of NCBI NO: 6006848 NR Description: unknown protein, 5' partial [Arabidopsis thaliana]
  misc_feature (71)..(703): Homolog of NCBI NO: 34903604 NR Description: casein kinase-like protein
  misc_feature (1)..(702): Homolog of NCBI NO: 34394436 NR Description: putative casein kinase 1, delta isoform 1
  misc_feature (1)..(702): Homolog of NCBI NO: 28269422 NR Description: putative serine/threonine protein kinase
  misc_feature (1)..(702): Homolog of NCBI NO: 15238765 NR Description: casein kinase-related protein [Arabidopsis
  misc_feature (1)..(702): Homolog of NCBI NO: 15228670 NR Description: casein kinase -related [Arabidopsis thaliana]
  misc_feature (1)..(703): Homolog of NCBI NO: 34909952 NR Description: putative casein kinase [Oryza sativa (japonica
  misc_feature (37)..(703): Homolog of NCBI NO: 30682888 NR Description: protein kinase family [Arabidopsis thaliana]
MPELRRGVRRGRVTDAVAPNQLPQTPTEKKPKKSTVKAPKPVAGGVTGVAERPRTRLAARKLKEEDKEIPQEIPVVVPSKDSDIDKNKGKEVVVEEEKKDMAIGNDSGGSNKAAAQEEEGNTDPFPERVQVGGSPLYKVERKLVKGGFGQVFVGRRISGGNDRSAGASILEVALKFEHRSSKGCNYGPPHEWQVYNTLGGSHGVPRVHFKGRQGDYYVMVMDMLGPSLWDLWNTSGQAMSSEMVACIAVESLSILEKMHAKGYVHGDVKPENFLLGQPSTSQEKKLFLVDLGLATKWREGGSGQHVEYDQRPDMFRGTVRYASAHAHLGRTASRRDDLESLAYTLIFLHRGRLPWQGYQGDNKSFLVCKKKMATSPDMLCCFCPPPFKQFLEIVVNMKFDEEPNYGKLVSLFQDLLGENPAIRPINTEGAQKIIFQVGQKRGRLSIGEEEEDAPRKKVRLGVPATQWISIYNARQPMKQRYHYNVADIRLAQHIERGIADGLLISCVSSCSNLWALIMDAGTGFTHQVYELSPVFLHKEWIMEQWEKNYYISSIAGASNGSSLVVMSKGTQYTQQSYKVSDSFPFKWINKKWREGFHVTSMATAGNRWGVVMSRNSGYSEQVVELDFLYPSEGIHRRWDGGFRITSTAATTDQAALILSIPRRRLVDETQETLRTSQFPSTHVKEKWGKNLYLASLSYGRTVS

SEQ ID NO: 46592 - protein, 603 aa, Arabidopsis thaliana
  peptide (1)..(603): Ceres Seq. ID no. 14315709
  misc_feature (284)..(513): Homolog of NCBI NO: 34909426 NR Description: putative casein kinase-like protein
  misc_feature (12)..(603): Homolog of NCBI NO: 18139937 NR Description: serine/threonine protein kinase [Chlamydomonas
  misc_feature (139)..(602): Homolog of NCBI NO: 6006848 NR Description: unknown protein, 5' partial [Arabidopsis thaliana]
  misc_feature (1)..(603): Homolog of NCBI NO: 34903604 NR Description: casein kinase-like protein
  misc_feature (1)..(602): Homolog of NCBI NO: 34394436 NR Description: putative casein kinase 1, delta isoform 1
  misc_feature (1)..(602): Homolog of NCBI NO: 28269422 NR Description: putative serine/threonine protein kinase
  misc_feature (1)..(602): Homolog of NCBI NO: 15238765 NR Description: casein kinase-related protein [Arabidopsis
  misc_feature (1)..(602): Homolog of NCBI NO: 15228670 NR Description: casein kinase -related [Arabidopsis thaliana]
  misc_feature (1)..(603): Homolog of NCBI NO: 34909952 NR Description: putative casein kinase [Oryza sativa (japonica
  misc_feature (1)..(603): Homolog of NCBI NO: 30682888 NR Description: protein kinase family [Arabidopsis thaliana]
MAIGNDSGGSNKAAAQEEEGNTDPFPERVQVGGSPLYKVERKLVKGGFGQVFVGRRISGGNDRSAGASILEVALKFEHRSSKGCNYGPPHEWQVYNTLGGSHGVPRVHFKGRQGDYYVMVMDMLGPSLWDLWNTSGQAMSSEMVACIAVESLSILEKMHAKGYVHGDVKPENFLLGQPSTSQEKKLFLVDLGLATKWREGGSGQHVEYDQRPDMFRGTVRYASAHAHLGRTASRRDDLESLAYTLIFLHRGRLPWQGYQGDNKSFLVCKKKMATSPDMLCCFCPPPFKQFLEIVVNMKFDEEPNYGKLVSLFQDLLGENPAIRPINTEGAQKIIFQVGQKRGRLSIGEEEEDAPRKKVRLGVPATQWISIYNARQPMKQRYHYNVADIRLAQHIERGIADGLLISCVSSCSNLWALIMDAGTGFTHQVYELSPVFLHKEWIMEQWEKNYYISSIAGASNGSSLVVMSKGTQYTQQSYKVSDSFPFKWINKKWREGFHVTSMATAGNRWGVVMSRNSGYSEQVVELDFLYPSEGIHRRWDGGFRITSTAATTDQAALILSIPRRRLVDETQETLRTSQFPSTHVKEKWGKNLYLASLSYGRTVS

SEQ ID NO: 46593 - protein, 485 aa, Arabidopsis thaliana; identical to SEQ ID NO: 46526
  peptide (1)..(485): Ceres Seq. ID no. 14315710
  misc_feature (166)..(395): Homolog of NCBI NO: 34909426 NR Description: putative casein kinase-like protein
  misc_feature (1)..(485): Homolog of NCBI NO: 18139937 NR Description: serine/threonine protein kinase [Chlamydomonas
  misc_feature (21)..(484): Homolog of NCBI NO: 6006848 NR Description: unknown protein, 5' partial [Arabidopsis thaliana]
  misc_feature (1)..(485): Homolog of NCBI NO: 34903604 NR Description: casein kinase-like protein
  misc_feature (1)..(484): Homolog of NCBI NO: 34394436 NR Description: putative casein kinase 1, delta isoform 1
  misc_feature (1)..(484): Homolog of NCBI NO: 28269422 NR Description: putative serine/threonine protein kinase
  misc_feature (1)..(484): Homolog of NCBI NO: 15238765 NR Description: casein kinase-related protein [Arabidopsis
  misc_feature (1)..(484): Homolog of NCBI NO: 15228670 NR Description: casein kinase -related [Arabidopsis thaliana]
  misc_feature (1)..(485): Homolog of NCBI NO: 34909952 NR Description: putative casein kinase [Oryza sativa (japonica
  misc_feature (1)..(485): Homolog of NCBI NO: 30682888 NR Description: protein kinase family [Arabidopsis thaliana]

SEQ ID NO: 46594 - DNA, 1150 bp, Arabidopsis thaliana
  misc_feature (1)..(1150): Ceres Seq. ID no. 14310034
  misc_feature: MA Experiment ID: 108561 Result: Down-regulated in Transcription
  misc_feature: MA Experiment 108561 PARAMETER Experiment Name: At_100uM_ABA_cDNA_P Parameter: Timepoint (hr) Value: 6
  misc_feature: MA Experiment 108561 PARAMETER Experiment Name: At_100uM_ABA_cDNA_P Parameter: Tissue Value: Aerial
  misc_feature: MA Experiment 108561 PARAMETER Experiment Name: At_100uM_ABA_cDNA_P Parameter: Treatment Value: 100uM ABA vs. No Treatment
  misc_feature: MA Experiment ID: 108572 Result: Down-regulated in Transcription
  misc_feature: MA Experiment 108572 PARAMETER Experiment Name: At_Drought_cDNA_P Parameter: Timepoint (hr) Value: 1
  misc_feature: MA Experiment 108572 PARAMETER Experiment Name: At_Drought_cDNA_P Parameter: Tissue Value: Aerial
  misc_feature: MA Experiment 108572 PARAMETER Experiment Name: At_Drought_cDNA_P Parameter: Treatment Value: Drought vs. No Drought
  misc_feature: MA Experiment ID: 108577 Result: Down-regulated in Transcription
  misc_feature: MA Experiment 108577 PARAMETER Experiment Name: At_42deg_Heat_cDNA_P Parameter: Temperature (deg C) Value: 42 vs. 22
  misc_feature: MA Experiment 108577 PARAMETER Experiment Name: At_42deg_Heat_cDNA_P Parameter: Timepoint (hr) Value: 6
  misc_feature: MA Experiment 108577 PARAMETER Experiment Name: At_42deg_Heat_cDNA_P Parameter: Tissue Value: Aerial
  misc_feature: MA Experiment ID: 108579 Result: Up-regulated in Transcription
  misc_feature: MA Experiment 108579 PARAMETER Experiment Name: At_4deg_Cold_cDNA_P Parameter: Temperature (deg C) Value: 4 vs. 22
  misc_feature: MA Experiment 108579 PARAMETER Experiment Name: At_4deg_Cold_cDNA_P Parameter: Timepoint (hr) Value: 6
  misc_feature: MA Experiment 108579 PARAMETER Experiment Name: At_4deg_Cold_cDNA_P Parameter: Tissue Value: Aerial
  misc_feature: MA Experiment ID: 20000087 Result: Down-regulated in Transcription
  misc_feature: MA Experiment 20000087 PARAMETER Experiment Name: At_100uM_ABA_Mutants_cDNA_P Parameter: Plant Line Value: WS
  misc_feature: MA Experiment 20000087 PARAMETER Experiment Name: At_100uM_ABA_Mutants_cDNA_P Parameter: Timepoint (hr) Value: 6
  misc_feature: MA Experiment 20000087 PARAMETER Experiment Name: At_100uM_ABA_Mutants_cDNA_P Parameter: Tissue Value: Aerial
  misc_feature: MA Experiment 20000087 PARAMETER Experiment Name: At_100uM_ABA_Mutants_cDNA_P Parameter: Treatment Value: 100uM ABA vs. No Treatment
  misc_feature: MA Experiment ID: 20000180 Result: Up-regulated in Transcription
  misc_feature: MA Experiment 20000180 PARAMETER Experiment Name: At_Germinating_Seeds_P Parameter: Age (hr) Value: 24 vs. 0
  misc_feature: MA Experiment 20000180 PARAMETER Experiment Name: At_Germinating_Seeds_P Parameter: Tissue Value: Germinating Seeds
  misc_feature: MA Experiment ID: 20000213 Result: Up-regulated in Transcription
  misc_feature: MA Experiment 20000213 PARAMETER Experiment Name: At_4deg_Cold_P Parameter: Timepoint (hr) Value: 2
  misc_feature: MA Experiment ID: 20000437 Result: Down-regulated in Transcription
  misc_feature: MA Experiment 20000437 PARAMETER Experiment Name: At_Drought_P Parameter: Age (day) Value: 8
  misc_feature: MA Experiment 20000437 PARAMETER Experiment Name: At_Drought_P Parameter: Organism Value: A. thaliana
  misc_feature: MA Experiment 20000437 PARAMETER Experiment Name: At_Drought_P Parameter: Plant Line Value: WS
  misc_feature: MA Experiment 20000437 PARAMETER Experiment Name: At_Drought_P Parameter: Timepoint (hr) Value: 24
  misc_feature: MA Experiment 20000437 PARAMETER Experiment Name: At_Drought_P Parameter: Tissue Value: Whole Plant
  misc_feature: MA Experiment 20000437 PARAMETER Experiment Name: At_Drought_P Parameter: Treatment Value: Drought vs. No Drought
  misc_feature: MA Experiment ID: 20000794 Result: Down-regulated in Transcription
  misc_feature: MA Experiment 20000794 PARAMETER Experiment Name: At_Petals_P Parameter: Age (day) Value: 23-25 days
  misc_feature: MA Experiment 20000794 PARAMETER Experiment Name: At_Petals_P Parameter: Plant Line Value: WS
  misc_feature: MA Experiment 20000794 PARAMETER Experiment Name: At_Petals_P Parameter: Tissue Value: Petals vs. Whole plant
  misc_feature: MA Experiment ID: 20001451 Result: Down-regulated in Transcription
  misc_feature: MA Experiment 20001451 PARAMETER Experiment Name: At_Far-red-induction_P Parameter: Age (day) Value: 7
  misc_feature: MA Experiment 20001451 PARAMETER Experiment Name: At_Far-red-induction_P Parameter: Light Value: Far-red vs. White
  misc_feature: MA Experiment 20001451 PARAMETER Experiment Name: At_Far-red-induction_P Parameter: Organism Value: A. thaliana
  misc_feature: MA Experiment 20001451 PARAMETER Experiment Name: At_Far-red-induction_P Parameter: Plant Line Value: Columbia
  misc_feature: MA Experiment 20001451 PARAMETER Experiment Name: At_Far-red-induction_P Parameter: Timepoint (hr) Value: 24
  misc_feature: MA Experiment 20001451 PARAMETER Experiment Name: At_Far-red-induction_P Parameter: Tissue Value: Whole Plant
  misc_feature: MA Experiment ID: 20001911 Result: Down-regulated in Transcription
  misc_feature: MA Experiment 20001911 PARAMETER Experiment Name: At_Drought_Reproduction_P Parameter: Age (day) Value: 40
  misc_feature: MA Experiment 20001911 PARAMETER Experiment Name: At_Drought_Reproduction_P Parameter: Organism Value: A. thaliana
  misc_feature: MA Experiment 20001911 PARAMETER Experiment Name: At_Drought_Reproduction_P Parameter: Plant Line Value: WS
  misc_feature: MA Experiment 20001911 PARAMETER Experiment Name: At_Drought_Reproduction_P Parameter: Timepoint (day) Value: 10
  misc_feature: MA Experiment 20001911 PARAMETER Experiment Name: At_Drought_Reproduction_P Parameter: Tissue Value: Flowers
  misc_feature: MA Experiment 20001911 PARAMETER Experiment Name: At_Drought_Reproduction_P Parameter: Treatment Value: Drought vs. No Drought
tagtcccccccccccccgatattaacacttcgaagcttcttcttcctttagtaaattcaagtgtgaggtgtgtttattgataaagtgctcattttctcggatctcagatcttagatccaaaccctcattatttcattgatccaagatctaatagcttgagcttgctgggattttagttatggcgagacggcaagtaggttcaacaagacgtgttggcgatggtggaagcttcccttttgcaggagctttacactcaaagtctcgatcttctccactactatctatttgccttgttcttgtgggggcttgtcttctcattggttatgcttacagtggtccaggtatatttaaaagtatcaaagaagttagcaaagttacaggtgactattcttgcacagcagaagtccaaagagccattcctgtacttaagaaggcttatggagatggcatgcgcaaagtcttgcatgtgggccctgacacatgctcagtggtttccagtctattgaaagaagaagagactgaagcatggggtgttgaaccatatgatattgaggatgcagattctcactgcaagagttttgtgagcaaaggtcttgtacgtgttgctgatatcaagtttcctctgccctaccgggcaaaatccttctctcttgtgattgtgtcagatgctctggattatctctcacccaagtacctgaacaagaccgttcctgaactcgcaagggtggcttcagacggtgtggttctttttgcaggtctccctggtcagcagagagctaaagttgctgaactctctaaattcggccgacccgctaaaatgcgtagcgcatcgtggtggaaccgctttttcgtccagacaaacttagaagaaaacgacgcaccaagcaagaagttcgaacaggctgtttccaaaggattatacaaaccagcctgccaagtcttccacctcaagccattacattaaccagccaccaccaaagcctactggttccacaccaaagcatatttacacgtagagccgcacgcgaaaaaaaaaaatagcgtaatcgatatttctccttgtattttgtaacaggtcagtttttatccttcaatgttgtatccgccaacacaatttttcctattcaattaaatcataattattatcacc

SEQ ID NO: 46595 - protein, 261 aa, Arabidopsis thaliana; identical to SEQ ID NO: 23144
  peptide (1)..(261): Ceres Seq. ID no. 14310035
  misc_feature (1)..(257): Homolog of NCBI NO: 34895744 NR Description: P0019D06.30 [Oryza sativa (japonica
  misc_feature (91)..(261): Homolog of NCBI NO: 16649137 NR Description: Unknown protein [Arabidopsis thaliana]
  misc_feature (1)..(211): Homolog of NCBI NO: 9758568 NR Description: emb|CAB66910.1~gene_id:K22J17.2~similar to
  misc_feature (1)..(261): Homolog of NCBI NO: 18424995 NR Description: expressed protein [Arabidopsis thaliana]
  misc_feature (1)..(261): Homolog of NCBI NO: 21593192 NR Description: unknown [Arabidopsis thaliana]
  misc_feature (1)..(261): Homolog of NCBI NO: 18408931 NR Description: expressed protein [Arabidopsis thaliana]

SEQ ID NO: 46596 - protein, 171 aa, Arabidopsis thaliana; identical to SEQ ID NO: 23145
  peptide (1)..(171): Ceres Seq. ID no. 14310036
  misc_feature (1)..(167): Homolog of NCBI NO: 34895744 NR Description: P0019D06.30 [Oryza sativa (japonica
  misc_feature (1)..(171): Homolog of NCBI NO: 16649137 NR Description: Unknown protein [Arabidopsis thaliana]
  misc_feature (1)..(121): Homolog of NCBI NO: 9758568 NR Description: emb|CAB66910.1~gene_id:K22J17.2~similar to
  misc_feature (1)..(171): Homolog of NCBI NO: 18424995 NR Description: expressed protein [Arabidopsis thaliana]
  misc_feature (1)..(171): Homolog of NCBI NO: 21593192 NR Description: unknown [Arabidopsis thaliana]
  misc_feature (1)..(171): Homolog of NCBI NO: 18408931 NR Description: expressed protein [Arabidopsis thaliana]

SEQ ID NO: 46597 - DNA, 2014 bp, Arabidopsis thaliana
  misc_feature (1)..(2014): Ceres Seq. ID no. 13592209
  misc_feature: MA Experiment ID: 20001248 Result: Up-regulated in Transcription
  misc_feature: MA Experiment 20001248 PARAMETER Experiment Name: At_Far-red-induction_P Parameter: Age (day) Value: 7
  misc_feature: MA Experiment 20001248 PARAMETER Experiment Name: At_Far-red-induction_P Parameter: Light Value: Far-red vs. White
  misc_feature: MA Experiment 20001248 PARAMETER Experiment Name: At_Far-red-induction_P Parameter: Organism Value: A. thaliana
  misc_feature: MA Experiment 20001248 PARAMETER Experiment Name: At_Far-red-induction_P Parameter: Plant Line Value: Columbia
  misc_feature: MA Experiment 20001248 PARAMETER Experiment Name: At_Far-red-induction_P Parameter: Timepoint (hr) Value: 4
  misc_feature: MA Experiment 20001248 PARAMETER Experiment Name: At_Far-red-induction_P Parameter: Tissue Value: Whole Plant
ggttatcgaaccaatggagaccccactccctcctttatcgcaactaaccccaaatcctactcccgccgccgccgtctcttccgctattccggcgccagttaagagcgtagccgttcagcaaccgatcgatggatctccacgcgccgttgctactgataccggaggtattcctgagccacttgcggctgttcccggcgctaagcttcgtcttatgtgcagttttggtggccacatcatgcctcgtccacacgacaaatcgttgacgtactccggcggcgagactcgtattgtggttgttgatcgacgtgcgtcactgtcttcgctccgatctcgtctctctagtatgcttctcaacggccggtcctttactctcaagtaccagctccctagcgaagatctcgattcactcgtcaccatcactaccgatgaagatctggagaacatgatcgaggaatacgatcgcgcggcttcgtcagcgacggcgactgctacgcaacggctccggttgttccttttcgctaacaagctcgagaccgccgctactatgggatctctgcttgacggcacgaaatctgacacatggttcgtcgatgctctgaatcaatctggtttgcttcctcgtggtttatcagattccgccgccgtgaataataccttggtgaatctcgacgaagctagcggcggagagaccgagatccaaaaccttgaaactaatgttggtggcgagaacaataagcgaggggatttggttgctaacggtgtgatttcgcatcaggagatgcatatgagctcgatgcctgattctccaatgatggaagccgctggttcttcgataggatcttcttcttcatctccttccacatccaatttgccaccgattcgcgttagagtcagtgaggaccagaggatagaggaacaattggcacagatgaccttctcaaacatgcaaactcagaggcaatttgatgatggcgttagcttgatggcaaatcggccaatgatgattccacctggtgccatgaacgatgctgcgatggcgtataacaacgcacctggtgatggtactgctcccgcaagcaatggccatgtctcacctgaagacgatcgatccgaattaggtgtatcaactggctacaggaagccacctttgccgatgcaaccagtaacgatcccacctagaactgttggaggctatggcttgacatcccctgattctgttgcaagtgatactagcatttcttctgctacttcattttcaaagccgatgtactaccaagaccaacctccagctctgccaagagctcctccagtggcacagcctgaaaccacctcggcccaaagctctcaagtcttacctcagactgaaaacacttcagcccaaaccacctcccatgtcttatctcagccaggtacgtacacaactatggatcaacaacaacaacaacctctggctcaacaacctttcttacaccaaggcgttcagtatatccctcacccatcacaatacataccaatttactctcatcagcaacaaaactaccctgtttacgtgatgtccgtcccacaatctcagcagtatatcccagcaggaactcccccgctctacccgaactcaaaacccggcacaaactcgagacctgaagctgcccagaacgtttaccgagctgctccccctcaggttattcagcttcagcaacagcatcagtacatgggttacgctggagctcctcaacatagcacaaacgcaaacgccaattacggtactggagctcctcaacatagcacaaacgcaaacgccaactacggtggaccctttgaatacacaaactctccaaacgagacagtgtattaccacacacaagctcctgctgcaaacactgccattccattagcgtctccataccaaagcatgacaccagcagcagccgcagcagctctagccgatatgtccaagcaaatggctcttgacggcggcaaacagcaacagcatatggctgcgtctcagccgctttaa

SEQ ID NO: 46598 - protein, 670 aa, Arabidopsis thaliana
  peptide (1)..(670): Ceres Seq. ID no. 13592210
  misc_feature (82)..(174): Pfam Name: PB1 domain Pfam Description: PB1 domain
  misc_feature (67)..(229): Homolog of NCBI NO: 15237703 NR Description: octicosapeptide/Phox/Bem1p (PB1)
  misc_feature (67)..(217): Homolog of NCBI NO: 15242462 NR Description: octicosapeptide/Phox/Bem1p (PB1)
  misc_feature (66)..(588): Homolog of NCBI NO: 15219417 NR Description: protein kinase family [Arabidopsis thaliana]
  misc_feature (58)..(191): Homolog of NCBI NO: 15222547 NR Description: octicosapeptide/Phox/Bem1p (PB1)
  misc_feature (67)..(292): Homolog of NCBI NO: 18412822 NR Description: octicosapeptide/Phox/Bem1p (PB1)
  misc_feature (67)..(292): Homolog of NCBI NO: 25407315 NR Description: hypothetical protein AT4g05150 [imported] -
  misc_feature (71)..(219): Homolog of NCBI NO: 25410886 NR Description: hypothetical protein At2g01190 [imported] -
  misc_feature (21)..(640): Homolog of NCBI NO: 34895646 NR Description: P0480E02.2 [Oryza sativa (japonica
  misc_feature (5)..(514): Homolog of NCBI NO: 21553908 NR Description: unknown [Arabidopsis thaliana]
  misc_feature (5)..(530): Homolog of NCBI NO: 18379168 NR Description: octicosapeptide/Phox/Bem1p (PB1)
VIEPMETPLPPLSQLTPNPTPAAAVSSAIPAPVKSVAVQQPIDGSPRAVATDTGGIPEPLAAVPGAKLRLMCSFGGHIMPRPHDKSLTYSGGETRIVVVDRRASLSSLRSRLSSMLLNGRSFTLKYQLPSEDLDSLVTITTDEDLENMIEEYDRAASSATATATQRLRLFLFANKLETAATMGSLLDGTKSDTWFVDALNQSGLLPRGLSDSAAVNNTLVNLDEASGGETEIQNLETNVGGENNKRGDLVANGVISHQEMHMSSMPDSPMMEAAGSSIGSSSSSPSTSNLPPIRVRVSEDQRIEEQLAQMTFSNMQTQRQFDDGVSLMANRPMMIPPGAMNDAAMAYNNAPGDGTAPASNGHVSPEDDRSELGVSTGYRKPPLPMQPVTIPPRTVGGYGLTSPDSVASDTSISSATSFSKPMYYQDQPPALPRAPPVAQPETTSAQSSQVLPQTENTSAQTTSHVLSQPGTYTTMDQQQQQPLAQQPFLHQGVQYIPHPSQYIPIYSHQQQNYPVYVMSVPQSQQYIPAGTPPLYPNSKPGTNSRPEAAQNVYRAAPPQVIQLQQQHQYMGYAGAPQHSTNANANYGTGAPQHSTNANANYGGPFEYTNSPNETVYYHTQAPAANTAIPLASPYQSMTPAAAAAALADMSKQMALDGGKQQQHMAASQPL

SEQ ID NO: 46599 - protein, 666 aa, Arabidopsis thaliana
  peptide (1)..(666): Ceres Seq. ID no. 13592211
  misc_feature (78)..(170): Pfam Name: PB1 domain Pfam Description: PB1 domain
  misc_feature (63)..(225): Homolog of NCBI NO: 15237703 NR Description: octicosapeptide/Phox/Bem1p (PB1)
  misc_feature (63)..(213): Homolog of NCBI NO: 15242462 NR Description: octicosapeptide/Phox/Bem1p (PB1)
  misc_feature (62)..(584): Homolog of NCBI NO: 15219417 NR Description: protein kinase family [Arabidopsis thaliana]
  misc_feature (54)..(187): Homolog of NCBI NO: 15222547 NR Description: octicosapeptide/Phox/Bem1p (PB1)
  misc_feature (63)..(288): Homolog of NCBI NO: 18412822 NR Description: octicosapeptide/Phox/Bem1p (PB1)
  misc_feature (63)..(288): Homolog of NCBI NO: 25407315 NR Description: hypothetical protein AT4g05150 [imported] -
  misc_feature (67)..(215): Homolog of NCBI NO: 25410886 NR Description: hypothetical protein At2g01190 [imported] -
  misc_feature (17)..(636): Homolog of NCBI NO: 34895646 NR Description: P0480E02.2 [Oryza sativa (japonica
  misc_feature (1)..(510): Homolog of NCBI NO: 21553908 NR Description: unknown [Arabidopsis thaliana]
  misc_feature (1)..(526): Homolog of NCBI NO: 18379168 NR Description: octicosapeptide/Phox/Bem1p (PB1)
METPLPPLSQLTPNPTPAAAVSSAIPAPVKSVAVQQPIDGSPRAVATDTGGIPEPLAAVPGAKLRLMCSFGGHIMPRPHDKSLTYSGGETRIVVVDRRASLSSLRSRLSSMLLNGRSFTLKYQLPSEDLDSLVTITTDEDLENMIEEYDRAASSATATATQRLRLFLFANKLETAATMGSLLDGTKSDTWFVDALNQSGLLPRGLSDSAAVNNTLVNLDEASGGETEIQNLETNVGGENNKRGDLVANGVISHQEMHMSSMPDSPMMEAAGSSIGSSSSSPSTSNLPPIRVRVSEDQRIEEQLAQMTFSNMQTQRQFDDGVSLMANRPMMIPPGAMNDAAMAYNNAPGDGTAPASNGHVSPEDDRSELGVSTGYRKPPLPMQPVTIPPRTVGGYGLTSPDSVASDTSISSATSFSKPMYYQDQPPALPRAPPVAQPETTSAQSSQVLPQTENTSAQTTSHVLSQPGTYTTMDQQQQQPLAQQPFLHQGVQYIPHPSQYIPIYSHQQQNYPVYVMSVPQSQQYIPAGTPPLYPNSKPGTNSRPEAAQNVYRAAPPQVIQLQQQHQYMGYAGAPQHSTNANANYGTGAPQHSTNANANYGGPFEYTNSPNETVYYHTQAPAANTAIPLASPYQSMTPAAAAAALADMSKQMALDGGKQQQHMAASQPL

SEQ ID NO: 46600 - protein, 600 aa, Arabidopsis thaliana
  peptide (1)..(600): Ceres Seq. ID no. 13592212
  misc_feature (12)..(104): Pfam Name: PB1 domain Pfam Description: PB1 domain
  misc_feature (1)..(159): Homolog of NCBI NO: 15237703 NR Description: octicosapeptide/Phox/Bem1p (PB1)
  misc_feature (1)..(147): Homolog of NCBI NO: 15242462 NR Description: octicosapeptide/Phox/Bem1p (PB1)
  misc_feature (1)..(518): Homolog of NCBI NO: 15219417 NR Description: protein kinase family [Arabidopsis thaliana]
  misc_feature (1)..(121): Homolog of NCBI NO: 15222547 NR Description: octicosapeptide/Phox/Bem1p (PB1)
  misc_feature (1)..(222): Homolog of NCBI NO: 18412822 NR Description: octicosapeptide/Phox/Bem1p (PB1)
  misc_feature (1)..(222): Homolog of NCBI NO: 25407315 NR Description: hypothetical protein AT4g05150 [imported] -
  misc_feature (1)..(149): Homolog of NCBI NO: 25410886 NR Description: hypothetical protein At2g01190 [imported] -
  misc_feature (1)..(570): Homolog of NCBI NO: 34895646 NR Description: P0480E02.2 [Oryza sativa (japonica
  misc_feature (1)..(444): Homolog of NCBI NO: 21553908 NR Description: unknown [Arabidopsis thaliana]
  misc_feature (1)..(460): Homolog of NCBI NO: 18379168 NR Description: octicosapeptide/Phox/Bem1p (PB1)
MCSFGGHIMPRPHDKSLTYSGGETRIVVVDRRASLSSLRSRLSSMLLNGRSFTLKYQLPSEDLDSLVTITTDEDLENMIEEYDRAASSATATATQRLRLFLFANKLETAATMGSLLDGTKSDTWFVDALNQSGLLPRGLSDSAAVNNTLVNLDEASGGETEIQNLETNVGGENNKRGDLVANGVISHQEMHMSSMPDSPMMEAAGSSIGSSSSSPSTSNLPPIRVRVSEDQRIEEQLAQMTFSNMQTQRQFDDGVSLMANRPMMIPPGAMNDAAMAYNNAPGDGTAPASNGHVSPEDDRSELGVSTGYRKPPLPMQPVTIPPRTVGGYGLTSPDSVASDTSISSATSFSKPMYYQDQPPALPRAPPVAQPETTSAQSSQVLPQTENTSAQTTSHVLSQPGTYTTMDQQQQQPLAQQPFLHQGVQYIPHPSQYIPIYSHQQQNYPVYVMSVPQSQQYIPAGTPPLYPNSKPGTNSRPEAAQNVYRAAPPQVIQLQQQHQYMGYAGAPQHSTNANANYGTGAPQHSTNANANYGGPFEYTNSPNETVYYHTQAPAANTAIPLASPYQSMTPAAAAAALADMSKQMALDGGKQQQHMAASQPL

SEQ ID NO: 46601 - DNA, 2312 bp, Arabidopsis thaliana
  misc_feature (1)..(2312): Ceres Seq. ID no. 13578902
cagtgtgagtaatttagtcttcttcaccttgaaagaccattaacatcattccttgcccagatccaaacaatgccatctccactctctctatttagggttctctccaacttttcaaatccctaattcttgctccctcccttcaatcaattccgatcatcatcgaggtctctctactccccgaatttaaagatcagagccgcgacttcctctgccttcttttcctcggaatttttcagctacgttttccaggtggtgtgtattgtcaatcagttgacctttgcttttgtagccagatcgttcgtgctttgagtttagggctcttttacaaggtttcgtgttggtggaatttctctacctaggtttgggggaagagttcagtaatttcgttgtagatcgtgatttgggcttttagggtttcggtttactggttgctggaatttatggtagcgttattgaattcggactctctgcatgtgtaagcgttgaagtttgaagtttcaccgggttttgtttcttctgctgaagagtcgagattattttacgcattaagaatcgattcagaaggtttttaggaattagtttctgtggattgtaactatataactactgggaggggatgtttggttctacattggatagcagccgtggaaacagcgctgcctcagggcagcttcttactccgacacgcttcgtgtggccttatggaggtagaagagtcttcctaagcggatctttcaccaggtggacagagcatgtgccaatgtcaccgctcgagggctgccctactgtttttcaagtcatttgcaacttgacgccaggatatcatcagtataagttttttgttgatggggaatggcggcacgatgagcaccaaccatttgtaagcggaaatggtggagtagtgaatacaatatttataactgggccagatatggttcctgctggttttagcccagagacactgggccggtcgaatatggatgtggatgatgtcttcctgcgaacggctgacccgtcccaggaagctgttcctaggatgtcgggggttgatttggagctttctcgtcaccgcatatcggttttattgtcaacccgcactgcatatgagctgctcccagaatcgggcaaggttattgcattggatgttaatttgccagtgaagcaagcattccatatactctatgagcagggaatccctttggctcctctttgggactttggaaaaggccaatttgttggagttcttggtccactagacttcattctaatactgagagagcttggaactcatggatcaaacttgacagaggaagagcttgagacgcacacaatagcagcctggaaagaggggaaggctcatattagccggcaatatgatggaagtgggagaccatatcctaggccacttgttcaggttggaccctatgataatctgaaagacgttgccctgaaaattttgcaaaacaaggtggcagctgttccggttatatattcttctttgcaggatggttcatatccgcagttactgcatcttgcttcgctatcaggcatattaaaatgtatatgcagatactttagacattcgtctagctctttacctatccttcagcaacccatttgttcaattcccctgggtacgtgggtccctagaatcggagaatcaagtagcaaacctctcgctacattgagacctcacgcctctttgggttctgcgctcgcattattagttcaagctgaagtcagttcaattcccgtagtggatgacaacgactcgcttattgacatatactctcgaagtgatataactgctctggctaaagacaaggcatacgcacagattcatcttgatgacatgacagttcaccaggcgctacagttggggcaagatgcgagcccgccttatggaatcttcaacgggcagagatgtcacatgtgcttgcgctcagactctcttgtgaaagtgatggagcggttggcgaatccaggtgtaaggaggctggtgatagtggaagcagggagcaaacgtgttgaaggtatcatttcactgagcgatgttttccaattcctgctcggtctttgactcccacagcaaaacaacctccccaacctctttttctcatttcccctcaatcaaaactacccaacaatttgcttctttttttttttttttttttttcttcttgcaaggaatttgtaaatttgctacgaacctctttcatcattgttttcttattatttttgttgttttagttgaacgggtttccattcttgtgaagatattggctaccggaatcttttactagtagcttccc

SEQ ID NO: 46602 - protein, 487 aa, Arabidopsis thaliana
  peptide (1)..(487): Ceres Seq. ID no. 13578903
  misc_feature (166)..(220): Pfam Name: CBS domain Pfam Description: CBS domain
  misc_feature (262)..(485): Homolog of NCBI NO: 37590253 NR Description: Unknown (protein for MGC:63896) [Danio rerio]
  misc_feature (24)..(486): Homolog of NCBI NO: 21740621 NR Description: OSJNBb0012E08.3 [Oryza sativa (japonica
  misc_feature (1)..(487): Homolog of NCBI NO: 11139546 NR Description: protein kinase AKINbetagamma-1 [Zea mays]
  misc_feature (106)..(130): Homolog of NCBI NO: 25402511 NR Description: hypothetical protein [imported] - Arabidopsis
  misc_feature (192)..(457): Homolog of NCBI NO: 25402511 NR Description: hypothetical protein [imported] - Arabidopsis
  misc_feature (1)..(485): Homolog of NCBI NO: 30102976 NR Description: putative protein kinase AKINbetagamma
  misc_feature (1)..(487): Homolog of NCBI NO: 11139548 NR Description: protein kinase AKINbetagamma-2 [Zea mays]
  misc_feature (1)..(486): Homolog of NCBI NO: 29887975 NR Description: AKIN betagamma [Medicago truncatula]
  misc_feature (106)..(487): Homolog of NCBI NO: 9965729 NR Description: putative activator subunit of SNF1-related
  misc_feature (1)..(487): Homolog of NCBI NO: 18390971 NR Description: protein kinase, putative [Arabidopsis thaliana]
MFGSTLDSSRGNSAASGQLLTPTRFVWPYGGRRVFLSGSFTRWTEHVPMSPLEGCPTVFQVICNLTPGYHQYKFFVDGEWRHDEHQPFVSGNGGVVNTIFITGPDMVPAGFSPETLGRSNMDVDDVFLRTADPSQEAVPRMSGVDLELSRHRISVLLSTRTAYELLPESGKVIALDVNLPVKQAFHILYEQGIPLAPLWDFGKGQFVGVLGPLDFILILRELGTHGSNLTEEELETHTIAAWKEGKAHISRQYDGSGRPYPRPLVQVGPYDNLKDVALKILQNKVAAVPVIYSSLQDGSYPQLLHLASLSGILKCICRYFRHSSSSLPILQQPICSIPLGTWVPRIGESSSKPLATLRPHASLGSALALLVQAEVSSIPVVDDNDSLIDIYSRSDITALAKDKAYAQIHLDDMTVHQALQLGQDASPPYGIFNGQRCHMCLRSDSLVKVMERLANPGVRRLVIVEAGSKRVEGIISLSDVFQFLLGL

SEQ ID NO: 46603 - protein, 439 aa, Arabidopsis thaliana
  peptide (1)..(439): Ceres Seq. ID no. 13578904
  misc_feature (118)..(172): Pfam Name: CBS domain Pfam Description: CBS domain
  misc_feature (214)..(437): Homolog of NCBI NO: 37590253 NR Description: Unknown (protein for MGC:63896) [Danio rerio]
  misc_feature (1)..(438): Homolog of NCBI NO: 21740621 NR Description: OSJNBb0012E08.3 [Oryza sativa (japonica
  misc_feature (1)..(439): Homolog of NCBI NO: 11139546 NR Description: protein kinase AKINbetagamma-1 [Zea mays]
  misc_feature (58)..(82): Homolog of NCBI NO: 25402511 NR Description: hypothetical protein [imported] - Arabidopsis
  misc_feature (144)..(409): Homolog of NCBI NO: 25402511 NR Description: hypothetical protein [imported] - Arabidopsis
  misc_feature (1)..(437): Homolog of NCBI NO: 30102976 NR Description: putative protein kinase AKINbetagamma
  misc_feature (1)..(439): Homolog of NCBI NO: 11139548 NR Description: protein kinase AKINbetagamma-2 [Zea mays]
  misc_feature (1)..(438): Homolog of NCBI NO: 29887975 NR Description: AKIN betagamma [Medicago truncatula]
  misc_feature (58)..(439): Homolog of NCBI NO: 9965729 NR Description: putative activator subunit of SNF1-related
  misc_feature (1)..(439): Homolog of NCBI NO: 18390971 NR Description: protein kinase, putative [Arabidopsis thaliana]
MSPLEGCPTVFQVICNLTPGYHQYKFFVDGEWRHDEHQPFVSGNGGVVNTIFITGPDMVPAGFSPETLGRSNMDVDDVFLRTADPSQEAVPRMSGVDLELSRHRISVLLSTRTAYELLPESGKVIALDVNLPVKQAFHILYEQGIPLAPLWDFGKGQFVGVLGPLDFILILRELGTHGSNLTEEELETHTIAAWKEGKAHISRQYDGSGRPYPRPLVQVGPYDNLKDVALKILQNKVAAVPVIYSSLQDGSYPQLLHLASLSGILKCICRYFRHSSSSLPILQQPICSIPLGTWVPRIGESSSKPLATLRPHASLGSALALLVQAEVSSIPVVDDNDSLIDIYSRSDITALAKDKAYAQIHLDDMTVHQALQLGQDASPPYGIFNGQRCHMCLRSDSLVKVMERLANPGVRRLVIVEAGSKRVEGIISLSDVFQFLLGL

SEQ ID NO: 46604 - protein, 382 aa, Arabidopsis thaliana
  peptide (1)..(382): Ceres Seq. ID no. 13578905
  misc_feature (61)..(115): Pfam Name: CBS domain Pfam Description: CBS domain
  misc_feature (157)..(380): Homolog of NCBI NO: 37590253 NR Description: Unknown (protein for MGC:63896) [Danio rerio]
  misc_feature (1)..(381): Homolog of NCBI NO: 21740621 NR Description: OSJNBb0012E08.3 [Oryza sativa (japonica
  misc_feature (1)..(382): Homolog of NCBI NO: 11139546 NR Description: protein kinase AKINbetagamma-1 [Zea mays]
  misc_feature (1)..(25): Homolog of NCBI NO: 25402511 NR Description: hypothetical protein [imported] - Arabidopsis
  misc_feature (87)..(352): Homolog of NCBI NO: 25402511 NR Description: hypothetical protein [imported] - Arabidopsis
  misc_feature (1)..(380): Homolog of NCBI NO: 30102976 NR Description: putative protein kinase AKINbetagamma
  misc_feature (1)..(382): Homolog of NCBI NO: 11139548 NR Description: protein kinase AKINbetagamma-2 [Zea mays]
  misc_feature (1)..(381): Homolog of NCBI NO: 29887975 NR Description: AKIN betagamma [Medicago truncatula]
  misc_feature (1)..(382): Homolog of NCBI NO: 9965729 NR Description: putative activator subunit of SNF1-related
  misc_feature (1)..(382): Homolog of NCBI NO: 18390971 NR Description: protein kinase, putative [Arabidopsis thaliana]
MVPAGFSPETLGRSNMDVDDVFLRTADPSQEAVPRMSGVDLELSRHRISVLLSTRTAYELLPESGKVIALDVNLPVKQAFHILYEQGIPLAPLWDFGKGQFVGVLGPLDFILILRELGTHGSNLTEEELETHTIAAWKEGKAHISRQYDGSGRPYPRPLVQVGPYDNLKDVALKILQNKVAAVPVIYSSLQDGSYPQLLHLASLSGILKCICRYFRHSSSSLPILQQPICSIPLGTWVPRIGESSSKPLATLRPHASLGSALALLVQAEVSSIPVVDDNDSLIDIYSRSDITALAKDKAYAQIHLDDMTVHQALQLGQDASPPYGIFNGQRCHMCLRSDSLVKVMERLANPGVRRLVIVEAGSKRVEGIISLSDVFQFLLGL

SEQ ID NO: 46605 - DNA, 1866 bp, Arabidopsis thaliana
  misc_feature (1)..(1866): Ceres Seq. ID no. 12575306
  misc_feature: MA Experiment ID: 20001905 Result: Down-regulated in Transcription
  misc_feature: MA Experiment 20001905 PARAMETER Experiment Name: At_Drought_Reproduction_P Parameter: Age (day) Value: 40
  misc_feature: MA Experiment 20001905 PARAMETER Experiment Name: At_Drought_Reproduction_P Parameter: Organism Value: A. thaliana
  misc_feature: MA Experiment 20001905 PARAMETER Experiment Name: At_Drought_Reproduction_P Parameter: Plant Line Value: WS
  misc_feature: MA Experiment 20001905 PARAMETER Experiment Name: At_Drought_Reproduction_P Parameter: Timepoint (day) Value: 10
  misc_feature: MA Experiment 20001905 PARAMETER Experiment Name: At_Drought_Reproduction_P Parameter: Tissue Value: Rosettes
  misc_feature: MA Experiment 20001905 PARAMETER Experiment Name: At_Drought_Reproduction_P Parameter: Treatment Value: Drought vs. No Drought
atgtcggccgtttcaatctccgccgtcaaatctgattttttcaccgtcgaagccatagccgttacacaccatcggacgccgcatccaccacatttcccttcgctccggtttccactatcgctcaagtccccgccggctacttctcttaaccttgtggctggatcaaaactcctccacttctcgcgtcgtcttccttctatcaaatgctcatatactccgtcgttagatttatcggaggaacagttcacaaaatttaaaaaagcatcggaaaagggaaacttagttcctctattccgatgtgtattctcggatcatttgactccgatacttgcttaccgatgtttggtgaaagaagatgatagagatgctcctagcttcttgttcgagtctgtggagcctggttcgcaatcgtccaacatcggtaggtatagtgtagttggagctcagcctacaatagaaatcgttgcaaagggaaatgtagttactgtgatggaccatggagctagtcttaggacagaggaggaagtggatgatccaatgatggttcctcagaaaatcatggaggaatggaatccacaaggcattgatgaattgcctgaagctttctgcggtggttgggttggatacttttcatatgacactgtacgttatgttgagaagaagaagctgcctttttctaatgctccagaggatgataggagtcttcctgatgttaatttgggtctttatgatgatgtgatcgtgtttgatcatgttgagaagaaagcatatgtgatccactgggtgcggatagataaggatcgttctgttgaagaaaatttccgtgaaggaatgaatcggttggaatctctaacctctagaattcaagaccaaaaaccccccaagatgcctactggtttcataaaactacgcactcagctcttcggtccgaaattggagaaatcaactatgacgagtgaggcatacaaggaggcagtggtggaagccaaagaacatatcttggctggggacatctttcagatagttcttagtcagagatttgaaaggcggacatttgcggacccatttgagatatatagagctcttaggattgtaaatccaagtccctacatggcctatttgcaggttagaggatgcatattagttgcatcaagtccagagatattgttacgttcaaaaaataggaaaattaccaatcgcccccttgctggaactgtcagaagagggaagacacccaaagaagatctaatgctggaaaaagagctcttaagcgatgaaaaacaatgcgcagaacatattatgcttgttgatttgggaaggaacgatgttggcaaggtttcaaagcctggttctgtggaggtcaagaagctcaaggatatagaatggttttcacatgtcatgcacattagctccacggtagtaggtgaattgctcgatcatctaacaagctgggacgctcttagagctgtacttcccgttggaaccgtgagcggagccccaaaggtaaaagccatggagctgatagatgaacttgaagtaacaaggcgtggtccttacagtggaggctttggaggcatttcgtttaatggagacatggacattgccttagctctcagaacaatggtcttcccaacaaatacccgttatgacacattgtactcatacaagcatcctcagagacgtagagaatggattgctcatattcaagctggagctgggattgttgcagacagtaaccctgatgatgaacatagagagtgtgagaacaaagcagcggctttagcccgagccatcgatcttgctgagtcctcctttcttgaggcacctgagtttactactatcacacctcacatcaacaatatctga

SEQ ID NO: 46606 - protein, 621 aa, Arabidopsis thaliana
  peptide (1)..(621): Ceres Seq. ID no. 12575307
  misc_feature (318)..(598): Pfam Name: chorismate binding enzyme Pfam Description: chorismate binding enzyme
  misc_feature (85)..(549): Homolog of NCBI NO: 29832713 NR Description: putative anthranilate synthase component I
  misc_feature (78)..(607): Homolog of NCBI NO: 5360659 NR Description: anthranilate synthase alpha 2 subunit
  misc_feature (37)..(607): Homolog of NCBI NO: 7436743 NR Description: anthranilate synthase (EC 4.1.3.27) alpha-2 chain
  misc_feature (80)..(607): Homolog of NCBI NO: 5360657 NR Description: anthranilate synthase alpha 1 subunit
  misc_feature (39)..(607): Homolog of NCBI NO: 34897346 NR Description: anthranilate synthase alpha 1 subunit [Oryza
  misc_feature (83)..(606): Homolog of NCBI NO: 11268466 NR Description: anthranilate synthase (EC 4.1.3.27) alpha chain
  misc_feature (66)..(607): Homolog of NCBI NO: 15239225 NR Description: anthranilate synthase component I-1 precursor
  misc_feature (66)..(607): Homolog of NCBI NO: 320552 NR Description: anthranilate synthase (EC 4.1.3.27) alpha-1 chain
  misc_feature (68)..(607): Homolog of NCBI NO: 12830362 NR Description: anthranilate synthase alpha subunit [Catharanthus
  misc_feature (66)..(607): Homolog of NCBI NO: 960289 NR Description: anthranilate synthase alpha subunit
MSAVSISAVKSDFFTVEAIAVTHHRTPHPPHFPSLRFPLSLKSPPATSLNLVAGSKLLHFSRRLPSIKCSYTPSLDLSEEQFTKFKKASEKGNLVPLFRCVFSDHLTPILAYRCLVKEDDRDAPSFLFESVEPGSQSSNIGRYSVVGAQPTIEIVAKGNVVTVMDHGASLRTEEEVDDPMMVPQKIMEEWNPQGIDELPEAFCGGWVGYFSYDTVRYVEKKKLPFSNAPEDDRSLPDVNLGLYDDVIVFDHVEKKAYVIHWVRIDKDRSVEENFREGMNRLESLTSRIQDQKPPKMPTGFIKLRTQLFGPKLEKSTMTSEAYKEAVVEAKEHILAGDIFQIVLSQRFERRTFADPFEIYRALRIVNPSPYMAYLQVRGCILVASSPEILLRSKNRKITNRPLAGTVRRGKTPKEDLMLEKELLSDEKQCAEHIMLVDLGRNDVGKVSKPGSVEVKKLKDIEWFSHVMHISSTVVGELLDHLTSWDALRAVLPVGTVSGAPKVKAMELIDELEVTRRGPYSGGFGGISFNGDMDIALALRTMVFPTNTRYDTLYSYKHPQRRREWIAHIQAGAGIVADSNPDDEHRECENKAAALARAIDLAESSFLEAPEFTTITPHINNI

SEQ ID NO: 46607 - protein, 458 aa, Arabidopsis thaliana
  peptide (1)..(458): Ceres Seq. ID no. 12575308
  misc_feature (155)..(435): Pfam Name: chorismate binding enzyme Pfam Description: chorismate binding enzyme
  misc_feature (1)..(386): Homolog of NCBI NO: 29832713 NR Description: putative anthranilate synthase component I
  misc_feature (1)..(444): Homolog of NCBI NO: 5360659 NR Description: anthranilate synthase alpha 2 subunit
  misc_feature (1)..(444): Homolog of NCBI NO: 7436743 NR Description: anthranilate synthase (EC 4.1.3.27) alpha-2 chain
  misc_feature (1)..(444): Homolog of NCBI NO: 5360657 NR Description: anthranilate synthase alpha 1 subunit
  misc_feature (1)..(444): Homolog of NCBI NO: 34897346 NR Description: anthranilate synthase alpha 1 subunit [Oryza
  misc_feature (1)..(443): Homolog of NCBI NO: 11268466 NR Description: anthranilate synthase (EC 4.1.3.27) alpha chain
  misc_feature (1)..(444): Homolog of NCBI NO: 15239225 NR Description: anthranilate synthase component I-1 precursor
  misc_feature (1)..(444): Homolog of NCBI NO: 320552 NR Description: anthranilate synthase (EC 4.1.3.27) alpha-1 chain
  misc_feature (1)..(444): Homolog of NCBI NO: 12830362 NR Description: anthranilate synthase alpha subunit [Catharanthus
  misc_feature (1)..(444): Homolog of NCBI NO: 960289 NR Description: anthranilate synthase alpha subunit
MDHGASLRTEEEVDDPMMVPQKIMEEWNPQGIDELPEAFCGGWVGYFSYDTVRYVEKKKLPFSNAPEDDRSLPDVNLGLYDDVIVFDHVEKKAYVIHWVRIDKDRSVEENFREGMNRLESLTSRIQDQKPPKMPTGFIKLRTQLFGPKLEKSTMTSEAYKEAVVEAKEHILAGDIFQIVLSQRFERRTFADPFEIYRALRIVNPSPYMAYLQVRGCILVASSPEILLRSKNRKITNRPLAGTVRRGKTPKEDLMLEKELLSDEKQCAEHIMLVDLGRNDVGKVSKPGSVEVKKLKDIEWFSHVMHISSTVVGELLDHLTSWDALRAVLPVGTVSGAPKVKAMELIDELEVTRRGPYSGGFGGISFNGDMDIALALRTMVFPTNTRYDTLYSYKHPQRRREWIAHIQAGAGIVADSNPDDEHRECENKAAALARAIDLAESSFLEAPEFTTITPHINNI

SEQ ID NO: 46608 - protein, 442 aa, Arabidopsis thaliana
  peptide (1)..(442): Ceres Seq. ID no. 12575309
  misc_feature (139)..(419): Pfam Name: chorismate binding enzyme Pfam Description: chorismate binding enzyme
  misc_feature (1)..(370): Homolog of NCBI NO: 29832713 NR Description: putative anthranilate synthase component I
  misc_feature (1)..(428): Homolog of NCBI NO: 5360659 NR Description: anthranilate synthase alpha 2 subunit
  misc_feature (1)..(428): Homolog of NCBI NO: 7436743 NR Description: anthranilate synthase (EC 4.1.3.27) alpha-2 chain
  misc_feature (1)..(428): Homolog of NCBI NO: 5360657 NR Description: anthranilate synthase alpha 1 subunit
  misc_feature (1)..(428): Homolog of NCBI NO: 34897346 NR Description: anthranilate synthase alpha 1 subunit [Oryza
  misc_feature (1)..(427): Homolog of NCBI NO: 11268466 NR Description: anthranilate synthase (EC 4.1.3.27) alpha chain
  misc_feature (1)..(428): Homolog of NCBI NO: 15239225 NR Description: anthranilate synthase component I-1 precursor
  misc_feature (1)..(428): Homolog of NCBI NO: 320552 NR Description: anthranilate synthase (EC 4.1.3.27) alpha-1 chain
  misc_feature (1)..(428): Homolog of NCBI NO: 12830362 NR Description: anthranilate synthase alpha subunit [Catharanthus
  misc_feature (1)..(428): Homolog of NCBI NO: 960289 NR Description: anthranilate synthase alpha subunit
MMVPQKIMEEWNPQGIDELPEAFCGGWVGYFSYDTVRYVEKKKLPFSNAPEDDRSLPDVNLGLYDDVIVFDHVEKKAYVIHWVRIDKDRSVEENFREGMNRLESLTSRIQDQKPPKMPTGFIKLRTQLFGPKLEKSTMTSEAYKEAVVEAKEHILAGDIFQIVLSQRFERRTFADPFEIYRALRIVNPSPYMAYLQVRGCILVASSPEILLRSKNRKITNRPLAGTVRRGKTPKEDLMLEKELLSDEKQCAEHIMLVDLGRNDVGKVSKPGSVEVKKLKDIEWFSHVMHISSTVVGELLDHLTSWDALRAVLPVGTVSGAPKVKAMELIDELEVTRRGPYSGGFGGISFNGDMDIALALRTMVFPTNTRYDTLYSYKHPQRRREWIAHIQAGAGIVADSNPDDEHRECENKAAALARAIDLAESSFLEAPEFTTITPHINNI

SEQ ID NO: 46609 - DNA, 1897 bp, Arabidopsis thaliana
  misc_feature (1)..(1897): Ceres Seq. ID no. 13578894
  misc_feature: MA Experiment ID: 20000307 Result: Up-regulated in Transcription
  misc_feature: MA Experiment 20000307 PARAMETER Experiment Name: At_Germinating_Seeds_Sub_P Parameter: Age (hr) Value: 24 vs. 0
  misc_feature: MA Experiment 20000307 PARAMETER Experiment Name: At_Germinating_Seeds_Sub_P Parameter: Organism Value: A. thaliana
  misc_feature: MA Experiment 20000307 PARAMETER Experiment Name: At_Germinating_Seeds_Sub_P Parameter: Plant Line Value: WS
  misc_feature: MA Experiment 20000307 PARAMETER Experiment Name: At_Germinating_Seeds_Sub_P Parameter: Tissue Value: Germinating Seeds
gattgaattgaaatcggtggtatgtatgtatagtccaccaacatagatctctctcttgctgtggctcctttcttcctctacacagatctttggattcagaagaaagagatctaaaatgggtgctgctgaaaacaaccttgaaatggagggtaccctggagatcggcatggagtatagaactgtttctggtgttgcgggacctctcgtcatccttgaaaaagtcaaggggcctaaataccaagaaattgtcaatatccgtcttggggatggaactacccgacgtggtcaagttctcgaagttgatggagagaaagctgttgttcaggtatttgagggaacatctggaatcgacaacaagtacacaactgtgcaatttacaggagaggttttgaaaactcctgtttctttggatatgcttggtcgcatcttcaatggttcagggaagcccattgacaacggtccacctatattgcctgaggcgtacttggatatttctggaagttctatcaatcccagtgagagaacctatcctgaagagatgattcagacgggtatatccaccattgatgtcatgaactctatcgccagaggacagaagattcccctcttttctgccgcaggtcttccccacaatgaaattgctgctcagatttgccgtcaggctggtttggttaagcgtttagagaagtcagataatcttctcgagcatcaggaggatgataacttcgccattgtgttcgcagcaatgggtgtgaacatggagactgcacaattttttaaacgtgatttcgaggagaatggatcgatggagagagtgactcttttccttaacttggcaaacgaccccactattgagcgtatcatcactcctcgtatcgcacttacaactgctgagtacttggcatatgaatgtggcaagcatgtccttgtcattctcacagacatgagttcctacgccgatgctcttcgtgaggtctctgctgcccgtgaagaagtgcctggaaggcgtggttacccaggttacatgtacaccgacttggctaccatatacgagagagcagggcgaattgaagggaggaaaggttccatcactcaaattcccattttaaccatgccaaacgatgatatcacgcatcccacaccagatctgacaggatacattacagaggggcaaatctatattgaccgacaacttcacaatagacagatctaccctccgatcaatgtcttgccatctctgtctcgtctcatgaagagtgccattggtgagggtatgactcgcagggaccactctgatgtttctaatcaattgtatgccaattacgctattggaaaggacgtgcaggccatgaaagccgtggttggagaagaagctctttcttccgaggatctgctatatcttgagttcttggataagttcgagaggaagtttgtggctcagggagcttatgatacccgaaacatcttccagtcactcgacctggcatggactctcctcagaatcttcccccgtgagttacttcaccgtatacccgcgaaaacccttgatcagttttacagtcgcgataccaccaactgaagaacatagtttctactgccttggtgtgatgatatgtccaaatgcatctttattttttacttctgcggttggatcacacctctgagtcgtccgtcccaataaatggtgtttgttcccaatcgctagaccctttattattgtcttcgaaactgagcaagccaggttgattattctttttgtaagagaaattgaaattcttgtataatttatgagattttgcatcttttttttggggtaccaaattactggttcagaacaacatacatttgtttgtcttattactgtcacgaatgtcaatgcagcttcttcttctttttt

SEQ ID NO: 46610 - protein, 487 aa, Arabidopsis thaliana
  peptide (1)..(487): Ceres Seq. ID no. 13578895
  misc_feature (203)..(382): Pfam Name: ATP synthase alpha/beta family, Pfam Description: ATP synthase alpha/beta family,
  misc_feature (1)..(487): Homolog of NCBI NO: 14150751 NR Description: vacuolar ATPase B subunit [Oryza sativa]
  misc_feature (1)..(487): Homolog of NCBI NO: 2493131 NR Description: Vacuolar ATP synthase subunit B isoform 1
  misc_feature (5)..(487): Homolog of NCBI NO: 17065080 NR Description: Unknown protein [Arabidopsis thaliana]
  misc_feature (1)..(487): Homolog of NCBI NO: 15222929 NR Description: vacuolar ATP synthase subunit B [Arabidopsis
  misc_feature (1)..(487): Homolog of NCBI NO: 81637 NR Description: H+-exporting ATPase (EC 3.6.3.6) 57K chain -
  misc_feature (9)..(487): Homolog of NCBI NO: 2493132 NR Description: Vacuolar ATP synthase subunit B isoform 2
  misc_feature (1)..(487): Homolog of NCBI NO: 11266665 NR Description: H+-transporting two-sector ATPase (EC 3.6.3.14)
  misc_feature (1)..(487): Homolog of NCBI NO: 2493129 NR Description: Vacuolar ATP synthase subunit B isoform 1
  misc_feature (1)..(487): Homolog of NCBI NO: 26986106 NR Description: vacuolar ATPase subunit B [Mesembryanthemum
  misc_feature (1)..(487): Homolog of NCBI NO: 15233891 NR Description: probable H+-transporting ATPase [Arabidopsis
MGAAENNLEMEGTLEIGMEYRTVSGVAGPLVILEKVKGPKYQEIVNIRLGDGTTRRGQVLEVDGEKAVVQVFEGTSGIDNKYTTVQFTGEVLKTPVSLDMLGRIFNGSGKPIDNGPPILPEAYLDISGSSINPSERTYPEEMIQTGISTIDVMNSIARGQKIPLFSAAGLPHNEIAAQICRQAGLVKRLEKSDNLLEHQEDDNFAIVFAAMGVNMETAQFFKRDFEENGSMERVTLFLNLANDPTIERIITPRIALTTAEYLAYECGKHVLVILTDMSSYADALREVSAAREEVPGRRGYPGYMYTDLATIYERAGRIEGRKGSITQIPILTMPNDDITHPTPDLTGYITEGQIYIDRQLHNRQIYPPINVLPSLSRLMKSAIGEGMTRRDHSDVSNQLYANYAIGKDVQAMKAVVGEEALSSEDLLYLEFLDKFERKFVAQGAYDTRNIFQSLDLAWTLLRIFPRELLHRIPAKTLDQFYSRDTTN

SEQ ID NO: 46611 - protein, 478 aa, Arabidopsis thaliana
  peptide (1)..(478): Ceres Seq. ID no. 13578896
  misc_feature (194)..(373): Pfam Name: ATP synthase alpha/beta family, Pfam Description: ATP synthase alpha/beta family,
  misc_feature (1)..(478): Homolog of NCBI NO: 14150751 NR Description: vacuolar ATPase B subunit [Oryza sativa]
  misc_feature (1)..(478): Homolog of NCBI NO: 2493131 NR Description: Vacuolar ATP synthase subunit B isoform 1
  misc_feature (1)..(478): Homolog of NCBI NO: 17065080 NR Description: Unknown protein [Arabidopsis thaliana]
  misc_feature (1)..(478): Homolog of NCBI NO: 15222929 NR Description: vacuolar ATP synthase subunit B [Arabidopsis
  misc_feature (1)..(478): Homolog of NCBI NO: 81637 NR Description: H+-exporting ATPase (EC 3.6.3.6) 57K chain -
  misc_feature (1)..(478): Homolog of NCBI NO: 2493132 NR Description: Vacuolar ATP synthase subunit B isoform 2
  misc_feature (1)..(478): Homolog of NCBI NO: 11266665 NR Description: H+-transporting two-sector ATPase (EC 3.6.3.14)
  misc_feature (1)..(478): Homolog of NCBI NO: 2493129 NR Description: Vacuolar ATP synthase subunit B isoform 1
  misc_feature (1)..(478): Homolog of NCBI NO: 26986106 NR Description: vacuolar ATPase subunit B [Mesembryanthemum
  misc_feature (1)..(478): Homolog of NCBI NO: 15233891 NR Description: probable H+-transporting ATPase [Arabidopsis
MEGTLEIGMEYRTVSGVAGPLVILEKVKGPKYQEIVNIRLGDGTTRRGQVLEVDGEKAVVQVFEGTSGIDNKYTTVQFTGEVLKTPVSLDMLGRIFNGSGKPIDNGPPILPEAYLDISGSSINPSERTYPEEMIQTGISTIDVMNSIARGQKIPLFSAAGLPHNEIAAQICRQAGLVKRLEKSDNLLEHQEDDNFAIVFAAMGVNMETAQFFKRDFEENGSMERVTLFLNLANDPTIERIITPRIALTTAEYLAYECGKHVLVILTDMSSYADALREVSAAREEVPGRRGYPGYMYTDLATIYERAGRIEGRKGSITQIPILTMPNDDITHPTPDLTGYITEGQIYIDRQLHNRQIYPPINVLPSLSRLMKSAIGEGMTRRDHSDVSNQLYANYAIGKDVQAMKAVVGEEALSSEDLLYLEFLDKFERKFVAQGAYDTRNIFQSLDLAWTLLRIFPRELLHRIPAKTLDQFYSRDTTN

SEQ ID NO: 46612 - protein, 470 aa, Arabidopsis thaliana
  peptide (1)..(470): Ceres Seq. ID no. 13578897
  misc_feature (186)..(365): Pfam Name: ATP synthase alpha/beta family, Pfam Description: ATP synthase alpha/beta family,
  misc_feature (1)..(470): Homolog of NCBI NO: 14150751 NR Description: vacuolar ATPase B subunit [Oryza sativa]
  misc_feature (1)..(470): Homolog of NCBI NO: 2493131 NR Description: Vacuolar ATP synthase subunit B isoform 1
  misc_feature (1)..(470): Homolog of NCBI NO: 17065080 NR Description: Unknown protein [Arabidopsis thaliana]
  misc_feature (1)..(470): Homolog of NCBI NO: 15222929 NR Description: vacuolar ATP synthase subunit B [Arabidopsis
  misc_feature (1)..(470): Homolog of NCBI NO: 81637 NR Description: H+-exporting ATPase (EC 3.6.3.6) 57K chain -
  misc_feature (1)..(470): Homolog of NCBI NO: 2493132 NR Description: Vacuolar ATP synthase subunit B isoform 2
  misc_feature (1)..(470): Homolog of NCBI NO: 11266665 NR Description: H+-transporting two-sector ATPase (EC 3.6.3.14)
  misc_feature (1)..(470): Homolog of NCBI NO: 2493129 NR Description: Vacuolar ATP synthase subunit B isoform 1
  misc_feature (1)..(470): Homolog of NCBI NO: 26986106 NR Description: vacuolar ATPase subunit B [Mesembryanthemum
  misc_feature (1)..(470): Homolog of NCBI NO: 15233891 NR Description: probable H+-transporting ATPase [Arabidopsis
MEYRTVSGVAGPLVILEKVKGPKYQEIVNIRLGDGTTRRGQVLEVDGEKAVVQVFEGTSGIDNKYTTVQFTGEVLKTPVSLDMLGRIFNGSGKPIDNGPPILPEAYLDISGSSINPSERTYPEEMIQTGISTIDVMNSIARGQKIPLFSAAGLPHNEIAAQICRQAGLVKRLEKSDNLLEHQEDDNFAIVFAAMGVNMETAQFFKRDFEENGSMERVTLFLNLANDPTIERIITPRIALTTAEYLAYECGKHVLVILTDMSSYADALREVSAAREEVPGRRGYPGYMYTDLATIYERAGRIEGRKGSITQIPILTMPNDDITHPTPDLTGYITEGQIYIDRQLHNRQIYPPINVLPSLSRLMKSAIGEGMTRRDHSDVSNQLYANYAIGKDVQAMKAVVGEEALSSEDLLYLEFLDKFERKFVAQGAYDTRNIFQSLDLAWTLLRIFPRELLHRIPAKTLDQFYSRDTTN

SEQ ID NO: 46613 - DNA, 2662 bp, Arabidopsis thaliana
  misc_feature (1)..(2662): Ceres Seq. ID no. 12600678
  misc_feature: MA Experiment ID: 20000185 Result: Up-regulated in Transcription
  misc_feature: MA Experiment 20000185 PARAMETER Experiment Name: At_Roots__P Parameter: Age (day) Value: 7 vs. 21
  misc_feature: MA Experiment 20000185 PARAMETER Experiment Name: At_Roots__P Parameter: Organism Value: A. thaliana
  misc_feature: MA Experiment 20000185 PARAMETER Experiment Name: At_Roots__P Parameter: Tissue Value: Roots vs. Whole Plant
  misc_feature: MA Experiment ID: 20000234 Result: Up-regulated in Transcription
  misc_feature: MA Experiment 20000234 PARAMETER Experiment Name: At_Siliques_P Parameter: Age (day) Value: 21
  misc_feature: MA Experiment 20000234 PARAMETER Experiment Name: At_Siliques_P Parameter: Organism Value: A. thaliana
  misc_feature: MA Experiment 20000234 PARAMETER Experiment Name: At_Siliques_P Parameter: Plant Line Value: WS
  misc_feature: MA Experiment 20000234 PARAMETER Experiment Name: At_Siliques_P Parameter: Tissue Value: Less Than 5mm Siliques vs. Whole Plant
  misc_feature: MA Experiment ID: 20000265 Result: Up-regulated in Transcription
  misc_feature: MA Experiment 20000265 PARAMETER Experiment Name: At_Open_Flower_P Parameter: Age (day) Value: 21
  misc_feature: MA Experiment 20000265 PARAMETER Experiment Name: At_Open_Flower_P Parameter: Plant Line Value: WS
  misc_feature: MA Experiment 20000265 PARAMETER Experiment Name: At_Open_Flower_P Parameter: Tissue Value: Closed Flower vs. Whole Plant
  misc_feature: MA Experiment ID: 20000286 Result: Up-regulated in Transcription
  misc_feature: MA Experiment 20000286 PARAMETER Experiment Name: At_Open_Flower_P Parameter: Age (day) Value: 21
  misc_feature: MA Experiment 20000286 PARAMETER Experiment Name: At_Open_Flower_P Parameter: Plant Line Value: WS
  misc_feature: MA Experiment 20000286 PARAMETER Experiment Name: At_Open_Flower_P Parameter: Tissue Value: Half Open vs. Whole Plant
  misc_feature: MA Experiment ID: 20000439 Result: Up-regulated in Transcription
  misc_feature: MA Experiment 20000439 PARAMETER Experiment Name: At_Roots__P Parameter: Age (day) Value: 14 vs. 21
  misc_feature: MA Experiment 20000439 PARAMETER Experiment Name: At_Roots__P Parameter: Organism Value: A. thaliana
  misc_feature: MA Experiment 20000439 PARAMETER Experiment Name: At_Roots__P Parameter: Tissue Value: Roots vs. Whole Plant
  misc_feature: MA Experiment ID: 20001451 Result: Down-regulated in Transcription
  misc_feature: MA Experiment 20001451 PARAMETER Experiment Name: At_Far-red-induction_P Parameter: Age (day) Value: 7
  misc_feature: MA Experiment 20001451 PARAMETER Experiment Name: At_Far-red-induction_P Parameter: Light Value: Far-red vs. White
  misc_feature: MA Experiment 20001451 PARAMETER Experiment Name: At_Far-red-induction_P Parameter: Organism Value: A. thaliana
  misc_feature: MA Experiment 20001451 PARAMETER Experiment Name: At_Far-red-induction_P Parameter: Plant Line Value: Columbia
  misc_feature: MA Experiment 20001451 PARAMETER Experiment Name: At_Far-red-induction_P Parameter: Timepoint (hr) Value: 24
  misc_feature: MA Experiment 20001451 PARAMETER Experiment Name: At_Far-red-induction_P Parameter: Tissue Value: Whole Plant
ctctctctcgtttcagtcacaagactctcacaacaaagcgattttttggcttcacgaactcaaagctatctctctccctctatctctgaggcacgcattttcgtctgtgattctcgagctcttttggggtttctccgagatttttggtcggttcttcacgttttgtttatggcggtgattacgtgatgaaagtcaccggaaagccgtattcgacggcgacattaccggcctttgagtcggataagaatctcttctctcacggtccagatctcagagctattcaaagagctactactgtcactaaacgtcgagctaggaacccgagtttgactcgtcagcgaagatccggtccttctggtggcagacgaagccggccggagactcctttattgaaatggaaggtggaggatcggaataaagagagaagcggcgttgtagaagacgatgattacgaggatgataatcaccaggttgcgaggtcagagactactcgccgcaaggatcggaggaaaatcgcacggcctgtctctgttaggaaactcgccgctgggctatggcggttgcaagttcctgacgcgagttccagcggcggagaaagaaagggcaaagaggggttagggtttcagggaaatggtggatacatgggtgttccgtatctttatcaccatagtgacaaaccctctggtggtcagagcaataagataaggcagaaccctagtactattgctacgacaaaaaatggattcttgtgtaagctcgaaccttcaatgccatttccccactcagcaatggagggggcgacaaaatgggatcctgtctgcttggatacaatggaggaagtacaccaaatatatagcaacatgaagcgtattgatcagcaagtgaatgctgtgtcattggtttcttcccttgaagcagaactggaggaagcacatgctcgcatagaagatctcgagagcgagaagcgatctcataaaaagaagctcgagcagttcttgaggaaagttagcgaggagagggctgcttggcggagcagggagcatgagaaggtccgagcaattattgacgatatgaaaactgatatgaacagggagaagaaaacccgtcagagattagaaatcgtaaatcataaactagtcaacgagcttgcagattcaaagttagccgtgaagcgttacatgcaggactacgaaaaggaaaggaaagcaagagaattgattgaggaagtttgcgacgaacttgcaaaggaaataggagaagataaagctgagattgaagcattgaagagagaatccatgagcctcagagaagaagtggacgatgaaagaagaatgctacagatggctgaggtctggcgtgaggaacgtgtccagatgaagcttattgatgccaaagtagcactcgaggaaaggtactcacaaatgaacaagcttgtaggagatttggaatctttccttaggtcacgagatatcgtgacagatgtcaaagaggtgagagaagctgagttattaagagaaaccgcagcatcagttaatatccaagaaatcaaggaatttacgtatgtgcctgcaaacccggatgatatctacgcggtgtttgaagaaatgaatctcggtgaagcccatgatagagaaatggagaaatctgtcgcttacagtccaatcagccacgattctaaagttcacacggtaagtctagatgccaatatgatgaacaagaaagggagacactcagatgcttatactcaccagaatggagacattgaagaagatgatagcggttgggaaacagtgagccacctcgaagaacaaggatcgagttactcaccagatgggagcattccttctgtgaacaacaagaatcacaatcaccgacacagcaacgcctccagtggtggtacagagtccttaggcaaagtttgggatgatacaatgactccaaccacagagataagtgaagtgtgttccattccaagacggtcatccaaaaaggtttcatcaatagcaaagctttggagatcaacaggtgcaagcaatggagatagagatagcaactacaaggtaatatcaatggaaggtatgaatggaggaagggtttcaaatgggagaaagtcaagcgcgggaatggtttcaccagacagagtctcgagcaaaggcggatttagcccgatgatggatttggttggacaatggaactcttcaccggaatctgcaaatcatcctcatgtaaaccgaggaggaatgaaaggttgcatagaatggcctagaggtgcacagaagagtagtttgaagtcaaaactcattgaagcacgaatcgaaagccaaaaggttcagttaaagcatgtccttaaacagaggatttaggagccaaaccgtttttggtcacagctgaaccagatcttaatacccgggacactgcgtgcggttctctaatctttcaccggtttcagatgctgtatgatgtaataatgttccgggaaagcagtcgggaccagcaagcagcttagatcggggtttagatttatgtcattggtcattagcaattaagcaatgtgtactctaatatcattatctcattatggaagaaaaacctttagtagagtaagagacgctaatgttagagacttgttcatcaatttatataatatagttactagtttccg

SEQ ID NO: 46614 - protein, 725 aa, Arabidopsis thaliana
  peptide (1)..(725): Ceres Seq. ID no. 12600679
  misc_feature (217)..(529): Pfam Name: Myosin tail Pfam Description: Myosin tail
  misc_feature (217)..(529): Pfam Name: Myosin tail Pfam Description: Myosin tail
  misc_feature (1)..(191): Homolog of NCBI NO: 9294552 NR Description: gene_id:MQC12.9~unknown protein [Arabidopsis
  misc_feature (287)..(725): Homolog of NCBI NO: 15231114 NR Description: unknown protein; protein id: At3g20350.1
  misc_feature (287)..(725): Homolog of NCBI NO: 9294553 NR Description: gb|AAF00675.1~gene_id:MQC12.10~similar to unknown
  misc_feature (213)..(446): Homolog of NCBI NO: 18399293 NR Description: expressed protein
  misc_feature (213)..(446): Homolog of NCBI NO: 15724288 NR Description: AT3g11590/F24K9_26 [Arabidopsis thaliana]
  misc_feature (1)..(191): Homolog of NCBI NO: 9294552 NR Description: gene_id:MQC12.9~unknown protein [Arabidopsis
  misc_feature (287)..(725): Homolog of NCBI NO: 9294553 NR Description: gb|AAF00675.1~gene_id:MQC12.10~similar to unknown
  misc_feature (213)..(446): Homolog of NCBI NO: 15724288 NR Description: AT3g11590/F24K9_26 [Arabidopsis thaliana]
  misc_feature (16)..(658): Homolog of NCBI NO: 15231114 NR Description: unknown protein; protein id: At3g20350.1
  misc_feature (202)..(658): Homolog of NCBI NO: 9294553 NR Description: gb|AAF00675.1~gene_id:MQC12.10~similar to unknown
  misc_feature (39)..(725): Homolog of NCBI NO: 38344183 NR Description: OSJNBa0053K19.22 [Oryza sativa (japonica
  misc_feature (60)..(724): Homolog of NCBI NO: 40253811 NR Description: hypothetical protein [Oryza sativa (japonica
  misc_feature (272)..(440): Homolog of NCBI NO: 29367527 NR Description: unknown [Oryza sativa (japonica cultivar-group)]
  misc_feature (213)..(446): Homolog of NCBI NO: 18399293 NR Description: expressed protein
  misc_feature (287)..(725): Homolog of NCBI NO: 15231114 NR Description: unknown protein; protein id: At3g20350.1
  misc_feature (272)..(440): Homolog of NCBI NO: 29367527 NR Description: unknown [Oryza sativa (japonica cultivar-group)]
  misc_feature (60)..(724): Homolog of NCBI NO: 40253811 NR Description: hypothetical protein [Oryza sativa (japonica
  misc_feature (39)..(725): Homolog of NCBI NO: 38344183 NR Description: OSJNBa0053K19.22 [Oryza sativa (japonica
  misc_feature (202)..(658): Homolog of NCBI NO: 9294553 NR Description: gb|AAF00675.1~gene_id:MQC12.10~similar to unknown
  misc_feature (16)..(658): Homolog of NCBI NO: 15231114 NR Description: unknown protein; protein id: At3g20350.1
MKVTGKPYSTATLPAFESDKNLFSHGPDLRAIQRATTVTKRRARNPSLTRQRRSGPSGGRRSRPETPLLKWKVEDRNKERSGVVEDDDYEDDNHQVARSETTRRKDRRKIARPVSVRKLAAGLWRLQVPDASSSGGERKGKEGLGFQGNGGYMGVPYLYHHSDKPSGGQSNKIRQNPSTIATTKNGFLCKLEPSMPFPHSAMEGATKWDPVCLDTMEEVHQIYSNMKRIDQQVNAVSLVSSLEAELEEAHARIEDLESEKRSHKKKLEQFLRKVSEERAAWRSREHEKVRAIIDDMKTDMNREKKTRQRLEIVNHKLVNELADSKLAVKRYMQDYEKERKARELIEEVCDELAKEIGEDKAEIEALKRESMSLREEVDDERRMLQMAEVWREERVQMKLIDAKVALEERYSQMNKLVGDLESFLRSRDIVTDVKEVREAELLRETAASVNIQEIKEFTYVPANPDDIYAVFEEMNLGEAHDREMEKSVAYSPISHDSKVHTVSLDANMMNKKGRHSDAYTHQNGDIEEDDSGWETVSHLEEQGSSYSPDGSIPSVNNKNHNHRHSNASSGGTESLGKVWDDTMTPTTEISEVCSIPRRSSKKVSSIAKLWRSTGASNGDRDSNYKVISMEGMNGGRVSNGRKSSAGMVSPDRVSSKGGFSPMMDLVGQWNSSPESANHPHVNRGGMKGCIEWPRGAQKSSLKSKLIEARIESQKVQLKHVLKQRI

SEQ ID NO: 46615 - protein, 573 aa, Arabidopsis thaliana
  peptide (1)..(573): Ceres Seq. ID no. 12600680
  misc_feature (65)..(377): Pfam Name: Myosin tail Pfam Description: Myosin tail
  misc_feature (65)..(377): Pfam Name: Myosin tail Pfam Description: Myosin tail
  misc_feature (1)..(39): Homolog of NCBI NO: 9294552 NR Description: gene_id:MQC12.9~unknown protein [Arabidopsis
  misc_feature (135)..(573): Homolog of NCBI NO: 15231114 NR Description: unknown protein; protein id: At3g20350.1
  misc_feature (135)..(573): Homolog of NCBI NO: 9294553 NR Description: gb|AAF00675.1~gene_id:MQC12.10~similar to unknown
  misc_feature (61)..(294): Homolog of NCBI NO: 18399293 NR Description: expressed protein
  misc_feature (61)..(294): Homolog of NCBI NO: 15724288 NR Description: AT3g11590/F24K9_26 [Arabidopsis thaliana]
  misc_feature (1)..(39): Homolog of NCBI NO: 9294552 NR Description: gene_id:MQC12.9~unknown protein [Arabidopsis
  misc_feature (135)..(573): Homolog of NCBI NO: 9294553 NR Description: gb|AAF00675.1~gene_id:MQC12.10~similar to unknown
  misc_feature (61)..(294): Homolog of NCBI NO: 15724288 NR Description: AT3g11590/F24K9_26 [Arabidopsis thaliana]
  misc_feature (1)..(506): Homolog of NCBI NO: 15231114 NR Description: unknown protein; protein id: At3g20350.1
  misc_feature (50)..(506): Homolog of NCBI NO: 9294553 NR Description: gb|AAF00675.1~gene_id:MQC12.10~similar to unknown
  misc_feature (1)..(573): Homolog of NCBI NO: 38344183 NR Description: OSJNBa0053K19.22 [Oryza sativa (japonica
  misc_feature (1)..(572): Homolog of NCBI NO: 40253811 NR Description: hypothetical protein [Oryza sativa (japonica
  misc_feature (120)..(288): Homolog of NCBI NO: 29367527 NR Description: unknown [Oryza sativa (japonica cultivar-group)]
  misc_feature (61)..(294): Homolog of NCBI NO: 18399293 NR Description: expressed protein
  misc_feature (135)..(573): Homolog of NCBI NO: 15231114 NR Description: unknown protein; protein id: At3g20350.1
  misc_feature (120)..(288): Homolog of NCBI NO: 29367527 NR Description: unknown [Oryza sativa (japonica cultivar-group)]
  misc_feature (1)..(572): Homolog of NCBI NO: 40253811 NR Description: hypothetical protein [Oryza sativa (japonica
  misc_feature (1)..(573): Homolog of NCBI NO: 38344183 NR Description: OSJNBa0053K19.22 [Oryza sativa (japonica
  misc_feature (50)..(506): Homolog of NCBI NO: 9294553 NR Description: gb|AAF00675.1~gene_id:MQC12.10~similar to unknown
  misc_feature (1)..(506): Homolog of NCBI NO: 15231114 NR Description: unknown protein; protein id: At3g20350.1
MGVPYLYHHSDKPSGGQSNKIRQNPSTIATTKNGFLCKLEPSMPFPHSAMEGATKWDPVCLDTMEEVHQIYSNMKRIDQQVNAVSLVSSLEAELEEAHARIEDLESEKRSHKKKLEQFLRKVSEERAAWRSREHEKVRAIIDDMKTDMNREKKTRQRLEIVNHKLVNELADSKLAVKRYMQDYEKERKARELIEEVCDELAKEIGEDKAEIEALKRESMSLREEVDDERRMLQMAEVWREERVQMKLIDAKVALEERYSQMNKLVGDLESFLRSRDIVTDVKEVREAELLRETAASVNIQEIKEFTYVPANPDDIYAVFEEMNLGEAHDREMEKSVAYSPISHDSKVHTVSLDANMMNKKGRHSDAYTHQNGDIEEDDSGWETVSHLEEQGSSYSPDGSIPSVNNKNHNHRHSNASSGGTESLGKVWDDTMTPTTEISEVCSIPRRSSKKVSSIAKLWRSTGASNGDRDSNYKVISMEGMNGGRVSNGRKSSAGMVSPDRVSSKGGFSPMMDLVGQWNSSPESANHPHVNRGGMKGCIEWPRGAQKSSLKSKLIEARIESQKVQLKHVLKQRI

SEQ ID NO: 46616 - protein, 531 aa, Arabidopsis thaliana
  peptide (1)..(531): Ceres Seq. ID no. 12600681
  misc_feature (23)..(335): Pfam Name: Myosin tail Pfam Description: Myosin tail
  misc_feature (23)..(335): Pfam Name: Myosin tail Pfam Description: Myosin tail
  misc_feature (67)..(298): Homolog of NCBI NO: 34394172 NR Description: hypothetical protein [Oryza sativa (japonica
  misc_feature (93)..(531): Homolog of NCBI NO: 15231114 NR Description: unknown protein; protein id: At3g20350.1
  misc_feature (93)..(531): Homolog of NCBI NO: 9294553 NR Description: gb|AAF00675.1~gene_id:MQC12.10~similar to unknown
  misc_feature (19)..(252): Homolog of NCBI NO: 18399293 NR Description: expressed protein
  misc_feature (19)..(252): Homolog of NCBI NO: 15724288 NR Description: AT3g11590/F24K9_26 [Arabidopsis thaliana]
  misc_feature (67)..(298): Homolog of NCBI NO: 34394172 NR Description: hypothetical protein [Oryza sativa (japonica
  misc_feature (93)..(531): Homolog of NCBI NO: 9294553 NR Description: gb|AAF00675.1~gene_id:MQC12.10~similar to unknown
  misc_feature (19)..(252): Homolog of NCBI NO: 15724288 NR Description: AT3g11590/F24K9_26 [Arabidopsis thaliana]
  misc_feature (1)..(464): Homolog of NCBI NO: 15231114 NR Description: unknown protein; protein id: At3g20350.1
  misc_feature (8)..(464): Homolog of NCBI NO: 9294553 NR Description: gb|AAF00675.1~gene_id:MQC12.10~similar to unknown
  misc_feature (1)..(531): Homolog of NCBI NO: 38344183 NR Description: OSJNBa0053K19.22 [Oryza sativa (japonica
  misc_feature (1)..(530): Homolog of NCBI NO: 40253811 NR Description: hypothetical protein [Oryza sativa (japonica
  misc_feature (78)..(246): Homolog of NCBI NO: 29367527 NR Description: unknown [Oryza sativa (japonica cultivar-group)]
  misc_feature (19)..(252): Homolog of NCBI NO: 18399293 NR Description: expressed protein
  misc_feature (93)..(531): Homolog of NCBI NO: 15231114 NR Description: unknown protein; protein id: At3g20350.1
  misc_feature (78)..(246): Homolog of NCBI NO: 29367527 NR Description: unknown [Oryza sativa (japonica cultivar-group)]
  misc_feature (1)..(530): Homolog of NCBI NO: 40253811 NR Description: hypothetical protein [Oryza sativa (japonica
  misc_feature (1)..(531): Homolog of NCBI NO: 38344183 NR Description: OSJNBa0053K19.22 [Oryza sativa (japonica
  misc_feature (8)..(464): Homolog of NCBI NO: 9294553 NR Description: gb|AAF00675.1~gene_id:MQC12.10~similar to unknown
  misc_feature (1)..(464): Homolog of NCBI NO: 15231114 NR Description: unknown protein; protein id: At3g20350.1
MPFPHSAMEGATKWDPVCLDTMEEVHQIYSNMKRIDQQVNAVSLVSSLEAELEEAHARIEDLESEKRSHKKKLEQFLRKVSEERAAWRSREHEKVRAIIDDMKTDMNREKKTRQRLEIVNHKLVNELADSKLAVKRYMQDYEKERKARELIEEVCDELAKEIGEDKAEIEALKRESMSLREEVDDERRMLQMAEVWREERVQMKLIDAKVALEERYSQMNKLVGDLESFLRSRDIVTDVKEVREAELLRETAASVNIQEIKEFTYVPANPDDIYAVFEEMNLGEAHDREMEKSVAYSPISHDSKVHTVSLDANMMNKKGRHSDAYTHQNGDIEEDDSGWETVSHLEEQGSSYSPDGSIPSVNNKNHNHRHSNASSGGTESLGKVWDDTMTPTTEISEVCSIPRRSSKKVSSIAKLWRSTGASNGDRDSNYKVISMEGMNGGRVSNGRKSSAGMVSPDRVSSKGGFSPMMDLVGQWNSSPESANHPHVNRGGMKGCIEWPRGAQKSSLKSKLIEARIESQKVQLKHVLKQRI

SEQ ID NO: 46617 - DNA, 3307 bp, Arabidopsis thaliana
  misc_feature (1)..(3307): Ceres Seq. ID no. 15175961
  misc_feature: MA Experiment ID: 20000173 Result: Down-regulated in Transcription
  misc_feature: MA Experiment 20000173 PARAMETER Experiment Name: At_42deg_Heat_P Parameter: Age (day) Value: 14
  misc_feature: MA Experiment 20000173 PARAMETER Experiment Name: At_42deg_Heat_P Parameter: Organism Value: A. thaliana
  misc_feature: MA Experiment 20000173 PARAMETER Experiment Name: At_42deg_Heat_P Parameter: Plant Line Value: WS
  misc_feature: MA Experiment 20000173 PARAMETER Experiment Name: At_42deg_Heat_P Parameter: Temperature (deg C) Value: 42 vs. 22
  misc_feature: MA Experiment 20000173 PARAMETER Experiment Name: At_42deg_Heat_P Parameter: Timepoint (hr) Value: 6
  misc_feature: MA Experiment 20000173 PARAMETER Experiment Name: At_42deg_Heat_P Parameter: Tissue Value: Aerial
  misc_feature: MA Experiment ID: 20000179 Result: Up-regulated in Transcription
  misc_feature: MA Experiment 20000179 PARAMETER Experiment Name: At_Germinating_Seeds_P Parameter: Age (hr) Value: 6 vs. 0
  misc_feature: MA Experiment 20000179 PARAMETER Experiment Name: At_Germinating_Seeds_P Parameter: Tissue Value: Germinating Seeds
  misc_feature: MA Experiment ID: 20000184 Result: Up-regulated in Transcription
  misc_feature: MA Experiment 20000184 PARAMETER Experiment Name: At_Shoots__P Parameter: Age (day) Value: 7
  misc_feature: MA Experiment 20000184 PARAMETER Experiment Name: At_Shoots__P Parameter: Tissue Value: Shoots vs. Whole Plant
  misc_feature: MA Experiment ID: 20000185 Result: Down-regulated in Transcription
  misc_feature: MA Experiment 20000185 PARAMETER Experiment Name: At_Roots__P Parameter: Age (day) Value: 7 vs. 21
  misc_feature: MA Experiment 20000185 PARAMETER Experiment Name: At_Roots__P Parameter: Organism Value: A. thaliana
  misc_feature: MA Experiment 20000185 PARAMETER Experiment Name: At_Roots__P Parameter: Tissue Value: Roots vs. Whole Plant
  misc_feature: MA Experiment ID: 20000227 Result: Up-regulated in Transcription
  misc_feature: MA Experiment 20000227 PARAMETER Experiment Name: At_Root-Tips-vs-Tops_P Parameter: Tissue Value: Root Tips vs. Root Tops
  misc_feature: MA Experiment ID: 20000265 Result: Up-regulated in Transcription
  misc_feature: MA Experiment 20000265 PARAMETER Experiment Name: At_Open_Flower_P Parameter: Age (day) Value: 21
  misc_feature: MA Experiment 20000265 PARAMETER Experiment Name: At_Open_Flower_P Parameter: Plant Line Value: WS
  misc_feature: MA Experiment 20000265 PARAMETER Experiment Name: At_Open_Flower_P Parameter: Tissue Value: Closed Flower vs. Whole Plant
  misc_feature: MA Experiment ID: 20000286 Result: Up-regulated in Transcription
  misc_feature: MA Experiment 20000286 PARAMETER Experiment Name: At_Open_Flower_P Parameter: Age (day) Value: 21
  misc_feature: MA Experiment 20000286 PARAMETER Experiment Name: At_Open_Flower_P Parameter: Plant Line Value: WS
  misc_feature: MA Experiment 20000286 PARAMETER Experiment Name: At_Open_Flower_P Parameter: Tissue Value: Half Open vs. Whole Plant
  misc_feature: MA Experiment ID: 20000437 Result: Down-regulated in Transcription
  misc_feature: MA Experiment 20000437 PARAMETER Experiment Name: At_Drought_P Parameter: Age (day) Value: 8
  misc_feature: MA Experiment 20000437 PARAMETER Experiment Name: At_Drought_P Parameter: Organism Value: A. thaliana
  misc_feature: MA Experiment 20000437 PARAMETER Experiment Name: At_Drought_P Parameter: Plant Line Value: WS
  misc_feature: MA Experiment 20000437 PARAMETER Experiment Name: At_Drought_P Parameter: Timepoint (hr) Value: 24
  misc_feature: MA Experiment 20000437 PARAMETER Experiment Name: At_Drought_P Parameter: Tissue Value: Whole Plant
  misc_feature: MA Experiment 20000437 PARAMETER Experiment Name: At_Drought_P Parameter: Treatment Value: Drought vs. No Drought
  misc_feature: MA Experiment ID: 20000438 Result: Up-regulated in Transcription
  misc_feature: MA Experiment 20000438 PARAMETER Experiment Name: At_Shoots__P Parameter: Age (day) Value: 14
  misc_feature: MA Experiment 20000438 PARAMETER Experiment Name: At_Shoots__P Parameter: Tissue Value: Shoots vs. Whole Plant
  misc_feature: MA Experiment ID: 20000439 Result: Down-regulated in Transcription
  misc_feature: MA Experiment 20000439 PARAMETER Experiment Name: At_Roots__P Parameter: Age (day) Value: 14 vs. 21
  misc_feature: MA Experiment 20000439 PARAMETER Experiment Name: At_Roots__P Parameter: Organism Value: A. thaliana
  misc_feature: MA Experiment 20000439 PARAMETER Experiment Name: At_Roots__P Parameter: Tissue Value: Roots vs. Whole Plant
  misc_feature: MA Experiment ID: 20000794 Result: Up-regulated in Transcription
  misc_feature: MA Experiment 20000794 PARAMETER Experiment Name: At_Petals_P Parameter: Age (day) Value: 23-25 days
  misc_feature: MA Experiment 20000794 PARAMETER Experiment Name: At_Petals_P Parameter: Plant Line Value: WS
  misc_feature: MA Experiment 20000794 PARAMETER Experiment Name: At_Petals_P Parameter: Tissue Value: Petals vs. Whole plant
  misc_feature: MA Experiment ID: 20001248 Result: Down-regulated in Transcription
  misc_feature: MA Experiment 20001248 PARAMETER Experiment Name: At_Far-red-induction_P Parameter: Age (day) Value: 7
  misc_feature: MA Experiment 20001248 PARAMETER Experiment Name: At_Far-red-induction_P Parameter: Light Value: Far-red vs. White
  misc_feature: MA Experiment 20001248 PARAMETER Experiment Name: At_Far-red-induction_P Parameter: Organism Value: A. thaliana
  misc_feature: MA Experiment 20001248 PARAMETER Experiment Name: At_Far-red-induction_P Parameter: Plant Line Value: Columbia
  misc_feature: MA Experiment 20001248 PARAMETER Experiment Name: At_Far-red-induction_P Parameter: Timepoint (hr) Value: 4
  misc_feature: MA Experiment 20001248 PARAMETER Experiment Name: At_Far-red-induction_P Parameter: Tissue Value: Whole Plant
  misc_feature: MA Experiment ID: 20001555 Result: Down-regulated in Transcription
  misc_feature: MA Experiment 20001555 PARAMETER Experiment Name: At_Drought_Soil_Dry_P Parameter: Age (day) Value: 24
  misc_feature: MA Experiment 20001555 PARAMETER Experiment Name: At_Drought_Soil_Dry_P Parameter: Organism Value: A. thaliana
  misc_feature: MA Experiment 20001555 PARAMETER Experiment Name: At_Drought_Soil_Dry_P Parameter: Plant Line Value: WS
  misc_feature: MA Experiment 20001555 PARAMETER Experiment Name: At_Drought_Soil_Dry_P Parameter: Post Timepoint (hr) Value: None
  misc_feature: MA Experiment 20001555 PARAMETER Experiment Name: At_Drought_Soil_Dry_P Parameter: Post-Treatment Value: None
  misc_feature: MA Experiment 20001555 PARAMETER Experiment Name: At_Drought_Soil_Dry_P Parameter: Timepoint (day) Value: 10
  misc_feature: MA Experiment 20001555 PARAMETER Experiment Name: At_Drought_Soil_Dry_P Parameter: Treatment Value: Drought vs. No Drought
  misc_feature: MA Experiment ID: 20001911 Result: Down-regulated in Transcription
  misc_feature: MA Experiment 20001911 PARAMETER Experiment Name: At_Drought_Reproduction_P Parameter: Age (day) Value: 40
  misc_feature: MA Experiment 20001911 PARAMETER Experiment Name: At_Drought_Reproduction_P Parameter: Organism Value: A. thaliana
  misc_feature: MA Experiment 20001911 PARAMETER Experiment Name: At_Drought_Reproduction_P Parameter: Plant Line Value: WS
  misc_feature: MA Experiment 20001911 PARAMETER Experiment Name: At_Drought_Reproduction_P Parameter: Timepoint (day) Value: 10
  misc_feature: MA Experiment 20001911 PARAMETER Experiment Name: At_Drought_Reproduction_P Parameter: Tissue Value: Flowers
  misc_feature: MA Experiment 20001911 PARAMETER Experiment Name: At_Drought_Reproduction_P Parameter: Treatment Value: Drought vs. No Drought
aaaaaacttaactccattctctttttctctctctcttctatctttcaccaaaatgccataactctctcttcccctatataccaaaaattaatctgtatctctctatccatcaagagagagcatcacaatgggcaaacagagaagaaccatgatctcatttactctgtttctcacattgacaatgatgtcatcactcatcaatggcgatatcgactcaatccaactaaacgacgacgttttaggactaatcgtcttcaaatcagacctcaacgacccattttcacaccttgagtcatggaccgaagacgacaacactccttgttcatggagctacgtcaaatgcaaccccaaaacatctcgagtcatcgagctttctctcgacggtttagccttaaccggaaaaatcaaccgcggaatccaaaagcttcaacgtttaaaagtactctcactttccaacaacaacttcaccggaaacatcaacgctctctcaaacaacaaccatctccaaaagctagatcttagccacaacaatctctccggtcaaatcccatcttctctcggttcaataacctccttgcaacaccttgacttaaccggaaactccttctccggtacactctctgacgatttcttcaacaactgttcctctcttagatatctttctctctcccacaaccacctcgaaggtcaaatcccaagtactctgtttcaatgctctgttttaaacagtctcaatctttcaagaaaccgtttctccggtaaccctagtttcgtctcaggaatctggagacttgagaggttaagagctttagatctatcttctaactcactttctggttcaatacctttggggatactctctctacataacttgaaagagttgcaactacagaggaatcagttctctggagcattgccttcagatattggactctgtcctcatttaaacagagttgatctaagttccaatcatttctctggtgaacttccaagaactcttcagaagctgaaatctttaaatcacttcgatgtatcgaacaatttgctctccggtgatttcccgccatggatcggtgacatgaccggtttagtacacttggatttctccagcaatgagttaaccggaaagcttccttcttctattagtaacttgaggtctctaaatgatctaatcttgtctgagaacaaactctccggcgaggtaccggaatctttggaatcatgcaaagagcttatgattgttcagctcaaaggcaatgacttctccggtaacattcctgatggtttgtttgatcttggtcttcaagaaatggatttttcgggtaacggtttaaccggttcgatcccgagaggctcaattaggcttttcgagtcactcataaggctcgatctttcgcgtaacagtctcactggaagtatacctggtgaagtaggactcttcatccacatgagataccttaatttgtcatggaaccatttcaacacaagagttcctcctgaaattgagtttctacagaatttaacggtattggatcttaggaacagtgcactgattggttcggttcctgctgatatatgtgagtctcagagtcttcagatacttcaactggatggtaactcactaaccggttctataccggaaggaatcggaaactgctcttctcttaaattgttgagtttgtctcataacaatcttaccggtcctattcctaaatctctttcaaacttacaagagctcaagattcttaagctagaggctaataatcttagtggagaaataccgaaagagcttggggatttgcagaatctgttattggttaacgtttcgtttaaccgacttatcggaaggttaccatttggagaagtgttccaaagcttagaccagagtgctattcaaggaaacctaggtatttgttcaccgttgttgagaggtccttgcacactaaatgtcccaaagcctcttgtcatcaatccaaactcctacgggaatgggaacaatatgcacggaaacagagctagcagtggttctggaacattccaccgtagaatgttcctgagtgtttcagtgattgtagcaatatcagctgcgattctcatcttctctggagttataattataacgctgcttaacgcgtctgtgagaagacggcttgcatttgtagacaatgcgttggaaagcattttctcggggtcttcgaaatcaggaagaagcttaatgatgggtaaacttgttctgttaaactcaagaacttcacgttcctcgtcttcgtctcaagagttcgaaagaaacccggagtcacttctcaacaaagcttcaagaatcggtgaaggggtttttggaacagtctacaaggcacctttaggagaacaggggagaaacttggctgttaagaaacttgtcccgtcgccgattcttcaaaacctagaagattttgatcgcgaagttcggatattggcgaaagcgaagcaccctaatctagtatcgatcaaagggtatttctggacaccggagttgcatcttctggtgtcagaatacatccccaacggaaacttgcagtccaagttacacaaacgagaaccctcaacaccgcctctttcttgggacgtaagatacagaatcatcctcggtacagccaaaggactcgcttatctccaccacacattccgtccaacaaccatccacttcaacctgaaaccgacaaacatcctcctcgacgagaaaaacaacccgaaaatctctgatttcgggctatctcgtctcctaacaacacaagacgggaacacaatgaacaacaacaggtttcaaaacgctttaggctacgtagcgcctgaactagagtgtcagaacttaagggtcaacgagaaatgcgatgtgtacgggttcggggttttgatactcgaactggtgactggtcggagaccggtggagtatggtgaagacagctttgtgatacttagtgaccatgttcgagttatgttagaacaagggaatgtgttggagtgtattgatccagtgatggaggaacaatactctgaagatgaggttttgcctgtcttgaaacttgctctggtctgtacttctcagataccttcgaatcggccaacaatggccgagattgttcagatcttgcaggtcatcaattctcctgttccccaccgaatcatggatagtttctaaacatctttgtgttatagttaatttttcattagcttttctttttgcaaatgttactttgtctgtgtcctttgttgtggtctttgtgtagagattgcttatttcacaatgctacgctttctattccttcgt

SEQ ID NO: 46618 - protein, 1016 aa, Arabidopsis thaliana
  peptide (1)..(1016): Ceres Seq. ID no. 15175962
  misc_feature (75)..(664): Homolog of NCBI NO: 29119653 NR Description: LRR receptor-like kinase 2 [Arabidopsis thaliana]
  misc_feature (732)..(1004): Homolog of NCBI NO: 15229457 NR Description: leucine-rich repeat transmembrane protein kinase,
  misc_feature (75)..(664): Homolog of NCBI NO: 15229457 NR Description: leucine-rich repeat transmembrane protein kinase,
  misc_feature (160)..(1006): Homolog of NCBI NO: 8778632 NR Description: F5O11.21 [Arabidopsis thaliana]
  misc_feature (113)..(961): Homolog of NCBI NO: 28139918 NR Description: receptor-like protein kinase [Elaeis guineensis]
  misc_feature (129)..(1007): Homolog of NCBI NO: 34907810 NR Description: P0703B11.26 [Oryza sativa (japonica
  misc_feature (102)..(1007): Homolog of NCBI NO: 15241089 NR Description: leucine-rich repeat transmembrane protein kinase,
  misc_feature (99)..(1007): Homolog of NCBI NO: 17979045 NR Description: unknown protein [Arabidopsis thaliana]
  misc_feature (99)..(1007): Homolog of NCBI NO: 15228900 NR Description: leucine-rich repeat transmembrane protein kinase,
  misc_feature (33)..(1008): Homolog of NCBI NO: 34905736 NR Description: putative receptor protein kinase
MGKQRRTMISFTLFLTLTMMSSLINGDIDSIQLNDDVLGLIVFKSDLNDPFSHLESWTEDDNTPCSWSYVKCNPKTSRVIELSLDGLALTGKINRGIQKLQRLKVLSLSNNNFTGNINALSNNNHLQKLDLSHNNLSGQIPSSLGSITSLQHLDLTGNSFSGTLSDDFFNNCSSLRYLSLSHNHLEGQIPSTLFQCSVLNSLNLSRNRFSGNPSFVSGIWRLERLRALDLSSNSLSGSIPLGILSLHNLKELQLQRNQFSGALPSDIGLCPHLNRVDLSSNHFSGELPRTLQKLKSLNHFDVSNNLLSGDFPPWIGDMTGLVHLDFSSNELTGKLPSSISNLRSLNDLILSENKLSGEVPESLESCKELMIVQLKGNDFSGNIPDGLFDLGLQEMDFSGNGLTGSIPRGSIRLFESLIRLDLSRNSLTGSIPGEVGLFIHMRYLNLSWNHFNTRVPPEIEFLQNLTVLDLRNSALIGSVPADICESQSLQILQLDGNSLTGSIPEGIGNCSSLKLLSLSHNNLTGPIPKSLSNLQELKILKLEANNLSGEIPKELGDLQNLLLVNVSFNRLIGRLPFGEVFQSLDQSAIQGNLGICSPLLRGPCTLNVPKPLVINPNSYGNGNNMHGNRASSGSGTFHRRMFLSVSVIVAISAAILIFSGVIIITLLNASVRRRLAFVDNALESIFSGSSKSGRSLMMGKLVLLNSRTSRSSSSSQEFERNPESLLNKASRIGEGVFGTVYKAPLGEQGRNLAVKKLVPSPILQNLEDFDREVRILAKAKHPNLVSIKGYFWTPELHLLVSEYIPNGNLQSKLHKREPSTPPLSWDVRYRIILGTAKGLAYLHHTFRPTTIHFNLKPTNILLDEKNNPKISDFGLSRLLTTQDGNTMNNNRFQNALGYVAPELECQNLRVNEKCDVYGFGVLILELVTGRRPVEYGEDSFVILSDHVRVMLEQGNVLECIDPVMEEQYSEDEVLPVLKLALVCTSQIPSNRPTMAEIVQILQVINSPVPHRIMDSF

SEQ ID NO: 46619 - protein, 1009 aa, Arabidopsis thaliana
  peptide (1)..(1009): Ceres Seq. ID no. 15175963
  misc_feature (68)..(657): Homolog of NCBI NO: 29119653 NR Description: LRR receptor-like kinase 2 [Arabidopsis thaliana]
  misc_feature (725)..(997): Homolog of NCBI NO: 15229457 NR Description: leucine-rich repeat transmembrane protein kinase,
  misc_feature (68)..(657): Homolog of NCBI NO: 15229457 NR Description: leucine-rich repeat transmembrane protein kinase,
  misc_feature (153)..(999): Homolog of NCBI NO: 8778632 NR Description: F5O11.21 [Arabidopsis thaliana]
  misc_feature (106)..(954): Homolog of NCBI NO: 28139918 NR Description: receptor-like protein kinase [Elaeis guineensis]
  misc_feature (122)..(1000): Homolog of NCBI NO: 34907810 NR Description: P0703B11.26 [Oryza sativa (japonica
  misc_feature (95)..(1000): Homolog of NCBI NO: 15241089 NR Description: leucine-rich repeat transmembrane protein kinase,
  misc_feature (92)..(1000): Homolog of NCBI NO: 17979045 NR Description: unknown protein [Arabidopsis thaliana]
  misc_feature (92)..(1000): Homolog of NCBI NO: 15228900 NR Description: leucine-rich repeat transmembrane protein kinase,
  misc_feature (26)..(1001): Homolog of NCBI NO: 34905736 NR Description: putative receptor protein kinase
MISFTLFLTLTMMSSLINGDIDSIQLNDDVLGLIVFKSDLNDPFSHLESWTEDDNTPCSWSYVKCNPKTSRVIELSLDGLALTGKINRGIQKLQRLKVLSLSNNNFTGNINALSNNNHLQKLDLSHNNLSGQIPSSLGSITSLQHLDLTGNSFSGTLSDDFFNNCSSLRYLSLSHNHLEGQIPSTLFQCSVLNSLNLSRNRFSGNPSFVSGIWRLERLRALDLSSNSLSGSIPLGILSLHNLKELQLQRNQFSGALPSDIGLCPHLNRVDLSSNHFSGELPRTLQKLKSLNHFDVSNNLLSGDFPPWIGDMTGLVHLDFSSNELTGKLPSSISNLRSLNDLILSENKLSGEVPESLESCKELMIVQLKGNDFSGNIPDGLFDLGLQEMDFSGNGLTGSIPRGSIRLFESLIRLDLSRNSLTGSIPGEVGLFIHMRYLNLSWNHFNTRVPPEIEFLQNLTVLDLRNSALIGSVPADICESQSLQILQLDGNSLTGSIPEGIGNCSSLKLLSLSHNNLTGPIPKSLSNLQELKILKLEANNLSGEIPKELGDLQNLLLVNVSFNRLIGRLPFGEVFQSLDQSAIQGNLGICSPLLRGPCTLNVPKPLVINPNSYGNGNNMHGNRASSGSGTFHRRMFLSVSVIVAISAAILIFSGVIIITLLNASVRRRLAFVDNALESIFSGSSKSGRSLMMGKLVLLNSRTSRSSSSSQEFERNPESLLNKASRIGEGVFGTVYKAPLGEQGRNLAVKKLVPSPILQNLEDFDREVRILAKAKHPNLVSIKGYFWTPELHLLVSEYIPNGNLQSKLHKREPSTPPLSWDVRYRIILGTAKGLAYLHHTFRPTTIHFNLKPTNILLDEKNNPKISDFGLSRLLTTQDGNTMNNNRFQNALGYVAPELECQNLRVNEKCDVYGFGVLILELVTGRRPVEYGEDSFVILSDHVRVMLEQGNVLECIDPVMEEQYSEDEVLPVLKLALVCTSQIPSNRPTMAEIVQILQVINSPVPHRIMDSF

SEQ ID NO: 46620 - protein, 998 aa, Arabidopsis thaliana
  peptide (1)..(998): Ceres Seq. ID no. 15175964
  misc_feature (57)..(646): Homolog of NCBI NO: 29119653 NR Description: LRR receptor-like kinase 2 [Arabidopsis thaliana]
  misc_feature (714)..(986): Homolog of NCBI NO: 15229457 NR Description: leucine-rich repeat transmembrane protein kinase,
  misc_feature (57)..(646): Homolog of NCBI NO: 15229457 NR Description: leucine-rich repeat transmembrane protein kinase,
  misc_feature (142)..(988): Homolog of NCBI NO: 8778632 NR Description: F5O11.21 [Arabidopsis thaliana]
  misc_feature (95)..(943): Homolog of NCBI NO: 28139918 NR Description: receptor-like protein kinase [Elaeis guineensis]
  misc_feature (111)..(989): Homolog of NCBI NO: 34907810 NR Description: P0703B11.26 [Oryza sativa (japonica
  misc_feature (84)..(989): Homolog of NCBI NO: 15241089 NR Description: leucine-rich repeat transmembrane protein kinase,
  misc_feature (81)..(989): Homolog of NCBI NO: 17979045 NR Description: unknown protein [Arabidopsis thaliana]
  misc_feature (81)..(989): Homolog of NCBI NO: 15228900 NR Description: leucine-rich repeat transmembrane protein kinase,
  misc_feature (15)..(990): Homolog of NCBI NO: 34905736 NR Description: putative receptor protein kinase
MMSSLINGDIDSIQLNDDVLGLIVFKSDLNDPFSHLESWTEDDNTPCSWSYVKCNPKTSRVIELSLDGLALTGKINRGIQKLQRLKVLSLSNNNFTGNINALSNNNHLQKLDLSHNNLSGQIPSSLGSITSLQHLDLTGNSFSGTLSDDFFNNCSSLRYLSLSHNHLEGQIPSTLFQCSVLNSLNLSRNRFSGNPSFVSGIWRLERLRALDLSSNSLSGSIPLGILSLHNLKELQLQRNQFSGALPSDIGLCPHLNRVDLSSNHFSGELPRTLQKLKSLNHFDVSNNLLSGDFPPWIGDMTGLVHLDFSSNELTGKLPSSISNLRSLNDLILSENKLSGEVPESLESCKELMIVQLKGNDFSGNIPDGLFDLGLQEMDFSGNGLTGSIPRGSIRLFESLIRLDLSRNSLTGSIPGEVGLFIHMRYLNLSWNHFNTRVPPEIEFLQNLTVLDLRNSALIGSVPADICESQSLQILQLDGNSLTGSIPEGIGNCSSLKLLSLSHNNLTGPIPKSLSNLQELKILKLEANNLSGEIPKELGDLQNLLLVNVSFNRLIGRLPFGEVFQSLDQSAIQGNLGICSPLLRGPCTLNVPKPLVINPNSYGNGNNMHGNRASSGSGTFHRRMFLSVSVIVAISAAILIFSGVIIITLLNASVRRRLAFVDNALESIFSGSSKSGRSLMMGKLVLLNSRTSRSSSSSQEFERNPESLLNKASRIGEGVFGTVYKAPLGEQGRNLAVKKLVPSPILQNLEDFDREVRILAKAKHPNLVSIKGYFWTPELHLLVSEYIPNGNLQSKLHKREPSTPPLSWDVRYRIILGTAKGLAYLHHTFRPTTIHFNLKPTNILLDEKNNPKISDFGLSRLLTTQDGNTMNNNRFQNALGYVAPELECQNLRVNEKCDVYGFGVLILELVTGRRPVEYGEDSFVILSDHVRVMLEQGNVLECIDPVMEEQYSEDEVLPVLKLALVCTSQIPSNRPTMAEIVQILQVINSPVPHRIMDSF

SEQ ID NO: 46621 - DNA, 2847 bp, Arabidopsis thaliana
  misc_feature (1)..(2847): Ceres Seq. ID no. 12574622
  misc_feature: MA Experiment ID: 20000315 Result: Down-regulated in Transcription
  misc_feature: MA Experiment 20000315 PARAMETER Experiment Name: At_14day_Shoots-Roots_Sub_P Parameter: Age (day) Value: 14
  misc_feature: MA Experiment 20000315 PARAMETER Experiment Name: At_14day_Shoots-Roots_Sub_P Parameter: Organism Value: A. thaliana
  misc_feature: MA Experiment 20000315 PARAMETER Experiment Name: At_14day_Shoots-Roots_Sub_P Parameter: Plant Line Value: WS
  misc_feature: MA Experiment 20000315 PARAMETER Experiment Name: At_14day_Shoots-Roots_Sub_P Parameter: Tissue Value: Shoots vs. Whole Plant
  misc_feature: MA Experiment ID: 20000328 Result: Down-regulated in Transcription
  misc_feature: MA Experiment 20000328 PARAMETER Experiment Name: At_42deg_Heat_Sub_P Parameter: Age (day) Value: 14
  misc_feature: MA Experiment 20000328 PARAMETER Experiment Name: At_42deg_Heat_Sub_P Parameter: Organism Value: A. thaliana
  misc_feature: MA Experiment 20000328 PARAMETER Experiment Name: At_42deg_Heat_Sub_P Parameter: Plant Line Value: WS
  misc_feature: MA Experiment 20000328 PARAMETER Experiment Name: At_42deg_Heat_Sub_P Parameter: Temperature (deg C) Value: 42 vs. 22
  misc_feature: MA Experiment 20000328 PARAMETER Experiment Name: At_42deg_Heat_Sub_P Parameter: Timepoint (hr) Value: 6
  misc_feature: MA Experiment 20000328 PARAMETER Experiment Name: At_42deg_Heat_Sub_P Parameter: Tissue Value: Aerial
  misc_feature: MA Experiment ID: 20000355 Result: Up-regulated in Transcription
  misc_feature: MA Experiment 20000355 PARAMETER Experiment Name: At_Siliques_Sub_P Parameter: Age (day) Value: 21
  misc_feature: MA Experiment 20000355 PARAMETER Experiment Name: At_Siliques_Sub_P Parameter: Organism Value: A. thaliana
  misc_feature: MA Experiment 20000355 PARAMETER Experiment Name: At_Siliques_Sub_P Parameter: Plant Line Value: WS
  misc_feature: MA Experiment 20000355 PARAMETER Experiment Name: At_Siliques_Sub_P Parameter: Tissue Value: Less Than 5mm Siliques vs. Whole Plant
  misc_feature: MA Experiment ID: 20000440 Result: Up-regulated in Transcription
  misc_feature: MA Experiment 20000440 PARAMETER Experiment Name: At_Closed-Flower__Sub_P Parameter: Tissue Value: Closed Flower vs. Whole Plant
atggcgactgaattctcgtgggatgaaatcaagaaagaaaatgtggaccttgagcggatccctgtggaagaagtgtttgagcagctgaaatgctcaaaagaaggtttgtccagcgatgaaggtgctaaaaggcttgaaatatttggggcaaacaagcttgaagagaaatcagagaacaagtttttgaaattcttggggttcatgtggaatcctctctcatgggttatggagtctgctgcaatcatggctattgttttagctaatggaggaggaaaggcgccggattggcaagattttatcggtattatggtgttgcttatcatcaactccaccataagtttcatcgaggagaacaatgctggcaatgccgctgctgctctcatggcaaatcttgcaccaaagactaaggtgttgagagatggtaaatggggggagcaagaggcttcaatcttggttccgggtgatttgataagcatcaaattgggtgacattgttcctgctgatgctcgtctcctcgaaggagatcctttaaaaattgaccaatctgctcttactggtgaatcccttccaaccaccaaacacccaggagatgaagtattctctggctcaacctgcaagcaaggtgagattgaggctgttgtcattgccacgggtgtccacaccttttttggcaaggctgctcatcttgttgacagtaccaacaatgttggccatttccaaaaggttttgacatcaattggtaacttctgtatatgctcaattggattggggatgttgattgagatattgattatgtaccctatccaacaccgcacatacagagatggtattgataatctattggtgcttttgatcggaggaatcccaatcgccatgccaacagttttgtctgtaacaatggctattggatcacatagactctctcaacaaggtgccatcaccaagaggatgactgcaattgaagaaatggctggaatggatgttctctgcagtgataagactggaactctaacccttaacaagctctctgtcgacaagtccttaattgaagtgttcccaaagaacatggatagtgactcagttgtattgatggctgcaagagcttccaggattgaaaaccaagatgccattgatgcttccatcgtcggaatgttgggtgatcctaaagaggcaagagcaggaatcacagaggtgcatttcttgccctttaaccctgtagataaacgtacagcgatcacatacatcgatgaaagcggagactggcatcggagcagtaaaggagctcctgagcagatcattgaactctgcaatctccaaggagagactaaaagaaaagcacacgaagttatcgatggttttgctgaacgtgggcttcgttctcttggtgttgctcaacagactgtgcctgagaagactaaggaaagtgatggtagtccatgggagttcgttggtctgttgccactctttgaccccccaagacatgacagtgcggaaactattagacgagcccttgagcttggtgtcaatgttaagatgattaccggtgaccaacttgccatcggtattgagactggtcgtaggcttggcatgggaaccaacatgtacccatccacttcactccttggcaattcaaaggatgaatcattagttggcatccctatcgatgagctcattgagaaagctgatggatttgctggagtcttccctgagcacaagtatgagatcgtaaagaagctacaagagaggaagcacatttgtgggatgactggagatggtgtaaacgatgctccagctttgaagaaagcggatattggaattgcagtggcagatgctactgatgcggcaagaagcgcctcagacattgttctaacagaaccaggactaagcgtgataataagtgccgtattgacaagtcgcgctatcttccagaggatgaagaactacacaatctacgctgtttccatcactatccgtattgttttgggattcatgcttgttgctttaatctggagatttgatttcgcacctttcatggtcttgattatcgcaatcctaaatgatggaaccatcatgactatctctaaggacagggttaaaccttccccggtgccagattcttggaagctcaatgagattttcgccactggcgttgttctaggaacctacatggctcttaccactgtactctttttctggctagctcatgacacagacttcttcagcaaaacatttggagttaggtccatacaagggaacgaagaagaacttatggcagctttgtatcttcaagtgagcatcataagtcaagcacttatctttgtaaccagatcaaggagctggtcatttgttgaacgacctgggtttttgctcctaatagcctttgttatagcacaattggtggctacattgatcgctgtgtatgcaaactggggattcgcaagaatcgtcggttgtggatggggatgggctggaggtatatgggtatacagtatcattacctacattcctcttgatattctcaagttcatcatccgttacgctctcactggcaaggcttgggataacatgatcaaccagaaaactgcgttcacaactaagaaagattatggaaaaggagagagggaggctcagtgggcactagctcaacgtacactccatggtctaccacctccagaagcaatgttcaacgacaataagaacgagctctctgaaatagcagagcaggccaaaaggcgtgccgaagttgcgaggctgagagagcttcacactctaaagggtcacgttgaatctgtagtgaagctcaaggggcttgacattgataccattcaacaacactacactgtttaa

SEQ ID NO: 46622 - protein, 948 aa, Arabidopsis thaliana
  peptide (1)..(948): Ceres Seq. ID no. 12574623
  misc_feature (326)..(612): Pfam Name: haloacid dehalogenase-like hydrolase Pfam Description: haloacid dehalogenase-like hydrolase
  misc_feature (756)..(812): Homolog of NCBI NO: 16751320 NR Description: putative plasma membrane-type proton ATPase
  misc_feature (13)..(749): Homolog of NCBI NO: 16751320 NR Description: putative plasma membrane-type proton ATPase
  misc_feature (758)..(812): Homolog of NCBI NO: 1709665 NR Description: Plasma membrane ATPase (Proton pump)
  misc_feature (13)..(758): Homolog of NCBI NO: 1709665 NR Description: Plasma membrane ATPase (Proton pump)
  misc_feature (760)..(814): Homolog of NCBI NO: 1709666 NR Description: Plasma membrane ATPase (Proton pump)
  misc_feature (13)..(743): Homolog of NCBI NO: 1709666 NR Description: Plasma membrane ATPase (Proton pump)
  misc_feature (21)..(870): Homolog of NCBI NO: 1709664 NR Description: Probable plasma membrane ATPase (Proton pump)
  misc_feature (8)..(845): Homolog of NCBI NO: 2652922 NR Description: plasma membrane (H+) ATPase [Uromyces fabae]
  misc_feature (8)..(916): Homolog of NCBI NO: 3348073 NR Description: plasma membrane H(+)-ATPase 1 [Filobasidiella
  misc_feature (8)..(916): Homolog of NCBI NO: 6691153 NR Description: plasma membrane H(+)-ATPase [Filobasidiella
MATEFSWDEIKKENVDLERIPVEEVFEQLKCSKEGLSSDEGAKRLEIFGANKLEEKSENKFLKFLGFMWNPLSWVMESAAIMAIVLANGGGKAPDWQDFIGIMVLLIINSTISFIEENNAGNAAAALMANLAPKTKVLRDGKWGEQEASILVPGDLISIKLGDIVPADARLLEGDPLKIDQSALTGESLPTTKHPGDEVFSGSTCKQGEIEAVVIATGVHTFFGKAAHLVDSTNNVGHFQKVLTSIGNFCICSIGLGMLIEILIMYPIQHRTYRDGIDNLLVLLIGGIPIAMPTVLSVTMAIGSHRLSQQGAITKRMTAIEEMAGMDVLCSDKTGTLTLNKLSVDKSLIEVFPKNMDSDSVVLMAARASRIENQDAIDASIVGMLGDPKEARAGITEVHFLPFNPVDKRTAITYIDESGDWHRSSKGAPEQIIELCNLQGETKRKAHEVIDGFAERGLRSLGVAQQTVPEKTKESDGSPWEFVGLLPLFDPPRHDSAETIRRALELGVNVKMITGDQLAIGIETGRRLGMGTNMYPSTSLLGNSKDESLVGIPIDELIEKADGFAGVFPEHKYEIVKKLQERKHICGMTGDGVNDAPALKKADIGIAVADATDAARSASDIVLTEPGLSVIISAVLTSRAIFQRMKNYTIYAVSITIRIVLGFMLVALIWRFDFAPFMVLIIAILNDGTIMTISKDRVKPSPVPDSWKLNEIFATGVVLGTYMALTTVLFFWLAHDTDFFSKTFGVRSIQGNEEELMAALYLQVSIISQALIFVTRSRSWSFVERPGFLLLIAFVIAQLVATLIAVYANWGFARIVGCGWGWAGGIWVYSIITYIPLDILKFIIRYALTGKAWDNMINQKTAFTTKKDYGKGEREAQWALAQRTLHGLPPPEAMFNDNKNELSEIAEQAKRRAEVARLRELHTLKGHVESVVKLKGLDIDTIQQHYTV

SEQ ID NO: 46623 - protein, 881 aa, Arabidopsis thaliana
  peptide (1)..(881): Ceres Seq. ID no. 12574624
  misc_feature (259)..(545): Pfam Name: haloacid dehalogenase-like hydrolase Pfam Description: haloacid dehalogenase-like hydrolase
  misc_feature (689)..(745): Homolog of NCBI NO: 16751320 NR Description: putative plasma membrane-type proton ATPase
  misc_feature (1)..(682): Homolog of NCBI NO: 16751320 NR Description: putative plasma membrane-type proton ATPase
  misc_feature (691)..(745): Homolog of NCBI NO: 1709665 NR Description: Plasma membrane ATPase (Proton pump)
  misc_feature (1)..(691): Homolog of NCBI NO: 1709665 NR Description: Plasma membrane ATPase (Proton pump)
  misc_feature (693)..(747): Homolog of NCBI NO: 1709666 NR Description: Plasma membrane ATPase (Proton pump)
  misc_feature (1)..(676): Homolog of NCBI NO: 1709666 NR Description: Plasma membrane ATPase (Proton pump)
  misc_feature (1)..(803): Homolog of NCBI NO: 1709664 NR Description: Probable plasma membrane ATPase (Proton pump)
  misc_feature (1)..(778): Homolog of NCBI NO: 2652922 NR Description: plasma membrane (H+) ATPase [Uromyces fabae]
  misc_feature (1)..(849): Homolog of NCBI NO: 3348073 NR Description: plasma membrane H(+)-ATPase 1 [Filobasidiella
  misc_feature (1)..(849): Homolog of NCBI NO: 6691153 NR Description: plasma membrane H(+)-ATPase [Filobasidiella
MWNPLSWVMESAAIMAIVLANGGGKAPDWQDFIGIMVLLIINSTISFIEENNAGNAAAALMANLAPKTKVLRDGKWGEQEASILVPGDLISIKLGDIVPADARLLEGDPLKIDQSALTGESLPTTKHPGDEVFSGSTCKQGEIEAVVIATGVHTFFGKAAHLVDSTNNVGHFQKVLTSIGNFCICSIGLGMLIEILIMYPIQHRTYRDGIDNLLVLLIGGIPIAMPTVLSVTMAIGSHRLSQQGAITKRMTAIEEMAGMDVLCSDKTGTLTLNKLSVDKSLIEVFPKNMDSDSVVLMAARASRIENQDAIDASIVGMLGDPKEARAGITEVHFLPFNPVDKRTAITYIDESGDWHRSSKGAPEQIIELCNLQGETKRKAHEVIDGFAERGLRSLGVAQQTVPEKTKESDGSPWEFVGLLPLFDPPRHDSAETIRRALELGVNVKMITGDQLAIGIETGRRLGMGTNMYPSTSLLGNSKDESLVGIPIDELIEKADGFAGVFPEHKYEIVKKLQERKHICGMTGDGVNDAPALKKADIGIAVADATDAARSASDIVLTEPGLSVIISAVLTSRAIFQRMKNYTIYAVSITIRIVLGFMLVALIWRFDFAPFMVLIIAILNDGTIMTISKDRVKPSPVPDSWKLNEIFATGVVLGTYMALTTVLFFWLAHDTDFFSKTFGVRSIQGNEEELMAALYLQVSIISQALIFVTRSRSWSFVERPGFLLLIAFVIAQLVATLIAVYANWGFARIVGCGWGWAGGIWVYSIITYIPLDILKFIIRYALTGKAWDNMINQKTAFTTKKDYGKGEREAQWALAQRTLHGLPPPEAMFNDNKNELSEIAEQAKRRAEVARLRELHTLKGHVESVVKLKGLDIDTIQQHYTV

SEQ ID NO: 46624 - protein, 873 aa, Arabidopsis thaliana
  peptide (1)..(873): Ceres Seq. ID no. 12574625
  misc_feature (251)..(537): Pfam Name: haloacid dehalogenase-like hydrolase Pfam Description: haloacid dehalogenase-like hydrolase
  misc_feature (681)..(737): Homolog of NCBI NO: 16751320 NR Description: putative plasma membrane-type proton ATPase
  misc_feature (1)..(674): Homolog of NCBI NO: 16751320 NR Description: putative plasma membrane-type proton ATPase
  misc_feature (683)..(737): Homolog of NCBI NO: 1709665 NR Description: Plasma membrane ATPase (Proton pump)
  misc_feature (1)..(683): Homolog of NCBI NO: 1709665 NR Description: Plasma membrane ATPase (Proton pump)
  misc_feature (685)..(739): Homolog of NCBI NO: 1709666 NR Description: Plasma membrane ATPase (Proton pump)
  misc_feature (1)..(668): Homolog of NCBI NO: 1709666 NR Description: Plasma membrane ATPase (Proton pump)
  misc_feature (1)..(795): Homolog of NCBI NO: 1709664 NR Description: Probable plasma membrane ATPase (Proton pump)
  misc_feature (1)..(770): Homolog of NCBI NO: 2652922 NR Description: plasma membrane (H+) ATPase [Uromyces fabae]
  misc_feature (1)..(841): Homolog of NCBI NO: 3348073 NR Description: plasma membrane H(+)-ATPase 1 [Filobasidiella
  misc_feature (1)..(841): Homolog of NCBI NO: 6691153 NR Description: plasma membrane H(+)-ATPase [Filobasidiella
MESAAIMAIVLANGGGKAPDWQDFIGIMVLLIINSTISFIEENNAGNAAAALMANLAPKTKVLRDGKWGEQEASILVPGDLISIKLGDIVPADARLLEGDPLKIDQSALTGESLPTTKHPGDEVFSGSTCKQGEIEAVVIATGVHTFFGKAAHLVDSTNNVGHFQKVLTSIGNFCICSIGLGMLIEILIMYPIQHRTYRDGIDNLLVLLIGGIPIAMPTVLSVTMAIGSHRLSQQGAITKRMTAIEEMAGMDVLCSDKTGTLTLNKLSVDKSLIEVFPKNMDSDSVVLMAARASRIENQDAIDASIVGMLGDPKEARAGITEVHFLPFNPVDKRTAITYIDESGDWHRSSKGAPEQIIELCNLQGETKRKAHEVIDGFAERGLRSLGVAQQTVPEKTKESDGSPWEFVGLLPLFDPPRHDSAETIRRALELGVNVKMITGDQLAIGIETGRRLGMGTNMYPSTSLLGNSKDESLVGIPIDELIEKADGFAGVFPEHKYEIVKKLQERKHICGMTGDGVNDAPALKKADIGIAVADATDAARSASDIVLTEPGLSVIISAVLTSRAIFQRMKNYTIYAVSITIRIVLGFMLVALIWRFDFAPFMVLIIAILNDGTIMTISKDRVKPSPVPDSWKLNEIFATGVVLGTYMALTTVLFFWLAHDTDFFSKTFGVRSIQGNEEELMAALYLQVSIISQALIFVTRSRSWSFVERPGFLLLIAFVIAQLVATLIAVYANWGFARIVGCGWGWAGGIWVYSIITYIPLDILKFIIRYALTGKAWDNMINQKTAFTTKKDYGKGEREAQWALAQRTLHGLPPPEAMFNDNKNELSEIAEQAKRRAEVARLRELHTLKGHVESVVKLKGLDIDTIQQHYTV

SEQ ID NO: 46625 - DNA, 1207 bp, Arabidopsis thaliana
  misc_feature (1)..(1207): Ceres Seq. ID no. 13592036
  misc_feature: MA Experiment ID: 20000179 Result: Up-regulated in Transcription
  misc_feature: MA Experiment 20000179 PARAMETER Experiment Name: At_Germinating_Seeds_P Parameter: Age (hr) Value: 6 vs. 0
  misc_feature: MA Experiment 20000179 PARAMETER Experiment Name: At_Germinating_Seeds_P Parameter: Tissue Value: Germinating Seeds
  misc_feature: MA Experiment ID: 20000180 Result: Up-regulated in Transcription
  misc_feature: MA Experiment 20000180 PARAMETER Experiment Name: At_Germinating_Seeds_P Parameter: Age (hr) Value: 24 vs. 0
  misc_feature: MA Experiment 20000180 PARAMETER Experiment Name: At_Germinating_Seeds_P Parameter: Tissue Value: Germinating Seeds
  misc_feature: MA Experiment ID: 20000794 Result: Down-regulated in Transcription
  misc_feature: MA Experiment 20000794 PARAMETER Experiment Name: At_Petals_P Parameter: Age (day) Value: 23-25 days
  misc_feature: MA Experiment 20000794 PARAMETER Experiment Name: At_Petals_P Parameter: Plant Line Value: WS
  misc_feature: MA Experiment 20000794 PARAMETER Experiment Name: At_Petals_P Parameter: Tissue Value: Petals vs. Whole plant
  misc_feature: MA Experiment ID: 20001560 Result: Up-regulated in Transcription
  misc_feature: MA Experiment 20001560 PARAMETER Experiment Name: At_Drought_Soil_Dry_P Parameter: Age (day) Value: 28
  misc_feature: MA Experiment 20001560 PARAMETER Experiment Name: At_Drought_Soil_Dry_P Parameter: Organism Value: A. thaliana
  misc_feature: MA Experiment 20001560 PARAMETER Experiment Name: At_Drought_Soil_Dry_P Parameter: Plant Line Value: WS
  misc_feature: MA Experiment 20001560 PARAMETER Experiment Name: At_Drought_Soil_Dry_P Parameter: Post Timepoint (hr) Value: None
  misc_feature: MA Experiment 20001560 PARAMETER Experiment Name: At_Drought_Soil_Dry_P Parameter: Post-Treatment Value: None
  misc_feature: MA Experiment 20001560 PARAMETER Experiment Name: At_Drought_Soil_Dry_P Parameter: Timepoint (day) Value: 14
  misc_feature: MA Experiment 20001560 PARAMETER Experiment Name: At_Drought_Soil_Dry_P Parameter: Treatment Value: Drought vs. No Drought
  misc_feature: MA Experiment ID: 20001911 Result: Down-regulated in Transcription
  misc_feature: MA Experiment 20001911 PARAMETER Experiment Name: At_Drought_Reproduction_P Parameter: Age (day) Value: 40
  misc_feature: MA Experiment 20001911 PARAMETER Experiment Name: At_Drought_Reproduction_P Parameter: Organism Value: A. thaliana
  misc_feature: MA Experiment 20001911 PARAMETER Experiment Name: At_Drought_Reproduction_P Parameter: Plant Line Value: WS
  misc_feature: MA Experiment 20001911 PARAMETER Experiment Name: At_Drought_Reproduction_P Parameter: Timepoint (day) Value: 10
  misc_feature: MA Experiment 20001911 PARAMETER Experiment Name: At_Drought_Reproduction_P Parameter: Tissue Value: Flowers
  misc_feature: MA Experiment 20001911 PARAMETER Experiment Name: At_Drought_Reproduction_P Parameter: Treatment Value: Drought vs. No Drought
ctctccaccgtcggctcagatctagacggaaatgtgccggtgaaatcgaatcatgaaaagatctcacatttcgtctcctcgttcttattcacgaccagcgatttcaatcttcggtgtcttcctcttgtttcttctggttttaacactaagctctcgaaaaccatcagattcatcctccggtttagctccaaatcgaaacttagccacaaaatcgacgattccgaggtttgcgtatttggtaacgggaacgaaaggagatgggaaacgagtgaagcggctgcttaaagcaatacatcatccgagaaattactatctgcttcatttggatctcgaagcttcagatgaagagagaatggagctggcgaagtatgtgagatcggagaagaagaagtttgagaatgttatggtaatgggtttagctgatttggttacggagaaaggtccaacgatgttagctagtacgcttcatggtgttgccattttgttgaagaaagctaaggattgggattggtttattaatcttagtgcttctgattatcctttaatgcctcaagatgatattttgcatatattctcatacttgccacgctacctgaactttatcgagcacacaagcaacatcggttggaaagagaaccaaagagcaaggcctatcattattgatcctggtttttaccatttgaagaaatctggtgtcttttgggctaaagaacggagatctttgcctgcttcattcaaacttttcatgggttcaaccagcgttgctttaacaagaccgttcctcgagttttgcatttggggatgggataatctcccaagaacgctattgatgtactataccaacttcctcttgtcatctgaaggctactttcagacagttgtgtgcaacaataaagattatcagaacacaacggttaaccacgacctgcattacacaaaatgggatccgcttcaacagcgcaccctgaatgtaacggttgagaatttccgcgatatggtccaaagcggggctccattcgcaagggagtttcgagaggatgatcttgtactcgataagattgacattgagctactaggtcaaaccgatactggattggagttgaagactccggatgttgttaaaccaacggttagttggaagaggcttgagaagctcatggttaggcttcttgatcatgagaatttcagggctaagcaatgtaaataa

SEQ ID NO: 46626 - protein, 384 aa, Arabidopsis thaliana
  peptide (1)..(384): Ceres Seq. ID no. 13592037
  misc_feature (59)..(282): Pfam Name: Core-2/I-Branching enzyme Pfam Description: Core-2/I-Branching enzyme
  misc_feature (24)..(384): Homolog of NCBI NO: 13605509 NR Description: AT3g03690/T12J13_3 [Arabidopsis thaliana]
  misc_feature (18)..(384): Homolog of NCBI NO: 15146308 NR Description: AT3g15350/K7L4_15 [Arabidopsis thaliana]
  misc_feature (18)..(384): Homolog of NCBI NO: 18400725 NR Description: N-acetylglucosaminyltransferase family
  misc_feature (24)..(384): Homolog of NCBI NO: 15228609 NR Description: N-acetylglucosaminyltransferase family
  misc_feature (355)..(384): Homolog of NCBI NO: 15242199 NR Description: N-acetylglucosaminyltransferase family
  misc_feature (57)..(341): Homolog of NCBI NO: 15242199 NR Description: N-acetylglucosaminyltransferase family
  misc_feature (354)..(384): Homolog of NCBI NO: 15242532 NR Description: N-acetylglucosaminyltransferase family
  misc_feature (21)..(343): Homolog of NCBI NO: 15242532 NR Description: N-acetylglucosaminyltransferase family
  misc_feature (30)..(384): Homolog of NCBI NO: 7485441 NR Description: probable RING zinc finger protein
  misc_feature (1)..(384): Homolog of NCBI NO: 18404468 NR Description: N-acetylglucosaminyltransferase family
MKRSHISSPRSYSRPAISIFGVFLLFLLVLTLSSRKPSDSSSGLAPNRNLATKSTIPRFAYLVTGTKGDGKRVKRLLKAIHHPRNYYLLHLDLEASDEERMELAKYVRSEKKKFENVMVMGLADLVTEKGPTMLASTLHGVAILLKKAKDWDWFINLSASDYPLMPQDDILHIFSYLPRYLNFIEHTSNIGWKENQRARPIIIDPGFYHLKKSGVFWAKERRSLPASFKLFMGSTSVALTRPFLEFCIWGWDNLPRTLLMYYTNFLLSSEGYFQTVVCNNKDYQNTTVNHDLHYTKWDPLQQRTLNVTVENFRDMVQSGAPFAREFREDDLVLDKIDIELLGQTDTGLELKTPDVVKPTVSWKRLEKLMVRLLDHENFRAKQCK

SEQ ID NO: 46627 - protein, 284 aa, Arabidopsis thaliana
  peptide (1)..(284): Ceres Seq. ID no. 13592038
  misc_feature (1)..(182): Pfam Name: Core-2/I-Branching enzyme Pfam Description: Core-2/I-Branching enzyme
  misc_feature (1)..(284): Homolog of NCBI NO: 13605509 NR Description: AT3g03690/T12J13_3 [Arabidopsis thaliana]
  misc_feature (1)..(284): Homolog of NCBI NO: 15146308 NR Description: AT3g15350/K7L4_15 [Arabidopsis thaliana]
  misc_feature (1)..(284): Homolog of NCBI NO: 18400725 NR Description: N-acetylglucosaminyltransferase family
  misc_feature (1)..(284): Homolog of NCBI NO: 15228609 NR Description: N-acetylglucosaminyltransferase family
  misc_feature (255)..(284): Homolog of NCBI NO: 15242199 NR Description: N-acetylglucosaminyltransferase family
  misc_feature (1)..(241): Homolog of NCBI NO: 15242199 NR Description: N-acetylglucosaminyltransferase family
  misc_feature (254)..(284): Homolog of NCBI NO: 15242532 NR Description: N-acetylglucosaminyltransferase family
  misc_feature (1)..(243): Homolog of NCBI NO: 15242532 NR Description: N-acetylglucosaminyltransferase family
  misc_feature (1)..(284): Homolog of NCBI NO: 7485441 NR Description: probable RING zinc finger protein
  misc_feature (1)..(284): Homolog of NCBI NO: 18404468 NR Description: N-acetylglucosaminyltransferase family
MELAKYVRSEKKKFENVMVMGLADLVTEKGPTMLASTLHGVAILLKKAKDWDWFINLSASDYPLMPQDDILHIFSYLPRYLNFIEHTSNIGWKENQRARPIIIDPGFYHLKKSGVFWAKERRSLPASFKLFMGSTSVALTRPFLEFCIWGWDNLPRTLLMYYTNFLLSSEGYFQTVVCNNKDYQNTTVNHDLHYTKWDPLQQRTLNVTVENFRDMVQSGAPFAREFREDDLVLDKIDIELLGQTDTGLELKTPDVVKPTVSWKRLEKLMVRLLDHENFRAKQCK

SEQ ID NO: 46628 - protein, 267 aa, Arabidopsis thaliana
  peptide (1)..(267): Ceres Seq. ID no. 13592039
  misc_feature (1)..(165): Pfam Name: Core-2/I-Branching enzyme Pfam Description: Core-2/I-Branching enzyme
  misc_feature (1)..(267): Homolog of NCBI NO: 13605509 NR Description: AT3g03690/T12J13_3 [Arabidopsis thaliana]
  misc_feature (1)..(267): Homolog of NCBI NO: 15146308 NR Description: AT3g15350/K7L4_15 [Arabidopsis thaliana]
  misc_feature (1)..(267): Homolog of NCBI NO: 18400725 NR Description: N-acetylglucosaminyltransferase family
  misc_feature (1)..(267): Homolog of NCBI NO: 15228609 NR Description: N-acetylglucosaminyltransferase family
  misc_feature (238)..(267): Homolog of NCBI NO: 15242199 NR Description: N-acetylglucosaminyltransferase family
  misc_feature (1)..(224): Homolog of NCBI NO: 15242199 NR Description: N-acetylglucosaminyltransferase family
  misc_feature (237)..(267): Homolog of NCBI NO: 15242532 NR Description: N-acetylglucosaminyltransferase family
  misc_feature (1)..(226): Homolog of NCBI NO: 15242532 NR Description: N-acetylglucosaminyltransferase family
  misc_feature (1)..(267): Homolog of NCBI NO: 7485441 NR Description: probable RING zinc finger protein
  misc_feature (1)..(267): Homolog of NCBI NO: 18404468 NR Description: N-acetylglucosaminyltransferase family
MVMGLADLVTEKGPTMLASTLHGVAILLKKAKDWDWFINLSASDYPLMPQDDILHIFSYLPRYLNFIEHTSNIGWKENQRARPIIIDPGFYHLKKSGVFWAKERRSLPASFKLFMGSTSVALTRPFLEFCIWGWDNLPRTLLMYYTNFLLSSEGYFQTVVCNNKDYQNTTVNHDLHYTKWDPLQQRTLNVTVENFRDMVQSGAPFAREFREDDLVLDKIDIELLGQTDTGLELKTPDVVKPTVSWKRLEKLMVRLLDHENFRAKQCK

SEQ ID NO: 46629 - DNA, 2915 bp, Arabidopsis thaliana
  misc_feature (1)..(2915): Ceres Seq. ID no. 12601711
  misc_feature: MA Experiment ID: 20000355 Result: Up-regulated in Transcription
  misc_feature: MA Experiment 20000355 PARAMETER Experiment Name: At_Siliques_Sub_P Parameter: Age (day) Value: 21
  misc_feature: MA Experiment 20000355 PARAMETER Experiment Name: At_Siliques_Sub_P Parameter: Organism Value: A. thaliana
  misc_feature: MA Experiment 20000355 PARAMETER Experiment Name: At_Siliques_Sub_P Parameter: Plant Line Value: WS
  misc_feature: MA Experiment 20000355 PARAMETER Experiment Name: At_Siliques_Sub_P Parameter: Tissue Value: Less Than 5mm Siliques vs. Whole Plant
aaaccggttgaaataatccacggaacaacaacatatgttggagtctggaacgcgttgatgtcttggttcccaagcagctcaaaagtgtgacataaattgttgtcctcaacaaacaccataaaaatcacaaatttcgttctgggctctttatttttttcaatcaccacattttcacttgttaaaattttgttactttgctctatctgaaaccaaagctgccatctttctccttttgggttttgattagatctccgattttgggtttctatatattatgcgagctcacttttgttcgttctgattatctgacaatgatattctccaagcttggttcttccctcgctcgatcctcacgttctaagggatttgtgtacggcggtggtgtgagatcggcggtatttaaccaagggaggttacgagcgccgcagaatctcgaggcggccgtcaatcaggtggatggtggattagggtttttgaggcggcactttgcttcttttgctgctcgaaagggactagaagccggtgatttaagccgtgctttcgctaaccctagattgcgtcggttcttttctagtcaaaccccaaagaagaagaattatgagaactactatccaaaagacagtaagaaagcacccaagaatgagcagaaatctgaatccagagatggttcaaagaaaaatgaaaacgaaaatgctggggacgcgttctcaaatgaatatcaaaatatgttaattcctcttatggccattgctttaatcctttctactttctctcttggttcccgagaacagcaacagattagtttccaggagttcaaaaacaagctcctcgaggctggtttagtggatcacatagatgtttccaataaagaagtcgcaaaagtctatgtgaggagttcaccaaaaagccaaacaacggaagaagttgttcaaggtcctggtaatggagttcctgctaaaggacgtggtggtcagtataagtactactttaatattggtagtgttgaatcatttgaggagaaactagaagaggcccaagaagctataggcgttaattctcatgactttgttcctgtcacctacgtcagtgaaactatctggtaccaggaactattgagatttgcaccgactttacttctcgtggctacgctaatttttggggcaagacggatgcaaggtggactgggaggtttaggcggacctggtgggaaggctggccgtggaattttcaatatagggaaagctcaaataacgagagcagataaaaactccaagaataagatatattttaaagatgttgcgggatgcgaggaggctaaacaagaaattatggaatttgtgcatttccttcagaacccaaagaaatatgaagatttgggagctaaaatcccaaaaggtgcgcttttagttggcccacccgggactggaaagacccttctagcaaaagctactgcaggagaatcagctgtaccgtttctctcaatatctggttcagatttcatggagatgtttgttggtgttggaccttccagagtgagaaacttgtttcaagaggctagacagtgtgcacctagcataatatttattgatgagatcgatgcgattggccgtgcgaggggacgtggaggtttctctggtggaaatgatgagcgtgaaagcacacttaatcaactgctagttgaaatggatggatttggtactaccgctggagttgtcgtccttgctgggactaacaggccagatattcttgataaagctttattacggcctggccggtttgatcgccagataaccatagataaacctgatattaaaggccgtgatcagatattccagatatacctgaagaagatcaaacttgatcacgagccctcatattactcacaaaggcttgcagccctcactcccggatttgctggagctgacattgcgaatgtctgtaacgaggcggctcttattgctgccagacatgaaggagcaacagttacaatggcgcactttgactctgcaatcgatcgtgttattggtggtctggagaagaaaaaccgggtaataagcaagctggagcgccgtacagttgcatatcatgaatctggccatgcggttgctgggtggttcctggaacatgcggaaccgttgctaaaggtgactattgttcctcgtggcacagcagcgctcggatttgcccagtatgttccaaatgaaaacttgctcatgacaaaagaacaactctttgatatgacttgcatgactctcgggggccgggcagctgaacaggtattgattggaagaatatccactggggctcagaacgatctggaaaaggtgactaagatgacttatgcgcaagtggcagtgtacggattcagcgacaagataggattgctttcattcccacaacgggaagacgagttctccaagccgtacagcaacagaaccggtgcgatgatagatgaagaggtccgagaatgggtggggaaagcttacaagcggacggttgagctgatagaggaacacaaagagcaagtggctcagatcgctgagctcttgctagagaaggaggttttgcatcaggatgatctcactaaagtattgggcgagcgtccgtttaagtcgggtgagacaacgaattacgacaggtttaaatctggatttgaagagtcggagaaggagagccagaaggagtctgtgccggtgaagcctgtggaggatgatggaattccgcctcttgagccacaggtagttccgacgtagctgttggagacacccaaaggttactactactcattgtacatttaatccaaggcaataacaaaacacgcttctgtatctttctgttttagcacggagggattgattgttctttctggaaaagtaacaaagttttcactttatatataaaatctatctttttcc

SEQ ID NO: 46630 - protein, 813 aa, Arabidopsis thaliana
  peptide (1)..(813): Ceres Seq. ID no. 12601712
  misc_feature (558)..(760): Pfam Name: Peptidase family M41 Pfam Description: Peptidase family M41
  misc_feature (93)..(809): Homolog of NCBI NO: 28829182 NR Description: similar to Dictyostelium discoideum (Slime mold).
  misc_feature (220)..(780): Homolog of NCBI NO: 18999411 NR Description: Similar to AFG3 ATPase family gene 3-like 2
  misc_feature (220)..(780): Homolog of NCBI NO: 5802970 NR Description: AFG3 ATPase family gene 3-like 2
  misc_feature (103)..(199): Homolog of NCBI NO: 24665814 NR Description: CG6512-PB [Drosophila melanogaster]
  misc_feature (182)..(812): Homolog of NCBI NO: 24665814 NR Description: CG6512-PB [Drosophila melanogaster]
  misc_feature (88)..(199): Homolog of NCBI NO: 28574878 NR Description: CG6512-PA [Drosophila melanogaster]
  misc_feature (182)..(812): Homolog of NCBI NO: 28574878 NR Description: CG6512-PA [Drosophila melanogaster]
  misc_feature (156)..(216): Homolog of NCBI NO: 6539504 NR Description: FtsH2 [Cyanidioschyzon merolae]
  misc_feature (199)..(787): Homolog of NCBI NO: 6539504 NR Description: FtsH2 [Cyanidioschyzon merolae]
  misc_feature (1)..(791): Homolog of NCBI NO: 34908198 NR Description: putative AAA-metalloprotease
MIFSKLGSSLARSSRSKGFVYGGGVRSAVFNQGRLRAPQNLEAAVNQVDGGLGFLRRHFASFAARKGLEAGDLSRAFANPRLRRFFSSQTPKKKNYENYYPKDSKKAPKNEQKSESRDGSKKNENENAGDAFSNEYQNMLIPLMAIALILSTFSLGSREQQQISFQEFKNKLLEAGLVDHIDVSNKEVAKVYVRSSPKSQTTEEVVQGPGNGVPAKGRGGQYKYYFNIGSVESFEEKLEEAQEAIGVNSHDFVPVTYVSETIWYQELLRFAPTLLLVATLIFGARRMQGGLGGLGGPGGKAGRGIFNIGKAQITRADKNSKNKIYFKDVAGCEEAKQEIMEFVHFLQNPKKYEDLGAKIPKGALLVGPPGTGKTLLAKATAGESAVPFLSISGSDFMEMFVGVGPSRVRNLFQEARQCAPSIIFIDEIDAIGRARGRGGFSGGNDERESTLNQLLVEMDGFGTTAGVVVLAGTNRPDILDKALLRPGRFDRQITIDKPDIKGRDQIFQIYLKKIKLDHEPSYYSQRLAALTPGFAGADIANVCNEAALIAARHEGATVTMAHFDSAIDRVIGGLEKKNRVISKLERRTVAYHESGHAVAGWFLEHAEPLLKVTIVPRGTAALGFAQYVPNENLLMTKEQLFDMTCMTLGGRAAEQVLIGRISTGAQNDLEKVTKMTYAQVAVYGFSDKIGLLSFPQREDEFSKPYSNRTGAMIDEEVREWVGKAYKRTVELIEEHKEQVAQIAELLLEKEVLHQDDLTKVLGERPFKSGETTNYDRFKSGFEESEKESQKESVPVKPVEDDGIPPLEPQVVPT

SEQ ID NO: 46631 - protein, 675 aa, Arabidopsis thaliana
  peptide (1)..(675): Ceres Seq. ID no. 12601713
  misc_feature (420)..(622): Pfam Name: Peptidase family M41 Pfam Description: Peptidase family M41
  misc_feature (1)..(671): Homolog of NCBI NO: 28829182 NR Description: similar to Dictyostelium discoideum (Slime mold).
  misc_feature (82)..(642): Homolog of NCBI NO: 18999411 NR Description: Similar to AFG3 ATPase family gene 3-like 2
  misc_feature (82)..(642): Homolog of NCBI NO: 5802970 NR Description: AFG3 ATPase family gene 3-like 2
  misc_feature (1)..(61): Homolog of NCBI NO: 24665814 NR Description: CG6512-PB [Drosophila melanogaster]
  misc_feature (44)..(674): Homolog of NCBI NO: 24665814 NR Description: CG6512-PB [Drosophila melanogaster]
  misc_feature (1)..(61): Homolog of NCBI NO: 28574878 NR Description: CG6512-PA [Drosophila melanogaster]
  misc_feature (44)..(674): Homolog of NCBI NO: 28574878 NR Description: CG6512-PA [Drosophila melanogaster]
  misc_feature (18)..(78): Homolog of NCBI NO: 6539504 NR Description: FtsH2 [Cyanidioschyzon merolae]
  misc_feature (61)..(649): Homolog of NCBI NO: 6539504 NR Description: FtsH2 [Cyanidioschyzon merolae]
  misc_feature (1)..(653): Homolog of NCBI NO: 34908198 NR Description: putative AAA-metalloprotease
MLIPLMAIALILSTFSLGSREQQQISFQEFKNKLLEAGLVDHIDVSNKEVAKVYVRSSPKSQTTEEVVQGPGNGVPAKGRGGQYKYYFNIGSVESFEEKLEEAQEAIGVNSHDFVPVTYVSETIWYQELLRFAPTLLLVATLIFGARRMQGGLGGLGGPGGKAGRGIFNIGKAQITRADKNSKNKIYFKDVAGCEEAKQEIMEFVHFLQNPKKYEDLGAKIPKGALLVGPPGTGKTLLAKATAGESAVPFLSISGSDFMEMFVGVGPSRVRNLFQEARQCAPSIIFIDEIDAIGRARGRGGFSGGNDERESTLNQLLVEMDGFGTTAGVVVLAGTNRPDILDKALLRPGRFDRQITIDKPDIKGRDQIFQIYLKKIKLDHEPSYYSQRLAALTPGFAGADIANVCNEAALIAARHEGATVTMAHFDSAIDRVIGGLEKKNRVISKLERRTVAYHESGHAVAGWFLEHAEPLLKVTIVPRGTAALGFAQYVPNENLLMTKEQLFDMTCMTLGGRAAEQVLIGRISTGAQNDLEKVTKMTYAQVAVYGFSDKIGLLSFPQREDEFSKPYSNRTGAMIDEEVREWVGKAYKRTVELIEEHKEQVAQIAELLLEKEVLHQDDLTKVLGERPFKSGETTNYDRFKSGFEESEKESQKESVPVKPVEDDGIPPLEPQVVPT

SEQ ID NO: 46632 - protein, 670 aa, Arabidopsis thaliana
  peptide (1)..(670): Ceres Seq. ID no. 12601714
  misc_feature (415)..(617): Pfam Name: Peptidase family M41 Pfam Description: Peptidase family M41
  misc_feature (1)..(666): Homolog of NCBI NO: 28829182 NR Description: similar to Dictyostelium discoideum (Slime mold).
  misc_feature (77)..(637): Homolog of NCBI NO: 18999411 NR Description: Similar to AFG3 ATPase family gene 3-like 2
  misc_feature (77)..(637): Homolog of NCBI NO: 5802970 NR Description: AFG3 ATPase family gene 3-like 2
  misc_feature (1)..(56): Homolog of NCBI NO: 24665814 NR Description: CG6512-PB [Drosophila melanogaster]
  misc_feature (39)..(669): Homolog of NCBI NO: 24665814 NR Description: CG6512-PB [Drosophila melanogaster]
  misc_feature (1)..(56): Homolog of NCBI NO: 28574878 NR Description: CG6512-PA [Drosophila melanogaster]
  misc_feature (39)..(669): Homolog of NCBI NO: 28574878 NR Description: CG6512-PA [Drosophila melanogaster]
  misc_feature (13)..(73): Homolog of NCBI NO: 6539504 NR Description: FtsH2 [Cyanidioschyzon merolae]
  misc_feature (56)..(644): Homolog of NCBI NO: 6539504 NR Description: FtsH2 [Cyanidioschyzon merolae]
  misc_feature (1)..(648): Homolog of NCBI NO: 34908198 NR Description: putative AAA-metalloprotease
MAIALILSTFSLGSREQQQISFQEFKNKLLEAGLVDHIDVSNKEVAKVYVRSSPKSQTTEEVVQGPGNGVPAKGRGGQYKYYFNIGSVESFEEKLEEAQEAIGVNSHDFVPVTYVSETIWYQELLRFAPTLLLVATLIFGARRMQGGLGGLGGPGGKAGRGIFNIGKAQITRADKNSKNKIYFKDVAGCEEAKQEIMEFVHFLQNPKKYEDLGAKIPKGALLVGPPGTGKTLLAKATAGESAVPFLSISGSDFMEMFVGVGPSRVRNLFQEARQCAPSIIFIDEIDAIGRARGRGGFSGGNDERESTLNQLLVEMDGFGTTAGVVVLAGTNRPDILDKALLRPGRFDRQITIDKPDIKGRDQIFQIYLKKIKLDHEPSYYSQRLAALTPGFAGADIANVCNEAALIAARHEGATVTMAHFDSAIDRVIGGLEKKNRVISKLERRTVAYHESGHAVAGWFLEHAEPLLKVTIVPRGTAALGFAQYVPNENLLMTKEQLFDMTCMTLGGRAAEQVLIGRISTGAQNDLEKVTKMTYAQVAVYGFSDKIGLLSFPQREDEFSKPYSNRTGAMIDEEVREWVGKAYKRTVELIEEHKEQVAQIAELLLEKEVLHQDDLTKVLGERPFKSGETTNYDRFKSGFEESEKESQKESVPVKPVEDDGIPPLEPQVVPT

SEQ ID NO: 46633 - DNA, 1073 bp, Arabidopsis thaliana
  misc_feature (1)..(1073): Ceres Seq. ID no. 14310045
  misc_feature: MA Experiment ID: 20000173 Result: Up-regulated in Transcription
  misc_feature: MA Experiment 20000173 PARAMETER Experiment Name: At_42deg_Heat_P Parameter: Age (day) Value: 14
  misc_feature: MA Experiment 20000173 PARAMETER Experiment Name: At_42deg_Heat_P Parameter: Organism Value: A. thaliana
  misc_feature: MA Experiment 20000173 PARAMETER Experiment Name: At_42deg_Heat_P Parameter: Plant Line Value: WS
  misc_feature: MA Experiment 20000173 PARAMETER Experiment Name: At_42deg_Heat_P Parameter: Temperature (deg C) Value: 42 vs. 22
  misc_feature: MA Experiment 20000173 PARAMETER Experiment Name: At_42deg_Heat_P Parameter: Timepoint (hr) Value: 6
  misc_feature: MA Experiment 20000173 PARAMETER Experiment Name: At_42deg_Heat_P Parameter: Tissue Value: Aerial
  misc_feature: MA Experiment ID: 20000180 Result: Up-regulated in Transcription
  misc_feature: MA Experiment 20000180 PARAMETER Experiment Name: At_Germinating_Seeds_P Parameter: Age (hr) Value: 24 vs. 0
  misc_feature: MA Experiment 20000180 PARAMETER Experiment Name: At_Germinating_Seeds_P Parameter: Tissue Value: Germinating Seeds
aaaaaaaaaaaaaaggtaggaaacgtgggccgaacattatcagaaggattcaagcgaagcaaaatcccaccctttcttctgtgacagagtgtctgtatttgttgtttcccttcaattggagagagtaagcgagtctcttacgcccagagagagagagagagaggcttgtttgttttctctcctctaagaaacaatcagtctcataaagtggcaaagatggttgcagaacgatacacagtcgatttgaataagccacttgtgtttcaggttggtcatcttggcgaagaatatcaggaatggattcatcaacctattgtatgcgttgagggtcctcgttttttcgaaagtgatttttgggagtttttgactcgcacggtttggtgggcaatcccaacaatctggcttccagttgtttgctacgttctttcaatatcggcgagtaagggacttacgtttccccagatcggtttaatagttgcttttggtgtactcacgtggacactgctcgagtacacgcttcatcgcttccttttccacatccaaaccaagagttactgggcaaacactgcacactatcttcttcatggatgccatcacaagcacccacaagacggccttcgtcttgttttccctcctacagcaacagctattctcttggttccactatggaagcttctccatctcctagctactcctgctacagcacctgctattcttggaggcatattgtttggctatgtgatgtatgatattacccattactatctacaccatggtcaacctaaagaaccaacctttaaacatcttaagaaataccacctgaatcatcactttaggattcaggacaaaggatatggaatcacttcctctctatgggacaaagtctttggaacacttcccggtattaaagccgctgcgaagaagagctaaatcggatttctgtttgccatttttcagagtgtcgaaaaactcactgatattgtgtattccaaattcatcaggtgattcaatgactgtttaactacttctgtatacgatctattcaccatatttgaacatatttttagtggttt

SEQ ID NO: 46634 - protein, 237 aa, Arabidopsis thaliana
  peptide (1)..(237): Ceres Seq. ID no. 14310046
  misc_feature (86)..(229): Pfam Name: Fatty acid hydroxylase Pfam Description: Fatty acid hydroxylase
  misc_feature (8)..(236): Homolog of NCBI NO: 6323928 NR Description: Required for the hydroxylation of the very long
  misc_feature (6)..(226): Homolog of NCBI NO: 31200833 NR Description: ENSANGP00000014963 [Anopheles gambiae]
  misc_feature (8)..(226): Homolog of NCBI NO: 32404274 NR Description: hypothetical protein [Neurospora crassa]
  misc_feature (14)..(227): Homolog of NCBI NO: 39589620 NR Description: Hypothetical protein CBG12227 [Caenorhabditis
  misc_feature (8)..(227): Homolog of NCBI NO: 17505701 NR Description: fatty acid hydroxylase (36.3 kD) (1K755)
  misc_feature (8)..(108): Homolog of NCBI NO: 32766618 NR Description: Unknown (protein for IMAGE:6878212) [Xenopus
  misc_feature (90)..(227): Homolog of NCBI NO: 32766618 NR Description: Unknown (protein for IMAGE:6878212) [Xenopus
  misc_feature (1)..(237): Homolog of NCBI NO: 34897078 NR Description: putative fatty acid hydroxylase
  misc_feature (1)..(236): Homolog of NCBI NO: 15226828 NR Description: fatty acid hydroxylase (FAH1) [Arabidopsis
  misc_feature (1)..(237): Homolog of NCBI NO: 15233426 NR Description: fatty acid hydroxylase, putative [Arabidopsis
MVAERYTVDLNKPLVFQVGHLGEEYQEWIHQPIVCVEGPRFFESDFWEFLTRTVWWAIPTIWLPVVCYVLSISASKGLTFPQIGLIVAFGVLTWTLLEYTLHRFLFHIQTKSYWANTAHYLLHGCHHKHPQDGLRLVFPPTATAILLVPLWKLLHLLATPATAPAILGGILFGYVMYDITHYYLHHGQPKEPTFKHLKKYHLNHHFRIQDKGYGITSSLWDKVFGTLPGIKAAAKKS

SEQ ID NO: 46635 - DNA, 597 bp, Arabidopsis thaliana
  misc_feature (1)..(597): Ceres Seq. ID no. 14310069
  misc_feature: MA Experiment ID: 108434 Result: Down-regulated in Transcription
  misc_feature: MA Experiment 108434 PARAMETER Experiment Name: At_Root_Tips_cDNA_P Parameter: Tissue Value: Root Tips
  misc_feature: MA Experiment ID: 108435 Result: Down-regulated in Transcription
  misc_feature: MA Experiment 108435 PARAMETER Experiment Name: At_stm_Mutants_cDNA_P Parameter: Plant Line Value: wt Landsburg vs stm
  misc_feature: MA Experiment 108435 PARAMETER Experiment Name: At_stm_Mutants_cDNA_P Parameter: Tissue Value: Shoot Apical Meristem Region
  misc_feature: MA Experiment ID: 108462 Result: Up-regulated in Transcription
  misc_feature: MA Experiment 108462 PARAMETER Experiment Name: At_Germinating_Seeds_cDNA_P Parameter: Age (day) Value: 2 vs. 0
  misc_feature: MA Experiment 108462 PARAMETER Experiment Name: At_Germinating_Seeds_cDNA_P Parameter: Tissue Value: Germinating Seeds
  misc_feature: MA Experiment ID: 108464 Result: Up-regulated in Transcription
  misc_feature: MA Experiment 108464 PARAMETER Experiment Name: At_Germinating_Seeds_cDNA_P Parameter: Age (day) Value: 4 vs. 0
  misc_feature: MA Experiment 108464 PARAMETER Experiment Name: At_Germinating_Seeds_cDNA_P Parameter: Tissue Value: Germinating Seeds
  misc_feature: MA Experiment ID: 108488 Result: Up-regulated in Transcription
  misc_feature: MA Experiment ID: 108489 Result: Down-regulated in Transcription
  misc_feature: MA Experiment ID: 108595 Result: Down-regulated in Transcription
  misc_feature: MA Experiment 108595 PARAMETER Experiment Name: At_Ler-pi_Ovule_cDNA_P Parameter: Plant Line Value: null
  misc_feature: MA Experiment ID: 20000180 Result: Up-regulated in Transcription
  misc_feature: MA Experiment 20000180 PARAMETER Experiment Name: At_Germinating_Seeds_P Parameter: Age (hr) Value: 24 vs. 0
  misc_feature: MA Experiment 20000180 PARAMETER Experiment Name: At_Germinating_Seeds_P Parameter: Tissue Value: Germinating Seeds
  misc_feature: MA Experiment ID: 20000185 Result: Down-regulated in Transcription
  misc_feature: MA Experiment 20000185 PARAMETER Experiment Name: At_Roots__P Parameter: Age (day) Value: 7 vs. 21
  misc_feature: MA Experiment 20000185 PARAMETER Experiment Name: At_Roots__P Parameter: Organism Value: A. thaliana
  misc_feature: MA Experiment 20000185 PARAMETER Experiment Name: At_Roots__P Parameter: Tissue Value: Roots vs. Whole Plant
  misc_feature: MA Experiment ID: 20000439 Result: Down-regulated in Transcription
  misc_feature: MA Experiment 20000439 PARAMETER Experiment Name: At_Roots__P Parameter: Age (day) Value: 14 vs. 21
  misc_feature: MA Experiment 20000439 PARAMETER Experiment Name: At_Roots__P Parameter: Organism Value: A. thaliana
  misc_feature: MA Experiment 20000439 PARAMETER Experiment Name: At_Roots__P Parameter: Tissue Value: Roots vs. Whole Plant
ggtgagaagagatcgagagaagaatagtttgatcatcttgtgagaaaaataatggctgcttcagtgatgctatcttcggtgacattgaaaccagctggtttcacggtggagaagacggcggctagaggattaccgtcgctcacaagagctcgtccctccttcaaaattgtcgccagtggcgtcaagaagatcaagaccgacaagcccttcggaattaacggcagcatggacttgagggacggcgtcgacgcttccggcagaaagggcaagggatacggtgtttacaagtacgtcgacaagtatggagctaacgtcgatggatacagtcctatttacaacgagaacgagtggtcagcgagtggtgacgtgtacaagggaggagtcaccggattggcaatttgggcggtaactctcgccggaattcttgccggaggtgctcttcttgtgtacaacacaagtgctttggctcagtaaatcttaaagttgttagcgcatgtgtaatcatgtttctataaatgtttctgtgttgttctctttctctctaatgttgtaaaactcagacatactttgaatttataagacttctagtgtttgtat

SEQ ID NO: 46636 - protein, 140 aa, Arabidopsis thaliana; identical to SEQ ID NO: 39807
  peptide (1)..(140): Ceres Seq. ID no. 14310070
  misc_feature (42)..(140): Pfam Name: Photosystem II 10 kDa polypeptide PsbR Pfam Description: Photosystem II 10 kDa polypeptide PsbR
  misc_feature (1)..(140): Homolog of NCBI NO: 33694227 NR Description: 10 kDa photosystem II polypeptide [Trifolium
  misc_feature (1)..(140): Homolog of NCBI NO: 131400 NR Description: Photosystem II 10 kDa polypeptide, chloroplast
  misc_feature (10)..(140): Homolog of NCBI NO: 1418984 NR Description: photosystem II 10 kD polypeptide [Lycopersicon
  misc_feature (1)..(140): Homolog of NCBI NO: 3914472 NR Description: Photosystem II 10 kDa polypeptide, chloroplast
  misc_feature (3)..(140): Homolog of NCBI NO: 21491 NR Description: unnamed protein product [Solanum tuberosum]
  misc_feature (3)..(140): Homolog of NCBI NO: 3914471 NR Description: Photosystem II 10 kDa polypeptide, chloroplast
  misc_feature (3)..(140): Homolog of NCBI NO: 131399 NR Description: Photosystem II 10 kDa polypeptide, chloroplast
  misc_feature (4)..(140): Homolog of NCBI NO: 28207611 NR Description: photosystem II 10kDa polypeptide [Brassica rapa
  misc_feature (1)..(140): Homolog of NCBI NO: 1346871 NR Description: Photosystem II 10 kDa polypeptide, chloroplast
  misc_feature (1)..(140): Homolog of NCBI NO: 15219268 NR Description: photosystem II polypeptide -related [Arabidopsis

SEQ ID NO: 46637 - protein, 135 aa, Arabidopsis thaliana; identical to SEQ ID NO: 39808
  peptide (1)..(135): Ceres Seq. ID no. 14310071
  misc_feature (37)..(135): Pfam Name: Photosystem II 10 kDa polypeptide PsbR Pfam Description: Photosystem II 10 kDa polypeptide PsbR
  misc_feature (1)..(135): Homolog of NCBI NO: 33694227 NR Description: 10 kDa photosystem II polypeptide [Trifolium
  misc_feature (1)..(135): Homolog of NCBI NO: 131400 NR Description: Photosystem II 10 kDa polypeptide, chloroplast
  misc_feature (5)..(135): Homolog of NCBI NO: 1418984 NR Description: photosystem II 10 kD polypeptide [Lycopersicon
  misc_feature (1)..(135): Homolog of NCBI NO: 3914472 NR Description: Photosystem II 10 kDa polypeptide, chloroplast
  misc_feature (1)..(135): Homolog of NCBI NO: 21491 NR Description: unnamed protein product [Solanum tuberosum]
  misc_feature (1)..(135): Homolog of NCBI NO: 3914471 NR Description: Photosystem II 10 kDa polypeptide, chloroplast
  misc_feature (1)..(135): Homolog of NCBI NO: 131399 NR Description: Photosystem II 10 kDa polypeptide, chloroplast
  misc_feature (1)..(135): Homolog of NCBI NO: 28207611 NR Description: photosystem II 10kDa polypeptide [Brassica rapa
  misc_feature (1)..(135): Homolog of NCBI NO: 1346871 NR Description: Photosystem II 10 kDa polypeptide, chloroplast
  misc_feature (1)..(135): Homolog of NCBI NO: 15219268 NR Description: photosystem II polypeptide -related [Arabidopsis

SEQ ID NO: 46638 - protein, 82 aa, Arabidopsis thaliana; identical to SEQ ID NO: 39809
  peptide (1)..(82): Ceres Seq. ID no. 14310072
  misc_feature (1)..(82): Pfam Name: Photosystem II 10 kDa polypeptide PsbR Pfam Description: Photosystem II 10 kDa polypeptide PsbR
  misc_feature (1)..(82): Homolog of NCBI NO: 33694227 NR Description: 10 kDa photosystem II polypeptide [Trifolium
  misc_feature (1)..(82): Homolog of NCBI NO: 131400 NR Description: Photosystem II 10 kDa polypeptide, chloroplast
  misc_feature (1)..(82): Homolog of NCBI NO: 1418984 NR Description: photosystem II 10 kD polypeptide [Lycopersicon
  misc_feature (1)..(82): Homolog of NCBI NO: 3914472 NR Description: Photosystem II 10 kDa polypeptide, chloroplast
  misc_feature (1)..(82): Homolog of NCBI NO: 21491 NR Description: unnamed protein product [Solanum tuberosum]
  misc_feature (1)..(82): Homolog of NCBI NO: 3914471 NR Description: Photosystem II 10 kDa polypeptide, chloroplast
  misc_feature (1)..(82): Homolog of NCBI NO: 131399 NR Description: Photosystem II 10 kDa polypeptide, chloroplast
  misc_feature (1)..(82): Homolog of NCBI NO: 28207611 NR Description: photosystem II 10kDa polypeptide [Brassica rapa
  misc_feature (1)..(82): Homolog of NCBI NO: 1346871 NR Description: Photosystem II 10 kDa polypeptide, chloroplast
  misc_feature (1)..(82): Homolog of NCBI NO: 15219268 NR Description: photosystem II polypeptide -related [Arabidopsis

SEQ ID NO: 46639 - DNA, 1670 bp, Arabidopsis thaliana
  misc_feature (1)..(1670): Ceres Seq. ID no. 12575336
  misc_feature: MA Experiment ID: 20000184 Result: Up-regulated in Transcription
  misc_feature: MA Experiment 20000184 PARAMETER Experiment Name: At_Shoots__P Parameter: Age (day) Value: 7
  misc_feature: MA Experiment 20000184 PARAMETER Experiment Name: At_Shoots__P Parameter: Tissue Value: Shoots vs. Whole Plant
  misc_feature: MA Experiment ID: 20000213 Result: Up-regulated in Transcription
  misc_feature: MA Experiment 20000213 PARAMETER Experiment Name: At_4deg_Cold_P Parameter: Timepoint (hr) Value: 2
  misc_feature: MA Experiment ID: 20000234 Result: Up-regulated in Transcription
  misc_feature: MA Experiment 20000234 PARAMETER Experiment Name: At_Siliques_P Parameter: Age (day) Value: 21
  misc_feature: MA Experiment 20000234 PARAMETER Experiment Name: At_Siliques_P Parameter: Organism Value: A. thaliana
  misc_feature: MA Experiment 20000234 PARAMETER Experiment Name: At_Siliques_P Parameter: Plant Line Value: WS
  misc_feature: MA Experiment 20000234 PARAMETER Experiment Name: At_Siliques_P Parameter: Tissue Value: Less Than 5mm Siliques vs. Whole Plant
  misc_feature: MA Experiment ID: 20000235 Result: Up-regulated in Transcription
  misc_feature: MA Experiment 20000235 PARAMETER Experiment Name: At_Siliques_P Parameter: Age (day) Value: 21
  misc_feature: MA Experiment 20000235 PARAMETER Experiment Name: At_Siliques_P Parameter: Organism Value: A. thaliana
  misc_feature: MA Experiment 20000235 PARAMETER Experiment Name: At_Siliques_P Parameter: Plant Line Value: WS
  misc_feature: MA Experiment 20000235 PARAMETER Experiment Name: At_Siliques_P Parameter: Tissue Value: 5-10mm Siliques vs. Whole Plant
  misc_feature: MA Experiment ID: 20000265 Result: Up-regulated in Transcription
  misc_feature: MA Experiment 20000265 PARAMETER Experiment Name: At_Open_Flower_P Parameter: Age (day) Value: 21
  misc_feature: MA Experiment 20000265 PARAMETER Experiment Name: At_Open_Flower_P Parameter: Plant Line Value: WS
  misc_feature: MA Experiment 20000265 PARAMETER Experiment Name: At_Open_Flower_P Parameter: Tissue Value: Closed Flower vs. Whole Plant
  misc_feature: MA Experiment ID: 20000436 Result: Down-regulated in Transcription
  misc_feature: MA Experiment 20000436 PARAMETER Experiment Name: At_Drought_P Parameter: Age (day) Value: 7
  misc_feature: MA Experiment 20000436 PARAMETER Experiment Name: At_Drought_P Parameter: Organism Value: A. thaliana
  misc_feature: MA Experiment 20000436 PARAMETER Experiment Name: At_Drought_P Parameter: Plant Line Value: WS
  misc_feature: MA Experiment 20000436 PARAMETER Experiment Name: At_Drought_P Parameter: Timepoint (hr) Value: 12
  misc_feature: MA Experiment 20000436 PARAMETER Experiment Name: At_Drought_P Parameter: Tissue Value: Whole Plant
  misc_feature: MA Experiment 20000436 PARAMETER Experiment Name: At_Drought_P Parameter: Treatment Value: Drought vs. No Drought
  misc_feature: MA Experiment ID: 20000437 Result: Down-regulated in Transcription
  misc_feature: MA Experiment 20000437 PARAMETER Experiment Name: At_Drought_P Parameter: Age (day) Value: 8
  misc_feature: MA Experiment 20000437 PARAMETER Experiment Name: At_Drought_P Parameter: Organism Value: A. thaliana
  misc_feature: MA Experiment 20000437 PARAMETER Experiment Name: At_Drought_P Parameter: Plant Line Value: WS
  misc_feature: MA Experiment 20000437 PARAMETER Experiment Name: At_Drought_P Parameter: Timepoint (hr) Value: 24
  misc_feature: MA Experiment 20000437 PARAMETER Experiment Name: At_Drought_P Parameter: Tissue Value: Whole Plant
  misc_feature: MA Experiment 20000437 PARAMETER Experiment Name: At_Drought_P Parameter: Treatment Value: Drought vs. No Drought
  misc_feature: MA Experiment ID: 20000439 Result: Down-regulated in Transcription
  misc_feature: MA Experiment 20000439 PARAMETER Experiment Name: At_Roots__P Parameter: Age (day) Value: 14 vs. 21
  misc_feature: MA Experiment 20000439 PARAMETER Experiment Name: At_Roots__P Parameter: Organism Value: A. thaliana
  misc_feature: MA Experiment 20000439 PARAMETER Experiment Name: At_Roots__P Parameter: Tissue Value: Roots vs. Whole Plant
  misc_feature: MA Experiment ID: 20000527 Result: Up-regulated in Transcription
  misc_feature: MA Experiment 20000527 PARAMETER Experiment Name: At_10percent_PEG_P Parameter: Age (day) Value: 20
  misc_feature: MA Experiment 20000527 PARAMETER Experiment Name: At_10percent_PEG_P Parameter: Organism Value: A. thaliana
  misc_feature: MA Experiment 20000527 PARAMETER Experiment Name: At_10percent_PEG_P Parameter: Plant Line Value: WS
  misc_feature: MA Experiment 20000527 PARAMETER Experiment Name: At_10percent_PEG_P Parameter: Timepoint (day) Value: 20
  misc_feature: MA Experiment 20000527 PARAMETER Experiment Name: At_10percent_PEG_P Parameter: Tissue Value: Whole Plant
  misc_feature: MA Experiment 20000527 PARAMETER Experiment Name: At_10percent_PEG_P Parameter: Treatment Value: 10percent PEG vs. No Treatment
  misc_feature: MA Experiment ID: 20000709 Result: Up-regulated in Transcription
  misc_feature: MA Experiment 20000709 PARAMETER Experiment Name: At_15mM_NH4NO3_L-to-H_P Parameter: Age (hr) Value: 14
  misc_feature: MA Experiment 20000709 PARAMETER Experiment Name: At_15mM_NH4NO3_L-to-H_P Parameter: Organism Value: A. thaliana
  misc_feature: MA Experiment 20000709 PARAMETER Experiment Name: At_15mM_NH4NO3_L-to-H_P Parameter: Plant Line Value: WS
  misc_feature: MA Experiment 20000709 PARAMETER Experiment Name: At_15mM_NH4NO3_L-to-H_P Parameter: Timepoint (hr) Value: 4
  misc_feature: MA Experiment 20000709 PARAMETER Experiment Name: At_15mM_NH4NO3_L-to-H_P Parameter: Tissue Value: Aerial
  misc_feature: MA Experiment 20000709 PARAMETER Experiment Name: At_15mM_NH4NO3_L-to-H_P Parameter: Treatment Value: 15mM NH4NO3 vs. 30mM Mannitol
  misc_feature: MA Experiment ID: 20001248 Result: Down-regulated in Transcription
  misc_feature: MA Experiment 20001248 PARAMETER Experiment Name: At_Far-red-induction_P Parameter: Age (day) Value: 7
  misc_feature: MA Experiment 20001248 PARAMETER Experiment Name: At_Far-red-induction_P Parameter: Light Value: Far-red vs. White
  misc_feature: MA Experiment 20001248 PARAMETER Experiment Name: At_Far-red-induction_P Parameter: Organism Value: A. thaliana
  misc_feature: MA Experiment 20001248 PARAMETER Experiment Name: At_Far-red-induction_P Parameter: Plant Line Value: Columbia
  misc_feature: MA Experiment 20001248 PARAMETER Experiment Name: At_Far-red-induction_P Parameter: Timepoint (hr) Value: 4
  misc_feature: MA Experiment 20001248 PARAMETER Experiment Name: At_Far-red-induction_P Parameter: Tissue Value: Whole Plant
  misc_feature: MA Experiment ID: 20001450 Result: Down-regulated in Transcription
  misc_feature: MA Experiment 20001450 PARAMETER Experiment Name: At_Far-red-induction_P Parameter: Age (day) Value: 7
  misc_feature: MA Experiment 20001450 PARAMETER Experiment Name: At_Far-red-induction_P Parameter: Light Value: Far-red vs. White
  misc_feature: MA Experiment 20001450 PARAMETER Experiment Name: At_Far-red-induction_P Parameter: Organism Value: A. thaliana
  misc_feature: MA Experiment 20001450 PARAMETER Experiment Name: At_Far-red-induction_P Parameter: Plant Line Value: Columbia
  misc_feature: MA Experiment 20001450 PARAMETER Experiment Name: At_Far-red-induction_P Parameter: Timepoint (hr) Value: 8
  misc_feature: MA Experiment 20001450 PARAMETER Experiment Name: At_Far-red-induction_P Parameter: Tissue Value: Whole Plant
  misc_feature: MA Experiment ID: 20001451 Result: Down-regulated in Transcription
  misc_feature: MA Experiment 20001451 PARAMETER Experiment Name: At_Far-red-induction_P Parameter: Age (day) Value: 7
  misc_feature: MA Experiment 20001451 PARAMETER Experiment Name: At_Far-red-induction_P Parameter: Light Value: Far-red vs. White
  misc_feature: MA Experiment 20001451 PARAMETER Experiment Name: At_Far-red-induction_P Parameter: Organism Value: A. thaliana
  misc_feature: MA Experiment 20001451 PARAMETER Experiment Name: At_Far-red-induction_P Parameter: Plant Line Value: Columbia
  misc_feature: MA Experiment 20001451 PARAMETER Experiment Name: At_Far-red-induction_P Parameter: Timepoint (hr) Value: 24
  misc_feature: MA Experiment 20001451 PARAMETER Experiment Name: At_Far-red-induction_P Parameter: Tissue Value: Whole Plant
  misc_feature: MA Experiment ID: 20001555 Result: Down-regulated in Transcription
  misc_feature: MA Experiment 20001555 PARAMETER Experiment Name: At_Drought_Soil_Dry_P Parameter: Age (day) Value: 24
  misc_feature: MA Experiment 20001555 PARAMETER Experiment Name: At_Drought_Soil_Dry_P Parameter: Organism Value: A. thaliana
  misc_feature: MA Experiment 20001555 PARAMETER Experiment Name: At_Drought_Soil_Dry_P Parameter: Plant Line Value: WS
  misc_feature: MA Experiment 20001555 PARAMETER Experiment Name: At_Drought_Soil_Dry_P Parameter: Post Timepoint (hr) Value: None
  misc_feature: MA Experiment 20001555 PARAMETER Experiment Name: At_Drought_Soil_Dry_P Parameter: Post-Treatment Value: None
  misc_feature: MA Experiment 20001555 PARAMETER Experiment Name: At_Drought_Soil_Dry_P Parameter: Timepoint (day) Value: 10
  misc_feature: MA Experiment 20001555 PARAMETER Experiment Name: At_Drought_Soil_Dry_P Parameter: Treatment Value: Drought vs. No Drought
  misc_feature: MA Experiment ID: 20001757 Result: Up-regulated in Transcription
  misc_feature: MA Experiment 20001757 PARAMETER Experiment Name: At_50mM_NH4NO3_L-to-H_P Parameter: Timepoint (hr) Value: 6
  misc_feature: MA Experiment 20001757 PARAMETER Experiment Name: At_50mM_NH4NO3_L-to-H_P Parameter: Tissue Value: Leaf
  misc_feature: MA Experiment 20001757 PARAMETER Experiment Name: At_50mM_NH4NO3_L-to-H_P Parameter: Treatment Value: 50mM NH4NO3 vs 100mM Mannitol
  misc_feature: MA Experiment ID: 20001904 Result: Down-regulated in Transcription
  misc_feature: MA Experiment 20001904 PARAMETER Experiment Name: At_Drought_Reproduction_P Parameter: Age (day) Value: 37
  misc_feature: MA Experiment 20001904 PARAMETER Experiment Name: At_Drought_Reproduction_P Parameter: Organism Value: A. thaliana
  misc_feature: MA Experiment 20001904 PARAMETER Experiment Name: At_Drought_Reproduction_P Parameter: Plant Line Value: WS
  misc_feature: MA Experiment 20001904 PARAMETER Experiment Name: At_Drought_Reproduction_P Parameter: Timepoint (day) Value: 7
  misc_feature: MA Experiment 20001904 PARAMETER Experiment Name: At_Drought_Reproduction_P Parameter: Tissue Value: Rosettes
  misc_feature: MA Experiment 20001904 PARAMETER Experiment Name: At_Drought_Reproduction_P Parameter: Treatment Value: Drought vs. No Drought
  misc_feature: MA Experiment ID: 20001905 Result: Down-regulated in Transcription
  misc_feature: MA Experiment 20001905 PARAMETER Experiment Name: At_Drought_Reproduction_P Parameter: Age (day) Value: 40
  misc_feature: MA Experiment 20001905 PARAMETER Experiment Name: At_Drought_Reproduction_P Parameter: Organism Value: A. thaliana
  misc_feature: MA Experiment 20001905 PARAMETER Experiment Name: At_Drought_Reproduction_P Parameter: Plant Line Value: WS
  misc_feature: MA Experiment 20001905 PARAMETER Experiment Name: At_Drought_Reproduction_P Parameter: Timepoint (day) Value: 10
  misc_feature: MA Experiment 20001905 PARAMETER Experiment Name: At_Drought_Reproduction_P Parameter: Tissue Value: Rosettes
  misc_feature: MA Experiment 20001905 PARAMETER Experiment Name: At_Drought_Reproduction_P Parameter: Treatment Value: Drought vs. No Drought
atatagaaatagccttcgagctagaaaagcacatagaagactgattacgagagatagacgacgacgacaaggatcaaccaacacagaatccatctctctatctctctacgttatctcttcattcagagagtgcaaatagaacgacagagactttttcctcttttcttcttgggaagaggctccaatggcgagctcggttttatcagaatgtggttttagacctctccccagattctaccctaaacacacaacctcttttgcctctaaccctaaacccactttcaaattcaatccaccacttaaacctccttcttctcttctcaattcccgatatggattctactctaaaaccaggaactgggcattgaatgtggcaacacctttaacaactcttcagtctccatccgaggaagacacggagagattcgacccaggtgcgcctcctcccttcaatttggcggatataagagcagccatacctaagcattgttgggttaagaatccatggatgtctatgagttatgttgtcagagatgttgctatcgtctttggattggctgctgttgctgcttacttcaacaattggcttctctggcctctctactggttcgctcaaggaaccatgttctgggctctctttgtccttggccatgactgcggacatggtagcttctcgaatgatccgaggctgaacagtgtggctggtcatcttcttcattcctcaattctggtcccttaccatggctggaggattagccacagaactcaccaccagaaccatggtcatgtcgagaatgacgaatcatggcatcctttgcctgaaagcatctacaagaatttggaaaagacgactcaaatgtttaggtttacactgccttttccaatgctcgcataccctttctacttgtggaacagaagtccagggaaacaaggttctcattatcatccggacagtgacttgtttcttccaaaagagaagaaagatgttctgacatcaactgcctgttggactgcaatggctgctttgcttgtttgtctcaactttgtcatgggtccaatccagatgctcaaactatatggcatcccttattggatatttgtaatgtggttggacttcgtcacttacttgcaccaccatggacatgaagacaagctcccttggtatcgtggaaaggaatggagttacctgagaggagggctcacaacattagatcgtgactacggatggatcaataacatccaccacgatattggaactcatgtgatacatcatcttttcccgcagatcccacattatcatctagtagaagcaacagaagcagctaaaccagtactaggaaagtactacagagaaccgaaaaactctggacctctgccacttcacttactgggaagcctcataaagagtatgaaacaagaccatttcgtaagcgatacaggagatgtcgtgtactatgaggcagatccaaaactcaatggacaaagaacatgaggacatactgcagtgaaccaggcagacaagttacataaattcatcttggcccattcattatgttctttttgttttggtgtaaagccttttcgagattaaaaaagcattaatttgtagaaacctgtggtaaaactctcgatcaaatgaaataagatatgatcagtagaatacatttcat

SEQ ID NO: 46640 - protein, 435 aa, Arabidopsis thaliana
  peptide (1)..(435): Ceres Seq. ID no. 12575337
  misc_feature (140)..(384): Pfam Name: Fatty acid desaturase Pfam Description: Fatty acid desaturase
  misc_feature (1)..(432): Homolog of NCBI NO: 1345970 NR Description: Omega-3 fatty acid desaturase, chloroplast
  misc_feature (33)..(433): Homolog of NCBI NO: 1345968 NR Description: Omega-3 fatty acid desaturase, chloroplast
  misc_feature (1)..(432): Homolog of NCBI NO: 7433276 NR Description: omega-3 fatty acid desaturase (EC 1.14.99.-) FAD7
  misc_feature (1)..(433): Homolog of NCBI NO: 14488094 NR Description: AT3g11170/F9F8_4 [Arabidopsis thaliana]
  misc_feature (2)..(80): Homolog of NCBI NO: 1345969 NR Description: Omega-3 fatty acid desaturase, chloroplast
  misc_feature (54)..(432): Homolog of NCBI NO: 1345969 NR Description: Omega-3 fatty acid desaturase, chloroplast
  misc_feature (1)..(433): Homolog of NCBI NO: 15229692 NR Description: omega-3 fatty acid desaturase, chloroplast
  misc_feature (1)..(433): Homolog of NCBI NO: 7378667 NR Description: chloroplast omega-3 fatty acid desaturase
  misc_feature (1)..(435): Homolog of NCBI NO: 17064784 NR Description: temperature-sensitive omega-3 fatty acid
  misc_feature (1)..(435): Homolog of NCBI NO: 15239175 NR Description: omega-3 fatty acid desaturase, chloroplast
MASSVLSECGFRPLPRFYPKHTTSFASNPKPTFKFNPPLKPPSSLLNSRYGFYSKTRNWALNVATPLTTLQSPSEEDTERFDPGAPPPFNLADIRAAIPKHCWVKNPWMSMSYVVRDVAIVFGLAAVAAYFNNWLLWPLYWFAQGTMFWALFVLGHDCGHGSFSNDPRLNSVAGHLLHSSILVPYHGWRISHRTHHQNHGHVENDESWHPLPESIYKNLEKTTQMFRFTLPFPMLAYPFYLWNRSPGKQGSHYHPDSDLFLPKEKKDVLTSTACWTAMAALLVCLNFVMGPIQMLKLYGIPYWIFVMWLDFVTYLHHHGHEDKLPWYRGKEWSYLRGGLTTLDRDYGWINNIHHDIGTHVIHHLFPQIPHYHLVEATEAAKPVLGKYYREPKNSGPLPLHLLGSLIKSMKQDHFVSDTGDVVYYEADPKLNGQRT

SEQ ID NO: 46641 - protein, 327 aa, Arabidopsis thaliana
  peptide (1)..(327): Ceres Seq. ID no. 12575338
  misc_feature (32)..(276): Pfam Name: Fatty acid desaturase Pfam Description: Fatty acid desaturase
  misc_feature (1)..(323): Homolog of NCBI NO: 1754795 NR Description: omega-3 fatty acid desaturase
  misc_feature (1)..(324): Homolog of NCBI NO: 1345970 NR Description: Omega-3 fatty acid desaturase, chloroplast
  misc_feature (1)..(325): Homolog of NCBI NO: 1345968 NR Description: Omega-3 fatty acid desaturase, chloroplast
  misc_feature (1)..(324): Homolog of NCBI NO: 7433276 NR Description: omega-3 fatty acid desaturase (EC 1.14.99.-) FAD7
  misc_feature (1)..(325): Homolog of NCBI NO: 14488094 NR Description: AT3g11170/F9F8_4 [Arabidopsis thaliana]
  misc_feature (1)..(324): Homolog of NCBI NO: 1345969 NR Description: Omega-3 fatty acid desaturase, chloroplast
  misc_feature (1)..(325): Homolog of NCBI NO: 15229692 NR Description: omega-3 fatty acid desaturase, chloroplast
  misc_feature (1)..(325): Homolog of NCBI NO: 7378667 NR Description: chloroplast omega-3 fatty acid desaturase
  misc_feature (1)..(327): Homolog of NCBI NO: 17064784 NR Description: temperature-sensitive omega-3 fatty acid
  misc_feature (1)..(327): Homolog of NCBI NO: 15239175 NR Description: omega-3 fatty acid desaturase, chloroplast
MSMSYVVRDVAIVFGLAAVAAYFNNWLLWPLYWFAQGTMFWALFVLGHDCGHGSFSNDPRLNSVAGHLLHSSILVPYHGWRISHRTHHQNHGHVENDESWHPLPESIYKNLEKTTQMFRFTLPFPMLAYPFYLWNRSPGKQGSHYHPDSDLFLPKEKKDVLTSTACWTAMAALLVCLNFVMGPIQMLKLYGIPYWIFVMWLDFVTYLHHHGHEDKLPWYRGKEWSYLRGGLTTLDRDYGWINNIHHDIGTHVIHHLFPQIPHYHLVEATEAAKPVLGKYYREPKNSGPLPLHLLGSLIKSMKQDHFVSDTGDVVYYEADPKLNGQRT

SEQ ID NO: 46642 - protein, 325 aa, Arabidopsis thaliana
  peptide (1)..(325): Ceres Seq. ID no. 12575339
  misc_feature (30)..(274): Pfam Name: Fatty acid desaturase Pfam Description: Fatty acid desaturase
  misc_feature (1)..(321): Homolog of NCBI NO: 1754795 NR Description: omega-3 fatty acid desaturase
  misc_feature (1)..(322): Homolog of NCBI NO: 1345970 NR Description: Omega-3 fatty acid desaturase, chloroplast
  misc_feature (1)..(323): Homolog of NCBI NO: 1345968 NR Description: Omega-3 fatty acid desaturase, chloroplast
  misc_feature (1)..(322): Homolog of NCBI NO: 7433276 NR Description: omega-3 fatty acid desaturase (EC 1.14.99.-) FAD7
  misc_feature (1)..(323): Homolog of NCBI NO: 14488094 NR Description: AT3g11170/F9F8_4 [Arabidopsis thaliana]
  misc_feature (1)..(322): Homolog of NCBI NO: 1345969 NR Description: Omega-3 fatty acid desaturase, chloroplast
  misc_feature (1)..(323): Homolog of NCBI NO: 15229692 NR Description: omega-3 fatty acid desaturase, chloroplast
  misc_feature (1)..(323): Homolog of NCBI NO: 7378667 NR Description: chloroplast omega-3 fatty acid desaturase
  misc_feature (1)..(325): Homolog of NCBI NO: 17064784 NR Description: temperature-sensitive omega-3 fatty acid
  misc_feature (1)..(325): Homolog of NCBI NO: 15239175 NR Description: omega-3 fatty acid desaturase, chloroplast
MSYVVRDVAIVFGLAAVAAYFNNWLLWPLYWFAQGTMFWALFVLGHDCGHGSFSNDPRLNSVAGHLLHSSILVPYHGWRISHRTHHQNHGHVENDESWHPLPESIYKNLEKTTQMFRFTLPFPMLAYPFYLWNRSPGKQGSHYHPDSDLFLPKEKKDVLTSTACWTAMAALLVCLNFVMGPIQMLKLYGIPYWIFVMWLDFVTYLHHHGHEDKLPWYRGKEWSYLRGGLTTLDRDYGWINNIHHDIGTHVIHHLFPQIPHYHLVEATEAAKPVLGKYYREPKNSGPLPLHLLGSLIKSMKQDHFVSDTGDVVYYEADPKLNGQRT

SEQ ID NO: 46643 - DNA, 1970 bp, Arabidopsis thaliana
  misc_feature (1)..(1970): Ceres Seq. ID no. 14310093
  misc_feature: MA Experiment ID: 20000314 Result: Down-regulated in Transcription
  misc_feature: MA Experiment 20000314 PARAMETER Experiment Name: At_14day_Shoots-Roots_Sub_P Parameter: Age (day) Value: 14
  misc_feature: MA Experiment 20000314 PARAMETER Experiment Name: At_14day_Shoots-Roots_Sub_P Parameter: Organism Value: A. thaliana
  misc_feature: MA Experiment 20000314 PARAMETER Experiment Name: At_14day_Shoots-Roots_Sub_P Parameter: Plant Line Value: WS
  misc_feature: MA Experiment 20000314 PARAMETER Experiment Name: At_14day_Shoots-Roots_Sub_P Parameter: Tissue Value: Roots vs. Whole Plant
  misc_feature: MA Experiment ID: 20000315 Result: Down-regulated in Transcription
  misc_feature: MA Experiment 20000315 PARAMETER Experiment Name: At_14day_Shoots-Roots_Sub_P Parameter: Age (day) Value: 14
  misc_feature: MA Experiment 20000315 PARAMETER Experiment Name: At_14day_Shoots-Roots_Sub_P Parameter: Organism Value: A. thaliana
  misc_feature: MA Experiment 20000315 PARAMETER Experiment Name: At_14day_Shoots-Roots_Sub_P Parameter: Plant Line Value: WS
  misc_feature: MA Experiment 20000315 PARAMETER Experiment Name: At_14day_Shoots-Roots_Sub_P Parameter: Tissue Value: Shoots vs. Whole Plant
  misc_feature: MA Experiment ID: 20000329 Result: Down-regulated in Transcription
  misc_feature: MA Experiment 20000329 PARAMETER Experiment Name: At_4deg_Cold_Sub_P Parameter: Age (day) Value: 14
  misc_feature: MA Experiment 20000329 PARAMETER Experiment Name: At_4deg_Cold_Sub_P Parameter: Organism Value: A. thaliana
  misc_feature: MA Experiment 20000329 PARAMETER Experiment Name: At_4deg_Cold_Sub_P Parameter: Plant Line Value: WS
  misc_feature: MA Experiment 20000329 PARAMETER Experiment Name: At_4deg_Cold_Sub_P Parameter: Temperature (deg C) Value: 4 vs. 22
  misc_feature: MA Experiment 20000329 PARAMETER Experiment Name: At_4deg_Cold_Sub_P Parameter: Timepoint (hr) Value: 6
  misc_feature: MA Experiment 20000329 PARAMETER Experiment Name: At_4deg_Cold_Sub_P Parameter: Tissue Value: Aerial
gaatggaaaaaaaaaacacagatttcaaacactcgagagtcaagagtctcagacccacccagcttctggtttcgtttcgccgtcgcgcacggctgaacatatctgctatatcggagattagtgaaggttagttactattgattaaaggtttcataatttggggctaatctctctgcaaggtgacgagaaaatccattattcccttcccaaggtttgtcctctgaagatataaagtctcaatctttggataagaaagttcaaatggaaaattggaaacttttcttcagttgaatgaatgattgagctgaagaaaccaaagctagaatggggcaaagttcattgtcatggggtccctagaatattcgaatctatgatccttttggtgtaaagtattagtcaagttgagagatatttttaacattttgtggtcactatcgatgtcttggagttgattgcttctaaacccactttaacttgtgagagagtttctaagaatctggctctggatatcaaataatcttatcatgagagaagagacagtgtcttggaagtactttaaaagagatgttgttccgttcactgcgatgatcgctatagagtgtacaacggttggatccagcatactgtataaagctgctaccttgagaggatttagcttttatgtctttgtgttttacgcttatgttggtgctacacttgtccttcttctactttcacttatctttggaaggtcgagaagtttgcctacagccaagtcttctcttttcttcaagattttcttacttgcgcttctcgggctcacgtcgcgggtagctggttgtaaaggtatagaatatagttccccaactctttcctctgctatcagcaatcttacaccagctttcaccttcatccttgccatcttcttcaggttccactttctcctaaactgggtgattccactcttaaccatacaaaagatatgattttcagacagtaacagtcaatatgaaatgatatcgttgtctgtgaattatggagtagttgtataagtatgagaaatgttggatagatatgaggtttgtttgtaactcttaactttggtgacttgttctgcttcctggggtgactcgtaaaggatggaacaagtgatgttaagaagctctgcaactcaggctaaaatcattggcacaatagtttctatatctggtgctctggttattgttctgtataaaggcccaaaacttcttgttgctgcatcgtttacttcattcgagtcaagttggataattggaggccttttgctcggtctgcagtttttgcttctttcagtctggtttattcttcagactcatatcatggagatataccctgaagaaatagccgtagtcttctgctacaacttatgcgcaactctaatctcagggacagtatgtctacttgtagaaaaagacttgaattcttggcagcttaaaccgggtttctccctcgcttcagtcatatactcgggactctttgatacatcattgggctcagttatccacacatggggtctccatgtgaagggtccagtctacatatccttgttcaagccgctgtctatcgcaattgcagtcgccatggctgctatattcctcggcgacacacttcatcttgggagtgtgattggataagtgatattgagctttgggttttacactgtgatttggggcaaagcaagagaggattcaaccaaaacagtaagtgattctgagcaatcacttttattgccttcacacgacagagaagaagattgaaaccttgtcatgaaaatatgttggagacaagtgtaatcgttttcttattttattcataattatggtcccattagatgatgatgatccctatttatcttgtgaagatcttatgacttgtacaaaaaaaatctaacatgatacattgaaatgtgaaaaatgatatacttatttgttgagaaaatgataatatttctt

SEQ ID NO: 46644 - protein, 177 aa, Arabidopsis thaliana
  peptide (1)..(177): Ceres Seq. ID no. 14310094
  misc_feature (1)..(124): Homolog of NCBI NO: 15242614 NR Description: nodulin MtN21 family protein [Arabidopsis
  misc_feature (1)..(177): Homolog of NCBI NO: 26449991 NR Description: unknown protein [Arabidopsis thaliana]
  misc_feature (1)..(177): Homolog of NCBI NO: 10177510 NR Description: nodulin-like protein [Arabidopsis thaliana]
  misc_feature (1)..(63): Homolog of NCBI NO: 7485048 NR Description: hypothetical protein - Arabidopsis thaliana
  misc_feature (93)..(177): Homolog of NCBI NO: 7485048 NR Description: hypothetical protein - Arabidopsis thaliana
  misc_feature (1)..(177): Homolog of NCBI NO: 10177511 NR Description: nodulin-like protein [Arabidopsis thaliana]
  misc_feature (1)..(177): Homolog of NCBI NO: 15242612 NR Description: nodulin MtN21-related [Arabidopsis thaliana]
  misc_feature (1)..(63): Homolog of NCBI NO: 18414474 NR Description: nodulin MtN21 - related [Arabidopsis thaliana]
  misc_feature (93)..(177): Homolog of NCBI NO: 18414474 NR Description: nodulin MtN21 - related [Arabidopsis thaliana]
  misc_feature (1)..(177): Homolog of NCBI NO: 19347832 NR Description: unknown protein [Arabidopsis thaliana]
MEQVMLRSSATQAKIIGTIVSISGALVIVLYKGPKLLVAASFTSFESSWIIGGLLLGLQFLLLSVWFILQTHIMEIYPEEIAVVFCYNLCATLISGTVCLLVEKDLNSWQLKPGFSLASVIYSGLFDTSLGSVIHTWGLHVKGPVYISLFKPLSIAIAVAMAAIFLGDTLHLGSVIG

SEQ ID NO: 46645 - protein, 173 aa, Arabidopsis thaliana
  peptide (1)..(173): Ceres Seq. ID no. 14310095
  misc_feature (1)..(120): Homolog of NCBI NO: 15242614 NR Description: nodulin MtN21 family protein [Arabidopsis
  misc_feature (1)..(173): Homolog of NCBI NO: 26449991 NR Description: unknown protein [Arabidopsis thaliana]
  misc_feature (1)..(173): Homolog of NCBI NO: 10177510 NR Description: nodulin-like protein [Arabidopsis thaliana]
  misc_feature (1)..(59): Homolog of NCBI NO: 7485048 NR Description: hypothetical protein - Arabidopsis thaliana
  misc_feature (89)..(173): Homolog of NCBI NO: 7485048 NR Description: hypothetical protein - Arabidopsis thaliana
  misc_feature (1)..(173): Homolog of NCBI NO: 10177511 NR Description: nodulin-like protein [Arabidopsis thaliana]
  misc_feature (1)..(173): Homolog of NCBI NO: 15242612 NR Description: nodulin MtN21-related [Arabidopsis thaliana]
  misc_feature (1)..(59): Homolog of NCBI NO: 18414474 NR Description: nodulin MtN21 - related [Arabidopsis thaliana]
  misc_feature (89)..(173): Homolog of NCBI NO: 18414474 NR Description: nodulin MtN21 - related [Arabidopsis thaliana]
  misc_feature (1)..(173): Homolog of NCBI NO: 19347832 NR Description: unknown protein [Arabidopsis thaliana]
MLRSSATQAKIIGTIVSISGALVIVLYKGPKLLVAASFTSFESSWIIGGLLLGLQFLLLSVWFILQTHIMEIYPEEIAVVFCYNLCATLISGTVCLLVEKDLNSWQLKPGFSLASVIYSGLFDTSLGSVIHTWGLHVKGPVYISLFKPLSIAIAVAMAAIFLGDTLHLGSVIG

SEQ ID NO: 46646 - protein, 146 aa, Arabidopsis thaliana
  peptide (1)..(146): Ceres Seq. ID no. 14310096
  misc_feature (28)..(129): Pfam Name: Integral membrane protein DUF6 Pfam Description: Integral membrane protein DUF6
  misc_feature (1)..(129): Homolog of NCBI NO: 30689857 NR Description: nodulin N21 family protein [Arabidopsis thaliana]
  misc_feature (9)..(129): Homolog of NCBI NO: 21594034 NR Description: nodulin MtN21-like protein [Arabidopsis thaliana]
  misc_feature (9)..(129): Homolog of NCBI NO: 18405635 NR Description: nodulin MtN21 family protein [Arabidopsis
  misc_feature (3)..(129): Homolog of NCBI NO: 15242614 NR Description: nodulin MtN21 family protein [Arabidopsis
  misc_feature (21)..(129): Homolog of NCBI NO: 10177510 NR Description: nodulin-like protein [Arabidopsis thaliana]
  misc_feature (1)..(92): Homolog of NCBI NO: 7485048 NR Description: hypothetical protein - Arabidopsis thaliana
  misc_feature (3)..(129): Homolog of NCBI NO: 10177511 NR Description: nodulin-like protein [Arabidopsis thaliana]
  misc_feature (4)..(129): Homolog of NCBI NO: 15242612 NR Description: nodulin MtN21-related [Arabidopsis thaliana]
  misc_feature (1)..(92): Homolog of NCBI NO: 18414474 NR Description: nodulin MtN21 - related [Arabidopsis thaliana]
  misc_feature (24)..(129): Homolog of NCBI NO: 19347832 NR Description: unknown protein [Arabidopsis thaliana]
MREETVSWKYFKRDVVPFTAMIAIECTTVGSSILYKAATLRGFSFYVFVFYAYVGATLVLLLLSLIFGRSRSLPTAKSSLFFKIFLLALLGLTSRVAGCKGIEYSSPTLSSAISNLTPAFTFILAIFFRFHFLLNWVIPLLTIQKI

SEQ ID NO: 46647 - DNA, 1832 bp, Arabidopsis thaliana
  misc_feature (1)..(1832): Ceres Seq. ID no. 15176031
  misc_feature: MA Experiment ID: 20000185 Result: Down-regulated in Transcription
  misc_feature: MA Experiment 20000185 PARAMETER Experiment Name: At_Roots__P Parameter: Age (day) Value: 7 vs. 21
  misc_feature: MA Experiment 20000185 PARAMETER Experiment Name: At_Roots__P Parameter: Organism Value: A. thaliana
  misc_feature: MA Experiment 20000185 PARAMETER Experiment Name: At_Roots__P Parameter: Tissue Value: Roots vs. Whole Plant
  misc_feature: MA Experiment ID: 20000213 Result: Up-regulated in Transcription
  misc_feature: MA Experiment 20000213 PARAMETER Experiment Name: At_4deg_Cold_P Parameter: Timepoint (hr) Value: 2
  misc_feature: MA Experiment ID: 20000438 Result: Down-regulated in Transcription
  misc_feature: MA Experiment 20000438 PARAMETER Experiment Name: At_Shoots__P Parameter: Age (day) Value: 14
  misc_feature: MA Experiment 20000438 PARAMETER Experiment Name: At_Shoots__P Parameter: Tissue Value: Shoots vs. Whole Plant
  misc_feature: MA Experiment ID: 20001247 Result: Down-regulated in Transcription
  misc_feature: MA Experiment 20001247 PARAMETER Experiment Name: At_Far-red-induction_P Parameter: Age (day) Value: 7
  misc_feature: MA Experiment 20001247 PARAMETER Experiment Name: At_Far-red-induction_P Parameter: Light Value: Far-red vs. White
  misc_feature: MA Experiment 20001247 PARAMETER Experiment Name: At_Far-red-induction_P Parameter: Organism Value: A. thaliana
  misc_feature: MA Experiment 20001247 PARAMETER Experiment Name: At_Far-red-induction_P Parameter: Plant Line Value: Columbia
  misc_feature: MA Experiment 20001247 PARAMETER Experiment Name: At_Far-red-induction_P Parameter: Timepoint (hr) Value: 1
  misc_feature: MA Experiment 20001247 PARAMETER Experiment Name: At_Far-red-induction_P Parameter: Tissue Value: Whole Plant
  misc_feature: MA Experiment ID: 20001248 Result: Up-regulated in Transcription
  misc_feature: MA Experiment 20001248 PARAMETER Experiment Name: At_Far-red-induction_P Parameter: Age (day) Value: 7
  misc_feature: MA Experiment 20001248 PARAMETER Experiment Name: At_Far-red-induction_P Parameter: Light Value: Far-red vs. White
  misc_feature: MA Experiment 20001248 PARAMETER Experiment Name: At_Far-red-induction_P Parameter: Organism Value: A. thaliana
  misc_feature: MA Experiment 20001248 PARAMETER Experiment Name: At_Far-red-induction_P Parameter: Plant Line Value: Columbia
  misc_feature: MA Experiment 20001248 PARAMETER Experiment Name: At_Far-red-induction_P Parameter: Timepoint (hr) Value: 4
  misc_feature: MA Experiment 20001248 PARAMETER Experiment Name: At_Far-red-induction_P Parameter: Tissue Value: Whole Plant
  misc_feature: MA Experiment ID: 20001458 Result: Up-regulated in Transcription
  misc_feature: MA Experiment 20001458 PARAMETER Experiment Name: At_50mM_NH4NO3_L-to-H_P Parameter: Age (day) Value: Undefined
  misc_feature: MA Experiment 20001458 PARAMETER Experiment Name: At_50mM_NH4NO3_L-to-H_P Parameter: Organism Value: Undefined
  misc_feature: MA Experiment 20001458 PARAMETER Experiment Name: At_50mM_NH4NO3_L-to-H_P Parameter: Plant Line Value: Undefined
  misc_feature: MA Experiment 20001458 PARAMETER Experiment Name: At_50mM_NH4NO3_L-to-H_P Parameter: Timepoint (hr) Value: 2
  misc_feature: MA Experiment 20001458 PARAMETER Experiment Name: At_50mM_NH4NO3_L-to-H_P Parameter: Tissue Value: Siliques
  misc_feature: MA Experiment 20001458 PARAMETER Experiment Name: At_50mM_NH4NO3_L-to-H_P Parameter: Treatment Value: 50mM NH4NO3 vs. 100mM Manitol
  misc_feature: MA Experiment ID: 20001459 Result: Down-regulated in Transcription
  misc_feature: MA Experiment 20001459 PARAMETER Experiment Name: At_50mM_NH4NO3_L-to-H_P Parameter: Age (day) Value: Undefined
  misc_feature: MA Experiment 20001459 PARAMETER Experiment Name: At_50mM_NH4NO3_L-to-H_P Parameter: Organism Value: Undefined
  misc_feature: MA Experiment 20001459 PARAMETER Experiment Name: At_50mM_NH4NO3_L-to-H_P Parameter: Plant Line Value: Undefined
  misc_feature: MA Experiment 20001459 PARAMETER Experiment Name: At_50mM_NH4NO3_L-to-H_P Parameter: Timepoint (hr) Value: 4
  misc_feature: MA Experiment 20001459 PARAMETER Experiment Name: At_50mM_NH4NO3_L-to-H_P Parameter: Tissue Value: Siliques
  misc_feature: MA Experiment 20001459 PARAMETER Experiment Name: At_50mM_NH4NO3_L-to-H_P Parameter: Treatment Value: 50mM NH4NO3 vs. 100mM Manitol
ggtccaatttaaattctcagttcttcgttcttttgctgactttagctatctctctctgtaaagacttcgtttttttttttgttgccgtgtgacgacttcttcttcctcttcttcttcgacctctttctctcggaagcttagcttcttaaaatccatttctctcggaagcttaacttctcaaatcctcgatctcttttgtatcgtgattcattaaccacttcatgataattataatcttccttctcttctgacgattgaattacatcttcttctgatagatgttctgatttttttctgtatacaaagtaaattcaaagtggacaaacatcggtattttaatctcctctcgataatgaagtgtttcttgttctctggtggggataagagaggggaacagaagacccctatttcggtttcattgacctctatcttctctgaccgcgaaataaaccgaagcgggtcagagttcaactctcgtgatgtctctgggacgagcacagaatcatccatggggaggaagaactcgtaccctccggtgtctactagagcaagtaatctcagagagttcagcattactgatctcaagtctgcaacaaagaactttagccgatctgttatgattggagaaggcggtttcggttgtgtcttcaggggcacagaggaacttagaggactcgtcagttaaaatcgaagtcgcagtgaagcagctcggtaaaagagggttgcaggggcataaggaatgggttacggaagtgaacttcctcggaatagttgagcatacaaacttggtgaaattgcttggctattgtgcagaagatgatgaacgtggaatccaacggcttttggtttatgaatacatgcctaaccgaagtgttgaattccacttatcccctcggtcactcacagttcttacttgggacctcagactgagaatcgcccaagatgcagctcgcggattaacatacctgcatgaagaaatggagtttcagataatattccgcgatttcaagtcctcgaacattcttttggatgaggactggaaagcaaagctctcagatttcggtttggctcgtttaggtccatctgaaggattaacccatgtttctactgatgttgtaggtacaatgggttatgcagcacctgaatacattcaaaccggccgtctcacatcgaaaagcgatgtgtggggttatggagtcttcctctatgagcttatcactgggaggcgaccggtggacagaaacagacccaagggagagcagaagcttctagaatgggtgagaccttatttatctgacacaaggaagttcaagctcatattagatccaaggctggaagggaagtacccgatcaaatcggttcaaaagctagcagttgtggccaacagatgtttggttaggaactcaaaggcacgtcccaagatgagtgaggttttagagatggtgaacaaaattgtggaagcttcttcaggaaatggcagcccacagctagttccgctgaacagtgtaaaagcttcgagagacgcgagaggaaagaacaatggtggtggcggtgaaggaggttggtttggcaagttatggaatccaaagacaataagagcttgttgactgcttatagaattcaacctcttcttacagcaaaaaaaagagtcaagaaaggtttcatggagattccgaaggttgaagattctagcgagatcaagatgaagctcatatacatacataaagataattatatatgaagatttgtgaaagattctaaaatgatgaaatatgatttttgtatgaacttatgaatagtaaccacagcttaattagtaagatatgtatatt

SEQ ID NO: 46648 - protein, 249 aa, Arabidopsis thaliana
  peptide (1)..(249): Ceres Seq. ID no. 15176032
  misc_feature (1)..(235): Homolog of NCBI NO: 15242204 NR Description: serine/threonine specific protein kinase -related
  misc_feature (1)..(209): Homolog of NCBI NO: 30684071 NR Description: protein kinase family [Arabidopsis thaliana]
  misc_feature (1)..(209): Homolog of NCBI NO: 7488278 NR Description: probable protein kinase [imported] - Arabidopsis
  misc_feature (1)..(247): Homolog of NCBI NO: 37534774 NR Description: putative serine/threonine kinase
  misc_feature (1)..(247): Homolog of NCBI NO: 7248457 NR Description: protein serine/threonine kinase [Lophopyrum
  misc_feature (1)..(223): Homolog of NCBI NO: 25287613 NR Description: probable protein kinase [imported] - Arabidopsis
  misc_feature (1)..(223): Homolog of NCBI NO: 28416693 NR Description: At2g39110 [Arabidopsis thaliana]
  misc_feature (1)..(223): Homolog of NCBI NO: 30687780 NR Description: protein kinase, putative [Arabidopsis thaliana]
  misc_feature (1)..(249): Homolog of NCBI NO: 15242720 NR Description: protein kinase, putative [Arabidopsis thaliana]
  misc_feature (1)..(249): Homolog of NCBI NO: 15232764 NR Description: protein kinase, putative [Arabidopsis thaliana]
MPNRSVEFHLSPRSLTVLTWDLRLRIAQDAARGLTYLHEEMEFQIIFRDFKSSNILLDEDWKAKLSDFGLARLGPSEGLTHVSTDVVGTMGYAAPEYIQTGRLTSKSDVWGYGVFLYELITGRRPVDRNRPKGEQKLLEWVRPYLSDTRKFKLILDPRLEGKYPIKSVQKLAVVANRCLVRNSKARPKMSEVLEMVNKIVEASSGNGSPQLVPLNSVKASRDARGKNNGGGGEGGWFGKLWNPKTIRAC

SEQ ID NO: 46649 - protein, 209 aa, Arabidopsis thaliana
  peptide (1)..(209): Ceres Seq. ID no. 15176033
  misc_feature (1)..(195): Homolog of NCBI NO: 15242204 NR Description: serine/threonine specific protein kinase -related
  misc_feature (1)..(169): Homolog of NCBI NO: 30684071 NR Description: protein kinase family [Arabidopsis thaliana]
  misc_feature (1)..(169): Homolog of NCBI NO: 7488278 NR Description: probable protein kinase [imported] - Arabidopsis
  misc_feature (1)..(207): Homolog of NCBI NO: 37534774 NR Description: putative serine/threonine kinase
  misc_feature (1)..(207): Homolog of NCBI NO: 7248457 NR Description: protein serine/threonine kinase [Lophopyrum
  misc_feature (1)..(183): Homolog of NCBI NO: 25287613 NR Description: probable protein kinase [imported] - Arabidopsis
  misc_feature (1)..(183): Homolog of NCBI NO: 28416693 NR Description: At2g39110 [Arabidopsis thaliana]
  misc_feature (1)..(183): Homolog of NCBI NO: 30687780 NR Description: protein kinase, putative [Arabidopsis thaliana]
  misc_feature (1)..(209): Homolog of NCBI NO: 15242720 NR Description: protein kinase, putative [Arabidopsis thaliana]
  misc_feature (1)..(209): Homolog of NCBI NO: 15232764 NR Description: protein kinase, putative [Arabidopsis thaliana]
MEFQIIFRDFKSSNILLDEDWKAKLSDFGLARLGPSEGLTHVSTDVVGTMGYAAPEYIQTGRLTSKSDVWGYGVFLYELITGRRPVDRNRPKGEQKLLEWVRPYLSDTRKFKLILDPRLEGKYPIKSVQKLAVVANRCLVRNSKARPKMSEVLEMVNKIVEASSGNGSPQLVPLNSVKASRDARGKNNGGGGEGGWFGKLWNPKTIRAC

SEQ ID NO: 46650 - protein, 160 aa, Arabidopsis thaliana
  peptide (1)..(160): Ceres Seq. ID no. 15176034
  misc_feature (1)..(146): Homolog of NCBI NO: 15242204 NR Description: serine/threonine specific protein kinase -related
  misc_feature (1)..(120): Homolog of NCBI NO: 30684071 NR Description: protein kinase family [Arabidopsis thaliana]
  misc_feature (1)..(120): Homolog of NCBI NO: 7488278 NR Description: probable protein kinase [imported] - Arabidopsis
  misc_feature (1)..(158): Homolog of NCBI NO: 37534774 NR Description: putative serine/threonine kinase
  misc_feature (1)..(158): Homolog of NCBI NO: 7248457 NR Description: protein serine/threonine kinase [Lophopyrum
  misc_feature (1)..(134): Homolog of NCBI NO: 25287613 NR Description: probable protein kinase [imported] - Arabidopsis
  misc_feature (1)..(134): Homolog of NCBI NO: 28416693 NR Description: At2g39110 [Arabidopsis thaliana]
  misc_feature (1)..(134): Homolog of NCBI NO: 30687780 NR Description: protein kinase, putative [Arabidopsis thaliana]
  misc_feature (1)..(160): Homolog of NCBI NO: 15242720 NR Description: protein kinase, putative [Arabidopsis thaliana]
  misc_feature (1)..(160): Homolog of NCBI NO: 15232764 NR Description: protein kinase, putative [Arabidopsis thaliana]
MGYAAPEYIQTGRLTSKSDVWGYGVFLYELITGRRPVDRNRPKGEQKLLEWVRPYLSDTRKFKLILDPRLEGKYPIKSVQKLAVVANRCLVRNSKARPKMSEVLEMVNKIVEASSGNGSPQLVPLNSVKASRDARGKNNGGGGEGGWFGKLWNPKTIRAC

SEQ ID NO: 46651 - DNA, 2256 bp, Arabidopsis thaliana; identical to SEQ ID NO: 22038
  misc_feature (1)..(2256): Ceres Seq. ID no. 13646318
  misc_feature: MA Experiment ID: 108434 Result: Up-regulated in Transcription
  misc_feature: MA Experiment 108434 PARAMETER Experiment Name: At_Root_Tips_cDNA_P Parameter: Tissue Value: Root Tips
  misc_feature: MA Experiment ID: 108462 Result: Down-regulated in Transcription
  misc_feature: MA Experiment 108462 PARAMETER Experiment Name: At_Germinating_Seeds_cDNA_P Parameter: Age (day) Value: 2 vs. 0
  misc_feature: MA Experiment 108462 PARAMETER Experiment Name: At_Germinating_Seeds_cDNA_P Parameter: Tissue Value: Germinating Seeds
  misc_feature: MA Experiment ID: 108463 Result: Down-regulated in Transcription
  misc_feature: MA Experiment 108463 PARAMETER Experiment Name: At_Germinating_Seeds_cDNA_P Parameter: Age (day) Value: 3 vs. 0
  misc_feature: MA Experiment 108463 PARAMETER Experiment Name: At_Germinating_Seeds_cDNA_P Parameter: Tissue Value: Germinating Seeds
  misc_feature: MA Experiment ID: 108464 Result: Down-regulated in Transcription
  misc_feature: MA Experiment 108464 PARAMETER Experiment Name: At_Germinating_Seeds_cDNA_P Parameter: Age (day) Value: 4 vs. 0
  misc_feature: MA Experiment 108464 PARAMETER Experiment Name: At_Germinating_Seeds_cDNA_P Parameter: Tissue Value: Germinating Seeds
  misc_feature: MA Experiment ID: 108501 Result: Up-regulated in Transcription
  misc_feature: MA Experiment 108501 PARAMETER Experiment Name: At_ap2_floral_buds_cDNA_P Parameter: Plant Line Value: ap2 (Ler.)
  misc_feature: MA Experiment 108501 PARAMETER Experiment Name: At_ap2_floral_buds_cDNA_P Parameter: Tissue Value: Closed Flower
  misc_feature: MA Experiment ID: 108573 Result: Up-regulated in Transcription
  misc_feature: MA Experiment 108573 PARAMETER Experiment Name: At_Drought_cDNA_P Parameter: Timepoint (hr) Value: 6
  misc_feature: MA Experiment 108573 PARAMETER Experiment Name: At_Drought_cDNA_P Parameter: Tissue Value: Aerial
  misc_feature: MA Experiment 108573 PARAMETER Experiment Name: At_Drought_cDNA_P Parameter: Treatment Value: Drought vs. No Drought
  misc_feature: MA Experiment ID: 108576 Result: Up-regulated in Transcription
  misc_feature: MA Experiment 108576 PARAMETER Experiment Name: At_42deg_Heat_cDNA_P Parameter: Temperature (deg C) Value: 42 vs. 22
  misc_feature: MA Experiment 108576 PARAMETER Experiment Name: At_42deg_Heat_cDNA_P Parameter: Timepoint (hr) Value: 1
  misc_feature: MA Experiment 108576 PARAMETER Experiment Name: At_42deg_Heat_cDNA_P Parameter: Tissue Value: Aerial
  misc_feature: MA Experiment ID: 108577 Result: Up-regulated in Transcription
  misc_feature: MA Experiment 108577 PARAMETER Experiment Name: At_42deg_Heat_cDNA_P Parameter: Temperature (deg C) Value: 42 vs. 22
  misc_feature: MA Experiment 108577 PARAMETER Experiment Name: At_42deg_Heat_cDNA_P Parameter: Timepoint (hr) Value: 6
  misc_feature: MA Experiment 108577 PARAMETER Experiment Name: At_42deg_Heat_cDNA_P Parameter: Tissue Value: Aerial
  misc_feature: MA Experiment ID: 108585 Result: Up-regulated in Transcription
  misc_feature: MA Experiment 108585 PARAMETER Experiment Name: At_5mM_NaNP_cDNA_P Parameter: Timepoint (hr) Value: 6
  misc_feature: MA Experiment 108585 PARAMETER Experiment Name: At_5mM_NaNP_cDNA_P Parameter: Tissue Value: Aerial
  misc_feature: MA Experiment 108585 PARAMETER Experiment Name: At_5mM_NaNP_cDNA_P Parameter: Treatment Value: null
  misc_feature: MA Experiment ID: 108595 Result: Down-regulated in Transcription
  misc_feature: MA Experiment 108595 PARAMETER Experiment Name: At_Ler-pi_Ovule_cDNA_P Parameter: Plant Line Value: null
  misc_feature: MA Experiment ID: 20000069 Result: Down-regulated in Transcription
  misc_feature: MA Experiment 20000069 PARAMETER Experiment Name: At_100uM_ABA_Mutants_cDNA_P Parameter: Plant Line Value: CS23
  misc_feature: MA Experiment 20000069 PARAMETER Experiment Name: At_100uM_ABA_Mutants_cDNA_P Parameter: Timepoint (hr) Value: 6
  misc_feature: MA Experiment 20000069 PARAMETER Experiment Name: At_100uM_ABA_Mutants_cDNA_P Parameter: Tissue Value: Aerial
  misc_feature: MA Experiment 20000069 PARAMETER Experiment Name: At_100uM_ABA_Mutants_cDNA_P Parameter: Treatment Value: 100uM ABA vs. No Treatment
  misc_feature: MA Experiment ID: 20000087 Result: Down-regulated in Transcription
  misc_feature: MA Experiment 20000087 PARAMETER Experiment Name: At_100uM_ABA_Mutants_cDNA_P Parameter: Plant Line Value: WS
  misc_feature: MA Experiment 20000087 PARAMETER Experiment Name: At_100uM_ABA_Mutants_cDNA_P Parameter: Timepoint (hr) Value: 6
  misc_feature: MA Experiment 20000087 PARAMETER Experiment Name: At_100uM_ABA_Mutants_cDNA_P Parameter: Tissue Value: Aerial
  misc_feature: MA Experiment 20000087 PARAMETER Experiment Name: At_100uM_ABA_Mutants_cDNA_P Parameter: Treatment Value: 100uM ABA vs. No Treatment
  misc_feature: MA Experiment ID: 20000111 Result: Up-regulated in Transcription
  misc_feature: MA Experiment 20000111 PARAMETER Experiment Name: At_42deg_Heat_cDNA_P Parameter: Temperature (deg C) Value: 42 vs. 22
  misc_feature: MA Experiment 20000111 PARAMETER Experiment Name: At_42deg_Heat_cDNA_P Parameter: Timepoint (hr) Value: 6
  misc_feature: MA Experiment 20000111 PARAMETER Experiment Name: At_42deg_Heat_cDNA_P Parameter: Tissue Value: Aerial
  misc_feature: MA Experiment ID: 20000112 Result: Up-regulated in Transcription
  misc_feature: MA Experiment 20000112 PARAMETER Experiment Name: At_42deg_Heat_cDNA_P Parameter: Temperature (deg C) Value: 42 vs. 22
  misc_feature: MA Experiment 20000112 PARAMETER Experiment Name: At_42deg_Heat_cDNA_P Parameter: Timepoint (hr) Value: 2
  misc_feature: MA Experiment 20000112 PARAMETER Experiment Name: At_42deg_Heat_cDNA_P Parameter: Tissue Value: Aerial
  misc_feature: MA Experiment ID: 20000113 Result: Up-regulated in Transcription
  misc_feature: MA Experiment 20000113 PARAMETER Experiment Name: At_42deg_Heat_cDNA_P Parameter: Temperature (deg C) Value: 42 vs. 22
  misc_feature: MA Experiment 20000113 PARAMETER Experiment Name: At_42deg_Heat_cDNA_P Parameter: Timepoint (hr) Value: 8
  misc_feature: MA Experiment 20000113 PARAMETER Experiment Name: At_42deg_Heat_cDNA_P Parameter: Tissue Value: Aerial
  misc_feature: MA Experiment ID: 20000144 Result: Up-regulated in Transcription
  misc_feature: MA Experiment 20000144 PARAMETER Experiment Name: At_42deg_Heat_cDNA_P Parameter: Temperature (deg C) Value: 42 vs. 22
  misc_feature: MA Experiment 20000144 PARAMETER Experiment Name: At_42deg_Heat_cDNA_P Parameter: Timepoint (hr) Value: 1
  misc_feature: MA Experiment 20000144 PARAMETER Experiment Name: At_42deg_Heat_cDNA_P Parameter: Tissue Value: Aerial
  misc_feature: MA Experiment ID: 20000314 Result: Down-regulated in Transcription
  misc_feature: MA Experiment 20000314 PARAMETER Experiment Name: At_14day_Shoots-Roots_Sub_P Parameter: Age (day) Value: 14
  misc_feature: MA Experiment 20000314 PARAMETER Experiment Name: At_14day_Shoots-Roots_Sub_P Parameter: Organism Value: A. thaliana
  misc_feature: MA Experiment 20000314 PARAMETER Experiment Name: At_14day_Shoots-Roots_Sub_P Parameter: Plant Line Value: WS
  misc_feature: MA Experiment 20000314 PARAMETER Experiment Name: At_14day_Shoots-Roots_Sub_P Parameter: Tissue Value: Roots vs. Whole Plant
  misc_feature: MA Experiment ID: 20000327 Result: Up-regulated in Transcription
  misc_feature: MA Experiment 20000327 PARAMETER Experiment Name: At_42deg_Heat_Sub_P Parameter: Age (day) Value: 14
  misc_feature: MA Experiment 20000327 PARAMETER Experiment Name: At_42deg_Heat_Sub_P Parameter: Organism Value: A. thaliana
  misc_feature: MA Experiment 20000327 PARAMETER Experiment Name: At_42deg_Heat_Sub_P Parameter: Plant Line Value: WS
  misc_feature: MA Experiment 20000327 PARAMETER Experiment Name: At_42deg_Heat_Sub_P Parameter: Temperature (deg C) Value: 42 vs. 22
  misc_feature: MA Experiment 20000327 PARAMETER Experiment Name: At_42deg_Heat_Sub_P Parameter: Timepoint (hr) Value: 1
  misc_feature: MA Experiment 20000327 PARAMETER Experiment Name: At_42deg_Heat_Sub_P Parameter: Tissue Value: Aerial
  misc_feature: MA Experiment ID: 20000328 Result: Up-regulated in Transcription
  misc_feature: MA Experiment 20000328 PARAMETER Experiment Name: At_42deg_Heat_Sub_P Parameter: Age (day) Value: 14
  misc_feature: MA Experiment 20000328 PARAMETER Experiment Name: At_42deg_Heat_Sub_P Parameter: Organism Value: A. thaliana
  misc_feature: MA Experiment 20000328 PARAMETER Experiment Name: At_42deg_Heat_Sub_P Parameter: Plant Line Value: WS
  misc_feature: MA Experiment 20000328 PARAMETER Experiment Name: At_42deg_Heat_Sub_P Parameter: Temperature (deg C) Value: 42 vs. 22
  misc_feature: MA Experiment 20000328 PARAMETER Experiment Name: At_42deg_Heat_Sub_P Parameter: Timepoint (hr) Value: 6
  misc_feature: MA Experiment 20000328 PARAMETER Experiment Name: At_42deg_Heat_Sub_P Parameter: Tissue Value: Aerial
  misc_feature: MA Experiment ID: 20000355 Result: Down-regulated in Transcription
  misc_feature: MA Experiment 20000355 PARAMETER Experiment Name: At_Siliques_Sub_P Parameter: Age (day) Value: 21
  misc_feature: MA Experiment 20000355 PARAMETER Experiment Name: At_Siliques_Sub_P Parameter: Organism Value: A. thaliana
  misc_feature: MA Experiment 20000355 PARAMETER Experiment Name: At_Siliques_Sub_P Parameter: Plant Line Value: WS
  misc_feature: MA Experiment 20000355 PARAMETER Experiment Name: At_Siliques_Sub_P Parameter: Tissue Value: Less Than 5mm Siliques vs. Whole Plant
  misc_feature: MA Experiment ID: 20001807 Result: Up-regulated in Transcription
  misc_feature: MA Experiment 20001807 PARAMETER Experiment Name: At_50mM_NH4NO3_L-to-H_Sub_P Parameter: Timepoint (hr) Value: 6
  misc_feature: MA Experiment 20001807 PARAMETER Experiment Name: At_50mM_NH4NO3_L-to-H_Sub_P Parameter: Tissue Value: Leaf
  misc_feature: MA Experiment 20001807 PARAMETER Experiment Name: At_50mM_NH4NO3_L-to-H_Sub_P Parameter: Treatment Value: 50mM NH4NO3 vs 100mM Mannitol

SEQ ID NO: 46652 - protein, 651 aa, Arabidopsis thaliana; identical to SEQ ID NO: 22039
  peptide (1)..(651): Ceres Seq. ID no. 13646319
  misc_feature (124)..(646): Homolog of NCBI NO: 4164594 NR Description: heat shock protein 70 [Paracoccidioides
  misc_feature (1)..(635): Homolog of NCBI NO: 23480384 NR Description: heat shock protein [Plasmodium yoelii yoelii]
  misc_feature (3)..(635): Homolog of NCBI NO: 29539338 NR Description: Heat shock 70 kDa protein [Cyanidioschyzon
  misc_feature (1)..(626): Homolog of NCBI NO: 481576 NR Description: dnaK-type molecular chaperone GRP78/BiP -
  misc_feature (3)..(635): Homolog of NCBI NO: 1037176 NR Description: immunoglobulin heavy chain binding protein
  misc_feature (1)..(635): Homolog of NCBI NO: 6016151 NR Description: Luminal binding protein 3 precursor (BiP3)
  misc_feature (8)..(651): Homolog of NCBI NO: 14423732 NR Description: Heat shock 70 kDa protein
  misc_feature (6)..(626): Homolog of NCBI NO: 21263753 NR Description: Heat shock cognate 71 kDa protein (Hsc70.1)
  misc_feature (124)..(646): Homolog of NCBI NO: 4164594 NR Description: heat shock protein 70 [Paracoccidioides
  misc_feature (1)..(635): Homolog of NCBI NO: 23480384 NR Description: heat shock protein [Plasmodium yoelii yoelii]
  misc_feature (3)..(635): Homolog of NCBI NO: 29539338 NR Description: Heat shock 70 kDa protein [Cyanidioschyzon
  misc_feature (1)..(626): Homolog of NCBI NO: 481576 NR Description: dnaK-type molecular chaperone GRP78/BiP -
  misc_feature (3)..(635): Homolog of NCBI NO: 1037176 NR Description: immunoglobulin heavy chain binding protein
  misc_feature (1)..(635): Homolog of NCBI NO: 6016151 NR Description: Luminal binding protein 3 precursor (BiP3)
  misc_feature (8)..(651): Homolog of NCBI NO: 14423732 NR Description: Heat shock 70 kDa protein
  misc_feature (6)..(626): Homolog of NCBI NO: 21263753 NR Description: Heat shock cognate 71 kDa protein (Hsc70.1)
  misc_feature (124)..(646): Homolog of NCBI NO: 4164594 NR Description: heat shock protein 70 [Paracoccidioides
  misc_feature (1)..(635): Homolog of NCBI NO: 23480384 NR Description: heat shock protein [Plasmodium yoelii yoelii]
  misc_feature (3)..(635): Homolog of NCBI NO: 29539338 NR Description: Heat shock 70 kDa protein [Cyanidioschyzon
  misc_feature (1)..(626): Homolog of NCBI NO: 481576 NR Description: dnaK-type molecular chaperone GRP78/BiP -
  misc_feature (3)..(635): Homolog of NCBI NO: 1037176 NR Description: immunoglobulin heavy chain binding protein
  misc_feature (1)..(635): Homolog of NCBI NO: 6016151 NR Description: Luminal binding protein 3 precursor (BiP3)
  misc_feature (8)..(651): Homolog of NCBI NO: 14423732 NR Description: Heat shock 70 kDa protein
  misc_feature (6)..(626): Homolog of NCBI NO: 21263753 NR Description: Heat shock cognate 71 kDa protein (Hsc70.1)
  misc_feature (124)..(646): Homolog of NCBI NO: 4164594 NR Description: heat shock protein 70 [Paracoccidioides
  misc_feature (1)..(635): Homolog of NCBI NO: 23480384 NR Description: heat shock protein [Plasmodium yoelii yoelii]
  misc_feature (3)..(635): Homolog of NCBI NO: 29539338 NR Description: Heat shock 70 kDa protein [Cyanidioschyzon
  misc_feature (1)..(626): Homolog of NCBI NO: 481576 NR Description: dnaK-type molecular chaperone GRP78/BiP -
  misc_feature (3)..(635): Homolog of NCBI NO: 1037176 NR Description: immunoglobulin heavy chain binding protein
  misc_feature (1)..(635): Homolog of NCBI NO: 6016151 NR Description: Luminal binding protein 3 precursor (BiP3)
  misc_feature (8)..(651): Homolog of NCBI NO: 14423732 NR Description: Heat shock 70 kDa protein
  misc_feature (6)..(626): Homolog of NCBI NO: 21263753 NR Description: Heat shock cognate 71 kDa protein (Hsc70.1)
  misc_feature (124)..(646): Homolog of NCBI NO: 4164594 NR Description: heat shock protein 70 [Paracoccidioides
  misc_feature (1)..(635): Homolog of NCBI NO: 23480384 NR Description: heat shock protein [Plasmodium yoelii yoelii]
  misc_feature (3)..(635): Homolog of NCBI NO: 29539338 NR Description: Heat shock 70 kDa protein [Cyanidioschyzon
  misc_feature (1)..(626): Homolog of NCBI NO: 481576 NR Description: dnaK-type molecular chaperone GRP78/BiP -
  misc_feature (3)..(635): Homolog of NCBI NO: 1037176 NR Description: immunoglobulin heavy chain binding protein
  misc_feature (1)..(635): Homolog of NCBI NO: 6016151 NR Description: Luminal binding protein 3 precursor (BiP3)
  misc_feature (8)..(651): Homolog of NCBI NO: 14423732 NR Description: Heat shock 70 kDa protein
  misc_feature (6)..(626): Homolog of NCBI NO: 21263753 NR Description: Heat shock cognate 71 kDa protein (Hsc70.1)
  misc_feature (124)..(646): Homolog of NCBI NO: 4164594 NR Description: heat shock protein 70 [Paracoccidioides
  misc_feature (1)..(635): Homolog of NCBI NO: 23480384 NR Description: heat shock protein [Plasmodium yoelii yoelii]
  misc_feature (3)..(635): Homolog of NCBI NO: 29539338 NR Description: Heat shock 70 kDa protein [Cyanidioschyzon
  misc_feature (1)..(626): Homolog of NCBI NO: 481576 NR Description: dnaK-type molecular chaperone GRP78/BiP -
  misc_feature (3)..(635): Homolog of NCBI NO: 1037176 NR Description: immunoglobulin heavy chain binding protein
  misc_feature (1)..(635): Homolog of NCBI NO: 6016151 NR Description: Luminal binding protein 3 precursor (BiP3)
  misc_feature (8)..(651): Homolog of NCBI NO: 14423732 NR Description: Heat shock 70 kDa protein
  misc_feature (6)..(626): Homolog of NCBI NO: 21263753 NR Description: Heat shock cognate 71 kDa protein (Hsc70.1)
  misc_feature (124)..(646): Homolog of NCBI NO: 4164594 NR Description: heat shock protein 70 [Paracoccidioides
  misc_feature (1)..(635): Homolog of NCBI NO: 23480384 NR Description: heat shock protein [Plasmodium yoelii yoelii]
  misc_feature (3)..(635): Homolog of NCBI NO: 29539338 NR Description: Heat shock 70 kDa protein [Cyanidioschyzon
  misc_feature (1)..(626): Homolog of NCBI NO: 481576 NR Description: dnaK-type molecular chaperone GRP78/BiP -
  misc_feature (3)..(635): Homolog of NCBI NO: 1037176 NR Description: immunoglobulin heavy chain binding protein
  misc_feature (1)..(635): Homolog of NCBI NO: 6016151 NR Description: Luminal binding protein 3 precursor (BiP3)
  misc_feature (8)..(651): Homolog of NCBI NO: 14423732 NR Description: Heat shock 70 kDa protein
  misc_feature (6)..(626): Homolog of NCBI NO: 21263753 NR Description: Heat shock cognate 71 kDa protein (Hsc70.1)

SEQ ID NO: 46653 - protein, 588 aa, Arabidopsis thaliana; identical to SEQ ID NO: 22040
  peptide (1)..(588): Ceres Seq. ID no. 13646320
  misc_feature (61)..(583): Homolog of NCBI NO: 4164594 NR Description: heat shock protein 70 [Paracoccidioides
  misc_feature (1)..(572): Homolog of NCBI NO: 23480384 NR Description: heat shock protein [Plasmodium yoelii yoelii]
  misc_feature (1)..(572): Homolog of NCBI NO: 29539338 NR Description: Heat shock 70 kDa protein [Cyanidioschyzon
  misc_feature (1)..(563): Homolog of NCBI NO: 481576 NR Description: dnaK-type molecular chaperone GRP78/BiP -
  misc_feature (1)..(572): Homolog of NCBI NO: 1037176 NR Description: immunoglobulin heavy chain binding protein
  misc_feature (1)..(572): Homolog of NCBI NO: 6016151 NR Description: Luminal binding protein 3 precursor (BiP3)
  misc_feature (1)..(588): Homolog of NCBI NO: 14423732 NR Description: Heat shock 70 kDa protein
  misc_feature (1)..(563): Homolog of NCBI NO: 21263753 NR Description: Heat shock cognate 71 kDa protein (Hsc70.1)
  misc_feature (61)..(583): Homolog of NCBI NO: 4164594 NR Description: heat shock protein 70 [Paracoccidioides
  misc_feature (1)..(572): Homolog of NCBI NO: 23480384 NR Description: heat shock protein [Plasmodium yoelii yoelii]
  misc_feature (1)..(572): Homolog of NCBI NO: 29539338 NR Description: Heat shock 70 kDa protein [Cyanidioschyzon
  misc_feature (1)..(563): Homolog of NCBI NO: 481576 NR Description: dnaK-type molecular chaperone GRP78/BiP -
  misc_feature (1)..(572): Homolog of NCBI NO: 1037176 NR Description: immunoglobulin heavy chain binding protein
  misc_feature (1)..(572): Homolog of NCBI NO: 6016151 NR Description: Luminal binding protein 3 precursor (BiP3)
  misc_feature (1)..(588): Homolog of NCBI NO: 14423732 NR Description: Heat shock 70 kDa protein
  misc_feature (1)..(563): Homolog of NCBI NO: 21263753 NR Description: Heat shock cognate 71 kDa protein (Hsc70.1)
  misc_feature (61)..(583): Homolog of NCBI NO: 4164594 NR Description: heat shock protein 70 [Paracoccidioides
  misc_feature (1)..(572): Homolog of NCBI NO: 23480384 NR Description: heat shock protein [Plasmodium yoelii yoelii]
  misc_feature (1)..(572): Homolog of NCBI NO: 29539338 NR Description: Heat shock 70 kDa protein [Cyanidioschyzon
  misc_feature (1)..(563): Homolog of NCBI NO: 481576 NR Description: dnaK-type molecular chaperone GRP78/BiP -
  misc_feature (1)..(572): Homolog of NCBI NO: 1037176 NR Description: immunoglobulin heavy chain binding protein
  misc_feature (1)..(572): Homolog of NCBI NO: 6016151 NR Description: Luminal binding protein 3 precursor (BiP3)
  misc_feature (1)..(588): Homolog of NCBI NO: 14423732 NR Description: Heat shock 70 kDa protein
  misc_feature (1)..(563): Homolog of NCBI NO: 21263753 NR Description: Heat shock cognate 71 kDa protein (Hsc70.1)
  misc_feature (61)..(583): Homolog of NCBI NO: 4164594 NR Description: heat shock protein 70 [Paracoccidioides
  misc_feature (1)..(572): Homolog of NCBI NO: 23480384 NR Description: heat shock protein [Plasmodium yoelii yoelii]
  misc_feature (1)..(572): Homolog of NCBI NO: 29539338 NR Description: Heat shock 70 kDa protein [Cyanidioschyzon
  misc_feature (1)..(563): Homolog of NCBI NO: 481576 NR Description: dnaK-type molecular chaperone GRP78/BiP -
  misc_feature (1)..(572): Homolog of NCBI NO: 1037176 NR Description: immunoglobulin heavy chain binding protein
  misc_feature (1)..(572): Homolog of NCBI NO: 6016151 NR Description: Luminal binding protein 3 precursor (BiP3)
  misc_feature (1)..(588): Homolog of NCBI NO: 14423732 NR Description: Heat shock 70 kDa protein
  misc_feature (1)..(563): Homolog of NCBI NO: 21263753 NR Description: Heat shock cognate 71 kDa protein (Hsc70.1)
  misc_feature (61)..(583): Homolog of NCBI NO: 4164594 NR Description: heat shock protein 70 [Paracoccidioides
  misc_feature (1)..(572): Homolog of NCBI NO: 23480384 NR Description: heat shock protein [Plasmodium yoelii yoelii]
  misc_feature (1)..(572): Homolog of NCBI NO: 29539338 NR Description: Heat shock 70 kDa protein [Cyanidioschyzon
  misc_feature (1)..(563): Homolog of NCBI NO: 481576 NR Description: dnaK-type molecular chaperone GRP78/BiP -
  misc_feature (1)..(572): Homolog of NCBI NO: 1037176 NR Description: immunoglobulin heavy chain binding protein
  misc_feature (1)..(572): Homolog of NCBI NO: 6016151 NR Description: Luminal binding protein 3 precursor (BiP3)
  misc_feature (1)..(588): Homolog of NCBI NO: 14423732 NR Description: Heat shock 70 kDa protein
  misc_feature (1)..(563): Homolog of NCBI NO: 21263753 NR Description: Heat shock cognate 71 kDa protein (Hsc70.1)
  misc_feature (61)..(583): Homolog of NCBI NO: 4164594 NR Description: heat shock protein 70 [Paracoccidioides
  misc_feature (1)..(572): Homolog of NCBI NO: 23480384 NR Description: heat shock protein [Plasmodium yoelii yoelii]
  misc_feature (1)..(572): Homolog of NCBI NO: 29539338 NR Description: Heat shock 70 kDa protein [Cyanidioschyzon
  misc_feature (1)..(563): Homolog of NCBI NO: 481576 NR Description: dnaK-type molecular chaperone GRP78/BiP -
  misc_feature (1)..(572): Homolog of NCBI NO: 1037176 NR Description: immunoglobulin heavy chain binding protein
  misc_feature (1)..(572): Homolog of NCBI NO: 6016151 NR Description: Luminal binding protein 3 precursor (BiP3)
  misc_feature (1)..(588): Homolog of NCBI NO: 14423732 NR Description: Heat shock 70 kDa protein
  misc_feature (1)..(563): Homolog of NCBI NO: 21263753 NR Description: Heat shock cognate 71 kDa protein (Hsc70.1)
  misc_feature (61)..(583): Homolog of NCBI NO: 4164594 NR Description: heat shock protein 70 [Paracoccidioides
  misc_feature (1)..(572): Homolog of NCBI NO: 23480384 NR Description: heat shock protein [Plasmodium yoelii yoelii]
  misc_feature (1)..(572): Homolog of NCBI NO: 29539338 NR Description: Heat shock 70 kDa protein [Cyanidioschyzon
  misc_feature (1)..(563): Homolog of NCBI NO: 481576 NR Description: dnaK-type molecular chaperone GRP78/BiP -
  misc_feature (1)..(572): Homolog of NCBI NO: 1037176 NR Description: immunoglobulin heavy chain binding protein
  misc_feature (1)..(572): Homolog of NCBI NO: 6016151 NR Description: Luminal binding protein 3 precursor (BiP3)
  misc_feature (1)..(588): Homolog of NCBI NO: 14423732 NR Description: Heat shock 70 kDa protein
  misc_feature (1)..(563): Homolog of NCBI NO: 21263753 NR Description: Heat shock cognate 71 kDa protein (Hsc70.1)

SEQ ID NO: 46654 - protein, 562 aa, Arabidopsis thaliana; identical to SEQ ID NO: 22041
  peptide (1)..(562): Ceres Seq. ID no. 13646321
  misc_feature (35)..(557): Homolog of NCBI NO: 4164594 NR Description: heat shock protein 70 [Paracoccidioides
  misc_feature (1)..(546): Homolog of NCBI NO: 23480384 NR Description: heat shock protein [Plasmodium yoelii yoelii]
  misc_feature (1)..(546): Homolog of NCBI NO: 29539338 NR Description: Heat shock 70 kDa protein [Cyanidioschyzon
  misc_feature (1)..(537): Homolog of NCBI NO: 481576 NR Description: dnaK-type molecular chaperone GRP78/BiP -
  misc_feature (1)..(546): Homolog of NCBI NO: 1037176 NR Description: immunoglobulin heavy chain binding protein
  misc_feature (1)..(546): Homolog of NCBI NO: 6016151 NR Description: Luminal binding protein 3 precursor (BiP3)
  misc_feature (1)..(562): Homolog of NCBI NO: 14423732 NR Description: Heat shock 70 kDa protein
  misc_feature (1)..(537): Homolog of NCBI NO: 21263753 NR Description: Heat shock cognate 71 kDa protein (Hsc70.1)
  misc_feature (35)..(557): Homolog of NCBI NO: 4164594 NR Description: heat shock protein 70 [Paracoccidioides
  misc_feature (1)..(546): Homolog of NCBI NO: 23480384 NR Description: heat shock protein [Plasmodium yoelii yoelii]
  misc_feature (1)..(546): Homolog of NCBI NO: 29539338 NR Description: Heat shock 70 kDa protein [Cyanidioschyzon
  misc_feature (1)..(537): Homolog of NCBI NO: 481576 NR Description: dnaK-type molecular chaperone GRP78/BiP -
  misc_feature (1)..(546): Homolog of NCBI NO: 1037176 NR Description: immunoglobulin heavy chain binding protein
  misc_feature (1)..(546): Homolog of NCBI NO: 6016151 NR Description: Luminal binding protein 3 precursor (BiP3)
  misc_feature (1)..(562): Homolog of NCBI NO: 14423732 NR Description: Heat shock 70 kDa protein
  misc_feature (1)..(537): Homolog of NCBI NO: 21263753 NR Description: Heat shock cognate 71 kDa protein (Hsc70.1)
  misc_feature (35)..(557): Homolog of NCBI NO: 4164594 NR Description: heat shock protein 70 [Paracoccidioides
  misc_feature (1)..(546): Homolog of NCBI NO: 23480384 NR Description: heat shock protein [Plasmodium yoelii yoelii]
  misc_feature (1)..(546): Homolog of NCBI NO: 29539338 NR Description: Heat shock 70 kDa protein [Cyanidioschyzon
  misc_feature (1)..(537): Homolog of NCBI NO: 481576 NR Description: dnaK-type molecular chaperone GRP78/BiP -
  misc_feature (1)..(546): Homolog of NCBI NO: 1037176 NR Description: immunoglobulin heavy chain binding protein
  misc_feature (1)..(546): Homolog of NCBI NO: 6016151 NR Description: Luminal binding protein 3 precursor (BiP3)
  misc_feature (1)..(562): Homolog of NCBI NO: 14423732 NR Description: Heat shock 70 kDa protein
  misc_feature (1)..(537): Homolog of NCBI NO: 21263753 NR Description: Heat shock cognate 71 kDa protein (Hsc70.1)
  misc_feature (35)..(557): Homolog of NCBI NO: 4164594 NR Description: heat shock protein 70 [Paracoccidioides
  misc_feature (1)..(546): Homolog of NCBI NO: 23480384 NR Description: heat shock protein [Plasmodium yoelii yoelii]
  misc_feature (1)..(546): Homolog of NCBI NO: 29539338 NR Description: Heat shock 70 kDa protein [Cyanidioschyzon
  misc_feature (1)..(537): Homolog of NCBI NO: 481576 NR Description: dnaK-type molecular chaperone GRP78/BiP -
  misc_feature (1)..(546): Homolog of NCBI NO: 1037176 NR Description: immunoglobulin heavy chain binding protein
  misc_feature (1)..(546): Homolog of NCBI NO: 6016151 NR Description: Luminal binding protein 3 precursor (BiP3)
  misc_feature (1)..(562): Homolog of NCBI NO: 14423732 NR Description: Heat shock 70 kDa protein
  misc_feature (1)..(537): Homolog of NCBI NO: 21263753 NR Description: Heat shock cognate 71 kDa protein (Hsc70.1)
  misc_feature (35)..(557): Homolog of NCBI NO: 4164594 NR Description: heat shock protein 70 [Paracoccidioides
  misc_feature (1)..(546): Homolog of NCBI NO: 23480384 NR Description: heat shock protein [Plasmodium yoelii yoelii]
  misc_feature (1)..(546): Homolog of NCBI NO: 29539338 NR Description: Heat shock 70 kDa protein [Cyanidioschyzon
  misc_feature (1)..(537): Homolog of NCBI NO: 481576 NR Description: dnaK-type molecular chaperone GRP78/BiP -
  misc_feature (1)..(546): Homolog of NCBI NO: 1037176 NR Description: immunoglobulin heavy chain binding protein
  misc_feature (1)..(546): Homolog of NCBI NO: 6016151 NR Description: Luminal binding protein 3 precursor (BiP3)
  misc_feature (1)..(562): Homolog of NCBI NO: 14423732 NR Description: Heat shock 70 kDa protein
  misc_feature (1)..(537): Homolog of NCBI NO: 21263753 NR Description: Heat shock cognate 71 kDa protein (Hsc70.1)
  misc_feature (1)..(546): Homolog of NCBI NO: 29539338 NR Description: Heat shock 70 kDa protein [Cyanidioschyzon
  misc_feature (1)..(537): Homolog of NCBI NO: 481576 NR Description: dnaK-type molecular chaperone GRP78/BiP -
  misc_feature (1)..(546): Homolog of NCBI NO: 1037176 NR Description: immunoglobulin heavy chain binding protein
  misc_feature (1)..(546): Homolog of NCBI NO: 6016151 NR Description: Luminal binding protein 3 precursor (BiP3)
  misc_feature (1)..(562): Homolog of NCBI NO: 14423732 NR Description: Heat shock 70 kDa protein
  misc_feature (1)..(537): Homolog of NCBI NO: 21263753 NR Description: Heat shock cognate 71 kDa protein (Hsc70.1)
  misc_feature (35)..(557): Homolog of NCBI NO: 4164594 NR Description: heat shock protein 70 [Paracoccidioides
  misc_feature (1)..(546): Homolog of NCBI NO: 23480384 NR Description: heat shock protein [Plasmodium yoelii yoelii]
  misc_feature (35)..(557): Homolog of NCBI NO: 4164594 NR Description: heat shock protein 70 [Paracoccidioides
  misc_feature (1)..(546): Homolog of NCBI NO: 23480384 NR Description: heat shock protein [Plasmodium yoelii yoelii]
  misc_feature (1)..(546): Homolog of NCBI NO: 29539338 NR Description: Heat shock 70 kDa protein [Cyanidioschyzon
  misc_feature (1)..(537): Homolog of NCBI NO: 481576 NR Description: dnaK-type molecular chaperone GRP78/BiP -
  misc_feature (1)..(546): Homolog of NCBI NO: 1037176 NR Description: immunoglobulin heavy chain binding protein
  misc_feature (1)..(546): Homolog of NCBI NO: 6016151 NR Description: Luminal binding protein 3 precursor (BiP3)
  misc_feature (1)..(562): Homolog of NCBI NO: 14423732 NR Description: Heat shock 70 kDa protein
  misc_feature (1)..(537): Homolog of NCBI NO: 21263753 NR Description: Heat shock cognate 71 kDa protein (Hsc70.1)

SEQ ID NO: 46655 - DNA, 1664 bp, Arabidopsis thaliana
  misc_feature (1)..(1664): Ceres Seq. ID no. 15168927
  misc_feature: MA Experiment ID: 20000173 Result: Down-regulated in Transcription
  misc_feature: MA Experiment 20000173 PARAMETER Experiment Name: At_42deg_Heat_P Parameter: Age (day) Value: 14
  misc_feature: MA Experiment 20000173 PARAMETER Experiment Name: At_42deg_Heat_P Parameter: Organism Value: A. thaliana
  misc_feature: MA Experiment 20000173 PARAMETER Experiment Name: At_42deg_Heat_P Parameter: Plant Line Value: WS
  misc_feature: MA Experiment 20000173 PARAMETER Experiment Name: At_42deg_Heat_P Parameter: Temperature (deg C) Value: 42 vs. 22
  misc_feature: MA Experiment 20000173 PARAMETER Experiment Name: At_42deg_Heat_P Parameter: Timepoint (hr) Value: 6
  misc_feature: MA Experiment 20000173 PARAMETER Experiment Name: At_42deg_Heat_P Parameter: Tissue Value: Aerial
  misc_feature: MA Experiment ID: 20000179 Result: Down-regulated in Transcription
  misc_feature: MA Experiment 20000179 PARAMETER Experiment Name: At_Germinating_Seeds_P Parameter: Age (hr) Value: 6 vs. 0
  misc_feature: MA Experiment 20000179 PARAMETER Experiment Name: At_Germinating_Seeds_P Parameter: Tissue Value: Germinating Seeds
  misc_feature: MA Experiment ID: 20000184 Result: Down-regulated in Transcription
  misc_feature: MA Experiment 20000184 PARAMETER Experiment Name: At_Shoots__P Parameter: Age (day) Value: 7
  misc_feature: MA Experiment 20000184 PARAMETER Experiment Name: At_Shoots__P Parameter: Tissue Value: Shoots vs. Whole Plant
  misc_feature: MA Experiment ID: 20000227 Result: Up-regulated in Transcription
  misc_feature: MA Experiment 20000227 PARAMETER Experiment Name: At_Root-Tips-vs-Tops_P Parameter: Tissue Value: Root Tips vs. Root Tops
tctcgaatttttccgaaacctgtgttttcccatcaccaagctttctctgaatcgccgccgtgtttacatttactgttgttaaggccgagagatagatagaaaaaaacatctgtgcgattttgccgcctctccctaaaatctttggagctccttcgtagttagccggaggtgaagtacaataaaagaaagaagaaagtccaagtgtctcttctcatctcttttctccagtagtttactagtgatagcagataatggaggggagattggctaatatgtggaggttgactgttaacgaaagtaaattcgtggaaactgcgttgcaatctgagctcagagtagatggtcgtggcctttatgattatcgcaagcttactattaagtttggcaaagaatatggtagctcggaagttcaacttggtcagactcatgtaatgggtttcgtgactgctcagttggtacaaccttacaaagacagacctaatgaagggtctctctcgatcttcacggaattttctccaatggctgatccgtcttttgagcctggtcgtcctggcgaatctgcagtggagttgggacgcattatcgatcgtggtctaagagaaagccgtgcagtagatacagagtcactctgcgttctagctggaaagatggtttggtctgttcgcattgaccttcatatcttggacaatggagggaacttagttgatgctgcaaatattgctgctttagcagctctcaaggaggagagaatggtcaagaagtgatcatacatccactagaggaaagggaaccacttccattgataatacatcatctcccaatagccttcacgtttggattttttaataaaggcaacattgtggtgatggacccaacttatgttgaagaagcagttatgtgtgggagaatgactgtgacagttaatgccaatggcgatatatgcgcaatccaaaaaccgggggaagaaggcgtgaaccagagtgtaatccttcattgcctgcgtcttgcttcttcaagagctgctgcaacaacaaagatcattagagaagaagttgaagcatataactgtgagagaagcttacagaaggtgaagcgacatcccactttggctaaatctgaagtttctggacctactgtagctgtgaaggaggaacataggaagtcctcagatcaggaaagagctgcagagatatctcgagaacatgttgaaagactaaagctctctacggaggaagtaagaagcagtaaggaagaagaagctgccaatttcaaaggcggtccctcaaattgggacccttactcagaagctatggatgttgattcactgaaagtttctcttgcttcaagaggggatcccgttactaagtcatcgagcacgaagaaaatgaacggctctggaaatgcgcagaaggttggtgttgagatttcagttgaggaagtaaccggagaattagggaagaaggatacaaaacacaaggatggagaaatgacacttaaagatgctgtcaaacctaaaaagaagcggaaaaacaaaagctgagttaaagcattttcccgatcactcgtacttttcttcttcccttgaaactcaagactatagacggtttatggtcaattgtatctgaaaaaagtcaaaagttttgttaaattttgtttcataaaag

SEQ ID NO: 46656 - protein, 224 aa, Arabidopsis thaliana
  peptide (1)..(224): Ceres Seq. ID no. 15168928
  misc_feature (1)..(51): Pfam Name: 3' exoribonuclease family, domain 2 Pfam Description: 3' exoribonuclease family, domain 2
  misc_feature (1)..(112): Homolog of NCBI NO: 14285675 NR Description: Exosome complex exonuclease RRP45 autoantigen 1) (Autoantigen PM/Scl 1) (Polymyositis/scleroderma
  misc_feature (1)..(64): Homolog of NCBI NO: 19075183 NR Description: putative exosome 3'-5' exoribonuclease complex
  misc_feature (1)..(112): Homolog of NCBI NO: 28172868 NR Description: polymyositis/scleroderma autoantigen 1 [Homo
  misc_feature (1)..(112): Homolog of NCBI NO: 28172864 NR Description: polymyositis/scleroderma autoantigen 1 [Homo
  misc_feature (1)..(112): Homolog of NCBI NO: 34856829 NR Description: similar to polymyositis scleroderma overlap
  misc_feature (1)..(112): Homolog of NCBI NO: 12847890 NR Description: unnamed protein product [Mus musculus]
  misc_feature (1)..(112): Homolog of NCBI NO: 9506981 NR Description: polymyositis/scleroderma autoantigen 1 [Mus
  misc_feature (1)..(93): Homolog of NCBI NO: 21536581 NR Description: nucleolar autoantigen-like protein [Arabidopsis
  misc_feature (1)..(93): Homolog of NCBI NO: 18399822 NR Description: expressed protein [Arabidopsis thaliana]
  misc_feature (1)..(224): Homolog of NCBI NO: 15232342 NR Description: nucleolar autoantigen - like protein [Arabidopsis
MDPTYVEEAVMCGRMTVTVNANGDICAIQKPGEEGVNQSVILHCLRLASSRAAATTKIIREEVEAYNCERSLQKVKRHPTLAKSEVSGPTVAVKEEHRKSSDQERAAEISREHVERLKLSTEEVRSSKEEEAANFKGGPSNWDPYSEAMDVDSLKVSLASRGDPVTKSSSTKKMNGSGNAQKVGVEISVEEVTGELGKKDTKHKDGEMTLKDAVKPKKKRKNKS

SEQ ID NO: 46657 - protein, 214 aa, Arabidopsis thaliana
  peptide (1)..(214): Ceres Seq. ID no. 15168929
  misc_feature (1)..(102): Homolog of NCBI NO: 14285675 NR Description: Exosome complex exonuclease RRP45 autoantigen 1) (Autoantigen PM/Scl 1) (Polymyositis/scleroderma
  misc_feature (1)..(54): Homolog of NCBI NO: 19075183 NR Description: putative exosome 3'-5' exoribonuclease complex
  misc_feature (1)..(102): Homolog of NCBI NO: 28172868 NR Description: polymyositis/scleroderma autoantigen 1 [Homo
  misc_feature (1)..(102): Homolog of NCBI NO: 28172864 NR Description: polymyositis/scleroderma autoantigen 1 [Homo
  misc_feature (1)..(102): Homolog of NCBI NO: 34856829 NR Description: similar to polymyositis scleroderma overlap
  misc_feature (1)..(102): Homolog of NCBI NO: 12847890 NR Description: unnamed protein product [Mus musculus]
  misc_feature (1)..(102): Homolog of NCBI NO: 9506981 NR Description: polymyositis/scleroderma autoantigen 1 [Mus
  misc_feature (1)..(83): Homolog of NCBI NO: 21536581 NR Description: nucleolar autoantigen-like protein [Arabidopsis
  misc_feature (1)..(83): Homolog of NCBI NO: 18399822 NR Description: expressed protein [Arabidopsis thaliana]
  misc_feature (1)..(214): Homolog of NCBI NO: 15232342 NR Description: nucleolar autoantigen - like protein [Arabidopsis
MCGRMTVTVNANGDICAIQKPGEEGVNQSVILHCLRLASSRAAATTKIIREEVEAYNCERSLQKVKRHPTLAKSEVSGPTVAVKEEHRKSSDQERAAEISREHVERLKLSTEEVRSSKEEEAANFKGGPSNWDPYSEAMDVDSLKVSLASRGDPVTKSSSTKKMNGSGNAQKVGVEISVEEVTGELGKKDTKHKDGEMTLKDAVKPKKKRKNKS

SEQ ID NO: 46658 - protein, 210 aa, Arabidopsis thaliana
  peptide (1)..(210): Ceres Seq. ID no. 15168930
  misc_feature (1)..(98): Homolog of NCBI NO: 14285675 NR Description: Exosome complex exonuclease RRP45 autoantigen 1) (Autoantigen PM/Scl 1) (Polymyositis/scleroderma
  misc_feature (1)..(50): Homolog of NCBI NO: 19075183 NR Description: putative exosome 3'-5' exoribonuclease complex
  misc_feature (1)..(98): Homolog of NCBI NO: 28172868 NR Description: polymyositis/scleroderma autoantigen 1 [Homo
  misc_feature (1)..(98): Homolog of NCBI NO: 28172864 NR Description: polymyositis/scleroderma autoantigen 1 [Homo
  misc_feature (1)..(98): Homolog of NCBI NO: 34856829 NR Description: similar to polymyositis scleroderma overlap
  misc_feature (1)..(98): Homolog of NCBI NO: 12847890 NR Description: unnamed protein product [Mus musculus]
  misc_feature (1)..(98): Homolog of NCBI NO: 9506981 NR Description: polymyositis/scleroderma autoantigen 1 [Mus
  misc_feature (1)..(79): Homolog of NCBI NO: 21536581 NR Description: nucleolar autoantigen-like protein [Arabidopsis
  misc_feature (1)..(79): Homolog of NCBI NO: 18399822 NR Description: expressed protein [Arabidopsis thaliana]
  misc_feature (1)..(210): Homolog of NCBI NO: 15232342 NR Description: nucleolar autoantigen - like protein [Arabidopsis
MTVTVNANGDICAIQKPGEEGVNQSVILHCLRLASSRAAATTKIIREEVEAYNCERSLQKVKRHPTLAKSEVSGPTVAVKEEHRKSSDQERAAEISREHVERLKLSTEEVRSSKEEEAANFKGGPSNWDPYSEAMDVDSLKVSLASRGDPVTKSSSTKKMNGSGNAQKVGVEISVEEVTGELGKKDTKHKDGEMTLKDAVKPKKKRKNKS

SEQ ID NO: 46659 - DNA, 1833 bp, Arabidopsis thaliana
  misc_feature (1)..(1833): Ceres Seq. ID no. 12575340
  misc_feature: MA Experiment ID: 20000173 Result: Down-regulated in Transcription
  misc_feature: MA Experiment 20000173 PARAMETER Experiment Name: At_42deg_Heat_P Parameter: Age (day) Value: 14
  misc_feature: MA Experiment 20000173 PARAMETER Experiment Name: At_42deg_Heat_P Parameter: Organism Value: A. thaliana
  misc_feature: MA Experiment 20000173 PARAMETER Experiment Name: At_42deg_Heat_P Parameter: Plant Line Value: WS
  misc_feature: MA Experiment 20000173 PARAMETER Experiment Name: At_42deg_Heat_P Parameter: Temperature (deg C) Value: 42 vs. 22
  misc_feature: MA Experiment 20000173 PARAMETER Experiment Name: At_42deg_Heat_P Parameter: Timepoint (hr) Value: 6
  misc_feature: MA Experiment 20000173 PARAMETER Experiment Name: At_42deg_Heat_P Parameter: Tissue Value: Aerial
  misc_feature: MA Experiment ID: 20000184 Result: Down-regulated in Transcription
  misc_feature: MA Experiment 20000184 PARAMETER Experiment Name: At_Shoots__P Parameter: Age (day) Value: 7
  misc_feature: MA Experiment 20000184 PARAMETER Experiment Name: At_Shoots__P Parameter: Tissue Value: Shoots vs. Whole Plant
agagagattctaaaaatctttcaatcccacagattcggatttgtactccatactcatggaagcttcgatttcgtttctggggtcaacaaaacccaatatttccttgtttaacccttcttcaaacgtccttcctcgtagagatttccctcttcctgctttgaaattgaagaaagtttcagtgctgcctcgaatcttgcaccagaaacgactcatcagagctcagtgctctgatggattcaaaccagaggaagacgatgggtttgtcctagaagacgttcctcacttgaccaaatttctccctgatttaccgtcatatccaaatccattgaaagaaagccaagcatatgccattgttaagcgaacttttgtcagttccgaagatgtggttgcgcaaaatattgtagtccagaagggaagtaagcgaggagtacactttaggcgagcagggcctcgagaaagagtgtacttcagatcagatgaagtaaaagcttgcatagtgacttgtgggggcttgtgccctggaatcaatactgttatacgggaaattgtatgtggattgaacaatatgtatggtgttaataacattctcggcattcagggaggatatagaggcttttactccaaaaacactatgaacctgacacctaaagtagttaacgatattcataaacgcggtggcacttttcttcaaacctcaagaggaggacatgatacagcgaagattgttgataatattcaagatagaggaataaatcaggtatatattattggaggtggtgggacgcaaaagggtgcagagaagatatacgaggaagttgagaggcgtggtcttcaagtggcggtttctggcattcctaagacaattgataatgatattgctgtgattgacaaatcatttggctttgatacggcggttgaggaagcacaacgagctattaatgctgcacatgtagaggtcgagagcgtggaaaatggagttggtatcgttaaactcatgggcagatacagtggttttattgccatgattgcaactttagcgaatcgtgatgtggattgttgcttgattccagagtctccattttttcttgaaggaaagggtgggctctttgagtttattgaagaacgactcaaagagaataggcacatggttattgtgatagctgaaggagctggacaggattatgttgctcaaagcatgcgtgcatctgaaactaaagacgcctcaggaaatagactcttgcttgatgttggtctatggttgactcaacagataaaggatcactttacaaatgttcggaaaatgatgataaatatgaagtacatagacccaacgtatatgataagagcaataccgagtaacgcatcagacaatgtctattgcactcttcttgcccaaagtgcagttcatggagcaatggctgggtactcaggtttcactgtaggaccagttaacagtagacatgcttacatcccaatttctcaggtgacggaagtgacaaatacggtgaagttaactgataggatgtgggctagactccttgcatcgacaaatcaaccgagtttcttgactggtgaaggagcattgcagaatgtgatcgacatggaaactcaagaaaagatcgataacatgaagatctcttctatctaagaaacaggtcagttgatattcatcaactgttccaaatgtatactagatatatatgcataggagatatctttatcaaaaaaccatgaagtaatttcattgttataacttataagaattctttggttttagttattcctaataataataatcaacatccatctcaacgatgaggttgagatgttaat

SEQ ID NO: 46660 - protein, 530 aa, Arabidopsis thaliana
  peptide (1)..(530): Ceres Seq. ID no. 12575341
  misc_feature (144)..(397): Pfam Name: Phosphofructokinase Pfam Description: Phosphofructokinase
  misc_feature (68)..(504): Homolog of NCBI NO: 22136018 NR Description: pyrophosphate-dependent
  misc_feature (68)..(504): Homolog of NCBI NO: 10176767 NR Description: pyrophosphate-dependent
  misc_feature (68)..(504): Homolog of NCBI NO: 15233495 NR Description: pyrophosphate-dependent
  misc_feature (68)..(504): Homolog of NCBI NO: 18423885 NR Description: pyrophosphate-dependent
  misc_feature (66)..(101): Homolog of NCBI NO: 34906422 NR Description: putative pyrophosphate-dependent
  misc_feature (62)..(100): Homolog of NCBI NO: 34909350 NR Description: putative pyrophosphate--fructose-6-phosphate1
  misc_feature (101)..(507): Homolog of NCBI NO: 34906422 NR Description: putative pyrophosphate-dependent
  misc_feature (81)..(505): Homolog of NCBI NO: 34909350 NR Description: putative pyrophosphate--fructose-6-phosphate1
  misc_feature (68)..(512): Homolog of NCBI NO: 18416717 NR Description: pyrophosphate-dependent phosphofructo-1-kinase
  misc_feature (1)..(530): Homolog of NCBI NO: 22328001 NR Description: pyrophosphate-dependent phosphofructo-1-kinase -
MEASISFLGSTKPNISLFNPSSNVLPRRDFPLPALKLKKVSVLPRILHQKRLIRAQCSDGFKPEEDDGFVLEDVPHLTKFLPDLPSYPNPLKESQAYAIVKRTFVSSEDVVAQNIVVQKGSKRGVHFRRAGPRERVYFRSDEVKACIVTCGGLCPGINTVIREIVCGLNNMYGVNNILGIQGGYRGFYSKNTMNLTPKVVNDIHKRGGTFLQTSRGGHDTAKIVDNIQDRGINQVYIIGGGGTQKGAEKIYEEVERRGLQVAVSGIPKTIDNDIAVIDKSFGFDTAVEEAQRAINAAHVEVESVENGVGIVKLMGRYSGFIAMIATLANRDVDCCLIPESPFFLEGKGGLFEFIEERLKENRHMVIVIAEGAGQDYVAQSMRASETKDASGNRLLLDVGLWLTQQIKDHFTNVRKMMINMKYIDPTYMIRAIPSNASDNVYCTLLAQSAVHGAMAGYSGFTVGPVNSRHAYIPISQVTEVTNTVKLTDRMWARLLASTNQPSFLTGEGALQNVIDMETQEKIDNMKISSI

SEQ ID NO: 46661 - protein, 360 aa, Arabidopsis thaliana
  peptide (1)..(360): Ceres Seq. ID no. 12575342
  misc_feature (1)..(227): Pfam Name: Phosphofructokinase Pfam Description: Phosphofructokinase
  misc_feature (1)..(334): Homolog of NCBI NO: 21593599 NR Description: putative pyrophosphate--fructose-6-phosphate
  misc_feature (1)..(334): Homolog of NCBI NO: 15233959 NR Description: putative pyrophosphate--fructose-6-phosphate
  misc_feature (1)..(334): Homolog of NCBI NO: 22136018 NR Description: pyrophosphate-dependent
  misc_feature (1)..(334): Homolog of NCBI NO: 10176767 NR Description: pyrophosphate-dependent
  misc_feature (1)..(334): Homolog of NCBI NO: 15233495 NR Description: pyrophosphate-dependent
  misc_feature (1)..(334): Homolog of NCBI NO: 18423885 NR Description: pyrophosphate-dependent
  misc_feature (1)..(337): Homolog of NCBI NO: 34906422 NR Description: putative pyrophosphate-dependent
  misc_feature (1)..(335): Homolog of NCBI NO: 34909350 NR Description: putative pyrophosphate--fructose-6-phosphate1
  misc_feature (1)..(342): Homolog of NCBI NO: 18416717 NR Description: pyrophosphate-dependent phosphofructo-1-kinase
  misc_feature (1)..(360): Homolog of NCBI NO: 22328001 NR Description: pyrophosphate-dependent phosphofructo-1-kinase -
MYGVNNILGIQGGYRGFYSKNTMNLTPKVVNDIHKRGGTFLQTSRGGHDTAKIVDNIQDRGINQVYIIGGGGTQKGAEKIYEEVERRGLQVAVSGIPKTIDNDIAVIDKSFGFDTAVEEAQRAINAAHVEVESVENGVGIVKLMGRYSGFIAMIATLANRDVDCCLIPESPFFLEGKGGLFEFIEERLKENRHMVIVIAEGAGQDYVAQSMRASETKDASGNRLLLDVGLWLTQQIKDHFTNVRKMMINMKYIDPTYMIRAIPSNASDNVYCTLLAQSAVHGAMAGYSGFTVGPVNSRHAYIPISQVTEVTNTVKLTDRMWARLLASTNQPSFLTGEGALQNVIDMETQEKIDNMKISSI

SEQ ID NO: 46662 - protein, 338 aa, Arabidopsis thaliana
  peptide (1)..(338): Ceres Seq. ID no. 12575343
  misc_feature (1)..(205): Pfam Name: Phosphofructokinase Pfam Description: Phosphofructokinase
  misc_feature (1)..(312): Homolog of NCBI NO: 21593599 NR Description: putative pyrophosphate--fructose-6-phosphate
  misc_feature (1)..(312): Homolog of NCBI NO: 15233959 NR Description: putative pyrophosphate--fructose-6-phosphate
  misc_feature (1)..(312): Homolog of NCBI NO: 22136018 NR Description: pyrophosphate-dependent
  misc_feature (1)..(312): Homolog of NCBI NO: 10176767 NR Description: pyrophosphate-dependent
  misc_feature (1)..(312): Homolog of NCBI NO: 15233495 NR Description: pyrophosphate-dependent
  misc_feature (1)..(312): Homolog of NCBI NO: 18423885 NR Description: pyrophosphate-dependent
  misc_feature (1)..(315): Homolog of NCBI NO: 34906422 NR Description: putative pyrophosphate-dependent
  misc_feature (1)..(313): Homolog of NCBI NO: 34909350 NR Description: putative pyrophosphate--fructose-6-phosphate1
  misc_feature (1)..(320): Homolog of NCBI NO: 18416717 NR Description: pyrophosphate-dependent phosphofructo-1-kinase
  misc_feature (1)..(338): Homolog of NCBI NO: 22328001 NR Description: pyrophosphate-dependent phosphofructo-1-kinase -
MNLTPKVVNDIHKRGGTFLQTSRGGHDTAKIVDNIQDRGINQVYIIGGGGTQKGAEKIYEEVERRGLQVAVSGIPKTIDNDIAVIDKSFGFDTAVEEAQRAINAAHVEVESVENGVGIVKLMGRYSGFIAMIATLANRDVDCCLIPESPFFLEGKGGLFEFIEERLKENRHMVIVIAEGAGQDYVAQSMRASETKDASGNRLLLDVGLWLTQQIKDHFTNVRKMMINMKYIDPTYMIRAIPSNASDNVYCTLLAQSAVHGAMAGYSGFTVGPVNSRHAYIPISQVTEVTNTVKLTDRMWARLLASTNQPSFLTGEGALQNVIDMETQEKIDNMKISSI

SEQ ID NO: 46663 - DNA, 2851 bp, Arabidopsis thaliana
  misc_feature (1)..(2851): Ceres Seq. ID no. 12639101
  misc_feature: MA Experiment ID: 20000173 Result: Down-regulated in Transcription
  misc_feature: MA Experiment 20000173 PARAMETER Experiment Name: At_42deg_Heat_P Parameter: Age (day) Value: 14
  misc_feature: MA Experiment 20000173 PARAMETER Experiment Name: At_42deg_Heat_P Parameter: Organism Value: A. thaliana
  misc_feature: MA Experiment 20000173 PARAMETER Experiment Name: At_42deg_Heat_P Parameter: Plant Line Value: WS
  misc_feature: MA Experiment 20000173 PARAMETER Experiment Name: At_42deg_Heat_P Parameter: Temperature (deg C) Value: 42 vs. 22
  misc_feature: MA Experiment 20000173 PARAMETER Experiment Name: At_42deg_Heat_P Parameter: Timepoint (hr) Value: 6
  misc_feature: MA Experiment 20000173 PARAMETER Experiment Name: At_42deg_Heat_P Parameter: Tissue Value: Aerial
  misc_feature: MA Experiment ID: 20000180 Result: Down-regulated in Transcription
  misc_feature: MA Experiment 20000180 PARAMETER Experiment Name: At_Germinating_Seeds_P Parameter: Age (hr) Value: 24 vs. 0
  misc_feature: MA Experiment 20000180 PARAMETER Experiment Name: At_Germinating_Seeds_P Parameter: Tissue Value: Germinating Seeds
  misc_feature: MA Experiment ID: 20000184 Result: Down-regulated in Transcription
  misc_feature: MA Experiment 20000184 PARAMETER Experiment Name: At_Shoots__P Parameter: Age (day) Value: 7
  misc_feature: MA Experiment 20000184 PARAMETER Experiment Name: At_Shoots__P Parameter: Tissue Value: Shoots vs. Whole Plant
tcgtttccgacgagtttcacggtgaagaactccaattcggggagcacctcgtctttcagctcagatggaagataagggaaagggtgtggtggaaggagatgaggggaacttgatttctgagttagaagaaggtccaagcaatatggaatgtgacaagcaagtacttggtggtgatactaattatgatgataaagacttaaacagtgatgaagaaggtctggtagatgatgatgatgatgatagtgatgatgatgatgagggagatgagtcagaagaagaagatgactttgaagctggaagtgtcccaaacacgtttgaacgacctgagtatgaagctctggctgagaggaaacgcaaagcacttgctgattctcaacgtaatcctagtaacatctcgaatagcacctcgggcgtggagggattcatggaatttatgtcttctggtcgccgacggaaatccaggaagtataagaaaaagggtagaagacctgggtcaaagaaagaagttgcacctgacattctaaagaggtttagggaggctctttttcttcatgcacatggccgtgacattgaggctttacctattttagtagaagttattaagcaagcaccagctttcgatatagcatactattacctttcacgtgtttctgagcaacttggtaagaccgaatcatcctctacggaagcattaaagattgctgcaaatatcaaaggttcaaaatcacctttttggaagttgctttatgagaggttcaaggaacaagagaacatttcggtagcaaggagttatgcgtcgaaagcaattcaagctgatccagatgatatccctttgaaatatgaatatgcagacatctgcctaaatactggaaaatatagagaagctgctgaaacctttgagcaaatatttcgtcggtgtcctgagagaattgaagcactcaagtggggggtacagtatttccttaaatccggtgagggtgaacgagcagcgagcatcttagaggatcatatcaaatcccattcatctgaagtggggcacgatgtcttggatttactggcttctgttttcatgaaaattaatgcgcatgatagagctcttaagtatattcacgatgtgcgccagatttacaatgttggaaaagaattgtcttccagcttgaaaatcagacaagccatctgtcatgttcaccttgaagaaatggagcaggcagagagcgtgttaagcattctaccacaggaggctgtatctgaacatccagagctcatcaccaatttggctgatgagctaacaaacattgggaatttccactctgctctcaaatactatatagaagcaatcagtgaacctgtgaatggcaatttgtttgtaaaaattgctcgctgttatatgtcattggaagaaagaaaacaggccattgttttctattataaagctctgaatgaactcagtgatacggttgatgttcgcataactctggcttcactcctcctggaagatggcaaacgagatgaagctgtattagtgctttctcctccggaaaatccagtgtagatcctgatacggctaaactgaaggcatggtggaaaaacagaaagatcaggatgaatctttgtcagatctatcattcagagggaatgctggaggacttcgccaatacagcactgcagttggtacttaagtgggtttggcggcggacggtcaaggggaaaagaaaacgactggttctttcagagcatcaaagaaacaaaaaacgccgacgtcctagagatgctcaagcttcccagttgagagggggaccaaaaaagtggcgcaaaatcagggcaacgttaaatgaaacaagaagaattagagaacgagctgctattaaagctcataacgaagatgtctgcagtgaatctgaggaagaagttatcaaggatgaagagtatcaccgtctctttgtggatttgtgcaaggcattggcatccctacagagatattgggaagctctggagatagttaatttggctcggagattggatgctaaaatgctgcctgttgagacaaaaaaggagcttcagtcacttggagctaaaatatcttgcgatactatggatccaaagcagtggtttgactgtgtaagatctgtcattcagcaacatccatatcgtttgaatgcctggaactgctattacagtgtcatttcgagactagggaaaagagcatcgactgaagctaagttcatgcatcacttaaggagcaagtaccgagattgcgtaccccccattcttattgctggtcatcacttcaccgtgacaagccgacatcaagatgctgcaagagaataccttgaagcatataaattaatgcctgagagtcctttaattaacctgtgtgtgggagctgcgttaatcaacttagccctcggttttcgactcaaaaacagacacgagtgtcttgctcaaggctttgcatttctgtacaacaatctcagaatttgcagtaacagtcaggaggcgttatacaacgttgctcgagcgtatcagcatgtaggactagtgactcttgcagcttcatactacgagaaggtgttagcgatttacgagaaagattacacgatgccgaaacttcctaacgaggatccgattgttgcggaagagcggaagcctgtgaactgtgacctacgcaaagaagctgcacacaatctgcatttgatctataagcacagtggagcgtttgatctcgcgaggcaagtattaaaggatcactgcactttctgagtctcgtaatcattgtccttgttttttcaaacgaagataaaacactagggaactgttccagtttatttaaagggaacaaagtttgtttttc

SEQ ID NO: 46664 - protein, 495 aa, Arabidopsis thaliana
  peptide (1)..(495): Ceres Seq. ID no. 12639102
  misc_feature (255)..(288): Pfam Name: TPR Domain Pfam Description: TPR Domain
  misc_feature (255)..(288): Pfam Name: TPR Domain Pfam Description: TPR Domain
  misc_feature (30)..(350): Homolog of NCBI NO: 34783387 NR Description: GTF3C3 protein [Homo sapiens]
  misc_feature (30)..(350): Homolog of NCBI NO: 18481637 NR Description: transcription factor IIIC102 short isoform [Homo
  misc_feature (365)..(487): Homolog of NCBI NO: 6321484 NR Description: transcription factor tau (TFIIIC) subunit 131;
  misc_feature (46)..(222): Homolog of NCBI NO: 7511370 NR Description: hypothetical protein ZK856.9 - Caenorhabditis
  misc_feature (46)..(222): Homolog of NCBI NO: 17566944 NR Description: TPR domain containing protein (119.0 kD)
  misc_feature (30)..(350): Homolog of NCBI NO: 34783387 NR Description: GTF3C3 protein [Homo sapiens]
  misc_feature (365)..(487): Homolog of NCBI NO: 6321484 NR Description: transcription factor tau (TFIIIC) subunit 131;
  misc_feature (46)..(222): Homolog of NCBI NO: 17566944 NR Description: TPR domain containing protein (119.0 kD)
  misc_feature (30)..(451): Homolog of NCBI NO: 6912398 NR Description: general transcription factor IIIC, polypeptide 3,
  misc_feature (30)..(451): Homolog of NCBI NO: 28175202 NR Description: similar to general transcription factor IIIC,
  misc_feature (130)..(451): Homolog of NCBI NO: 34875864 NR Description: similar to general transcription factor IIIC,
  misc_feature (171)..(451): Homolog of NCBI NO: 11360230 NR Description: hypothetical protein DKFZp761E129.1 - human
  misc_feature (366)..(491): Homolog of NCBI NO: 24654335 NR Description: CG8950-PA [Drosophila melanogaster]
  misc_feature (46)..(222): Homolog of NCBI NO: 7511370 NR Description: hypothetical protein ZK856.9 - Caenorhabditis
  misc_feature (30)..(350): Homolog of NCBI NO: 18481637 NR Description: transcription factor IIIC102 short isoform [Homo
  misc_feature (366)..(491): Homolog of NCBI NO: 24654335 NR Description: CG8950-PA [Drosophila melanogaster]
  misc_feature (171)..(451): Homolog of NCBI NO: 11360230 NR Description: hypothetical protein DKFZp761E129.1 - human
  misc_feature (130)..(451): Homolog of NCBI NO: 34875864 NR Description: similar to general transcription factor IIIC,
  misc_feature (30)..(451): Homolog of NCBI NO: 28175202 NR Description: similar to general transcription factor IIIC,
  misc_feature (30)..(451): Homolog of NCBI NO: 6912398 NR Description: general transcription factor IIIC, polypeptide 3,
MEDKGKGVVEGDEGNLISELEEGPSNMECDKQVLGGDTNYDDKDLNSDEEGLVDDDDDDSDDDDEGDESEEEDDFEAGSVPNTFERPEYEALAERKRKALADSQRNPSNISNSTSGVEGFMEFMSSGRRRKSRKYKKKGRRPGSKKEVAPDILKRFREALFLHAHGRDIEALPILVEVIKQAPAFDIAYYYLSRVSEQLGKTESSSTEALKIAANIKGSKSPFWKLLYERFKEQENISVARSYASKAIQADPDDIPLKYEYADICLNTGKYREAAETFEQIFRRCPERIEALKWGVQYFLKSGEGERAASILEDHIKSHSSEVGHDVLDLLASVFMKINAHDRALKYIHDVRQIYNVGKELSSSLKIRQAICHVHLEEMEQAESVLSILPQEAVSEHPELITNLADELTNIGNFHSALKYYIEAISEPVNGNLFVKIARCYMSLEERKQAIVFYYKALNELSDTVDVRITLASLLLEDGKRDEAVLVLSPPENPV

SEQ ID NO: 46665 - protein, 469 aa, Arabidopsis thaliana
  peptide (1)..(469): Ceres Seq. ID no. 12639103
  misc_feature (229)..(262): Pfam Name: TPR Domain Pfam Description: TPR Domain
  misc_feature (229)..(262): Pfam Name: TPR Domain Pfam Description: TPR Domain
  misc_feature (4)..(324): Homolog of NCBI NO: 34783387 NR Description: GTF3C3 protein [Homo sapiens]
  misc_feature (4)..(324): Homolog of NCBI NO: 18481637 NR Description: transcription factor IIIC102 short isoform [Homo
  misc_feature (339)..(461): Homolog of NCBI NO: 6321484 NR Description: transcription factor tau (TFIIIC) subunit 131;
  misc_feature (20)..(196): Homolog of NCBI NO: 7511370 NR Description: hypothetical protein ZK856.9 - Caenorhabditis
  misc_feature (20)..(196): Homolog of NCBI NO: 17566944 NR Description: TPR domain containing protein (119.0 kD)
  misc_feature (4)..(324): Homolog of NCBI NO: 34783387 NR Description: GTF3C3 protein [Homo sapiens]
  misc_feature (339)..(461): Homolog of NCBI NO: 6321484 NR Description: transcription factor tau (TFIIIC) subunit 131;
  misc_feature (20)..(196): Homolog of NCBI NO: 17566944 NR Description: TPR domain containing protein (119.0 kD)
  misc_feature (4)..(425): Homolog of NCBI NO: 6912398 NR Description: general transcription factor IIIC, polypeptide 3,
  misc_feature (4)..(425): Homolog of NCBI NO: 28175202 NR Description: similar to general transcription factor IIIC,
  misc_feature (104)..(425): Homolog of NCBI NO: 34875864 NR Description: similar to general transcription factor IIIC,
  misc_feature (145)..(425): Homolog of NCBI NO: 11360230 NR Description: hypothetical protein DKFZp761E129.1 - human
  misc_feature (340)..(465): Homolog of NCBI NO: 24654335 NR Description: CG8950-PA [Drosophila melanogaster]
  misc_feature (20)..(196): Homolog of NCBI NO: 7511370 NR Description: hypothetical protein ZK856.9 - Caenorhabditis
  misc_feature (4)..(324): Homolog of NCBI NO: 18481637 NR Description: transcription factor IIIC102 short isoform [Homo
  misc_feature (340)..(465): Homolog of NCBI NO: 24654335 NR Description: CG8950-PA [Drosophila melanogaster]
  misc_feature (145)..(425): Homolog of NCBI NO: 11360230 NR Description: hypothetical protein DKFZp761E129.1 - human
  misc_feature (104)..(425): Homolog of NCBI NO: 34875864 NR Description: similar to general transcription factor IIIC,
  misc_feature (4)..(425): Homolog of NCBI NO: 28175202 NR Description: similar to general transcription factor IIIC,
  misc_feature (4)..(425): Homolog of NCBI NO: 6912398 NR Description: general transcription factor IIIC, polypeptide 3,
MECDKQVLGGDTNYDDKDLNSDEEGLVDDDDDDSDDDDEGDESEEEDDFEAGSVPNTFERPEYEALAERKRKALADSQRNPSNISNSTSGVEGFMEFMSSGRRRKSRKYKKKGRRPGSKKEVAPDILKRFREALFLHAHGRDIEALPILVEVIKQAPAFDIAYYYLSRVSEQLGKTESSSTEALKIAANIKGSKSPFWKLLYERFKEQENISVARSYASKAIQADPDDIPLKYEYADICLNTGKYREAAETFEQIFRRCPERIEALKWGVQYFLKSGEGERAASILEDHIKSHSSEVGHDVLDLLASVFMKINAHDRALKYIHDVRQIYNVGKELSSSLKIRQAICHVHLEEMEQAESVLSILPQEAVSEHPELITNLADELTNIGNFHSALKYYIEAISEPVNGNLFVKIARCYMSLEERKQAIVFYYKALNELSDTVDVRITLASLLLEDGKRDEAVLVLSPPENPV

SEQ ID NO: 46666 - protein, 385 aa, Arabidopsis thaliana
  peptide (1)..(385): Ceres Seq. ID no. 12639104
  misc_feature (222)..(385): Homolog of NCBI NO: 19075424 NR Description: RNA polymerase III Transcriptioon factor (TF)IIIC
  misc_feature (184)..(382): Homolog of NCBI NO: 7511370 NR Description: hypothetical protein ZK856.9 - Caenorhabditis
  misc_feature (184)..(382): Homolog of NCBI NO: 17566944 NR Description: TPR domain containing protein (119.0 kD)
  misc_feature (170)..(383): Homolog of NCBI NO: 24654335 NR Description: CG8950-PA [Drosophila melanogaster]
  misc_feature (103)..(384): Homolog of NCBI NO: 10440070 NR Description: unnamed protein product [Homo sapiens]
  misc_feature (103)..(384): Homolog of NCBI NO: 16359058 NR Description: Similar to general transcription factor IIIC,
  misc_feature (103)..(384): Homolog of NCBI NO: 11360230 NR Description: hypothetical protein DKFZp761E129.1 - human
  misc_feature (166)..(383): Homolog of NCBI NO: 34875864 NR Description: similar to general transcription factor IIIC,
  misc_feature (103)..(384): Homolog of NCBI NO: 28175202 NR Description: similar to general transcription factor IIIC,
  misc_feature (103)..(384): Homolog of NCBI NO: 6912398 NR Description: general transcription factor IIIC, polypeptide 3,
  misc_feature (222)..(385): Homolog of NCBI NO: 19075424 NR Description: RNA polymerase III Transcriptioon factor (TF)IIIC
  misc_feature (184)..(382): Homolog of NCBI NO: 7511370 NR Description: hypothetical protein ZK856.9 - Caenorhabditis
  misc_feature (184)..(382): Homolog of NCBI NO: 17566944 NR Description: TPR domain containing protein (119.0 kD)
  misc_feature (170)..(383): Homolog of NCBI NO: 24654335 NR Description: CG8950-PA [Drosophila melanogaster]
  misc_feature (103)..(384): Homolog of NCBI NO: 10440070 NR Description: unnamed protein product [Homo sapiens]
  misc_feature (103)..(384): Homolog of NCBI NO: 16359058 NR Description: Similar to general transcription factor IIIC,
  misc_feature (103)..(384): Homolog of NCBI NO: 11360230 NR Description: hypothetical protein DKFZp761E129.1 - human
  misc_feature (166)..(383): Homolog of NCBI NO: 34875864 NR Description: similar to general transcription factor IIIC,
  misc_feature (103)..(384): Homolog of NCBI NO: 28175202 NR Description: similar to general transcription factor IIIC,
  misc_feature (103)..(384): Homolog of NCBI NO: 6912398 NR Description: general transcription factor IIIC, polypeptide 3,
MNLCQIYHSEGMLEDFANTALQLVLKWVWRRTVKGKRKRLVLSEHQRNKKRRRPRDAQASQLRGGPKKWRKIRATLNETRRIRERAAIKAHNEDVCSESEEEVIKDEEYHRLFVDLCKALASLQRYWEALEIVNLARRLDAKMLPVETKKELQSLGAKISCDTMDPKQWFDCVRSVIQQHPYRLNAWNCYYSVISRLGKRASTEAKFMHHLRSKYRDCVPPILIAGHHFTVTSRHQDAAREYLEAYKLMPESPLINLCVGAALINLALGFRLKNRHECLAQGFAFLYNNLRICSNSQEALYNVARAYQHVGLVTLAASYYEKVLAIYEKDYTMPKLPNEDPIVAEERKPVNCDLRKEAAHNLHLIYKHSGAFDLARQVLKDHCTF

SEQ ID NO: 46667 - DNA, 1181 bp, Arabidopsis thaliana
  misc_feature (1)..(1181): Ceres Seq. ID no. 12575352
  misc_feature: MA Experiment ID: 20000166 Result: Up-regulated in Transcription
  misc_feature: MA Experiment 20000166 PARAMETER Experiment Name: At_100uM_ABA_P Parameter: Age (day) Value: 14
  misc_feature: MA Experiment 20000166 PARAMETER Experiment Name: At_100uM_ABA_P Parameter: Organism Value: A. thaliana
  misc_feature: MA Experiment 20000166 PARAMETER Experiment Name: At_100uM_ABA_P Parameter: Plant Line Value: WS
  misc_feature: MA Experiment 20000166 PARAMETER Experiment Name: At_100uM_ABA_P Parameter: Timepoint (hr) Value: 1
  misc_feature: MA Experiment 20000166 PARAMETER Experiment Name: At_100uM_ABA_P Parameter: Tissue Value: Aerial
  misc_feature: MA Experiment 20000166 PARAMETER Experiment Name: At_100uM_ABA_P Parameter: Treatment Value: 100uM ABA vs. No Treatment
  misc_feature: MA Experiment ID: 20000169 Result: Up-regulated in Transcription
  misc_feature: MA Experiment 20000169 PARAMETER Experiment Name: At_100uM_ABA_P Parameter: Age (day) Value: 14
  misc_feature: MA Experiment 20000169 PARAMETER Experiment Name: At_100uM_ABA_P Parameter: Organism Value: A. thaliana
  misc_feature: MA Experiment 20000169 PARAMETER Experiment Name: At_100uM_ABA_P Parameter: Plant Line Value: WS
  misc_feature: MA Experiment 20000169 PARAMETER Experiment Name: At_100uM_ABA_P Parameter: Timepoint (hr) Value: 6
  misc_feature: MA Experiment 20000169 PARAMETER Experiment Name: At_100uM_ABA_P Parameter: Tissue Value: Aerial
  misc_feature: MA Experiment 20000169 PARAMETER Experiment Name: At_100uM_ABA_P Parameter: Treatment Value: 100uM ABA vs. No Treatment
  misc_feature: MA Experiment ID: 20000173 Result: Up-regulated in Transcription
  misc_feature: MA Experiment 20000173 PARAMETER Experiment Name: At_42deg_Heat_P Parameter: Age (day) Value: 14
  misc_feature: MA Experiment 20000173 PARAMETER Experiment Name: At_42deg_Heat_P Parameter: Organism Value: A. thaliana
  misc_feature: MA Experiment 20000173 PARAMETER Experiment Name: At_42deg_Heat_P Parameter: Plant Line Value: WS
  misc_feature: MA Experiment 20000173 PARAMETER Experiment Name: At_42deg_Heat_P Parameter: Temperature (deg C) Value: 42 vs. 22
  misc_feature: MA Experiment 20000173 PARAMETER Experiment Name: At_42deg_Heat_P Parameter: Timepoint (hr) Value: 6
  misc_feature: MA Experiment 20000173 PARAMETER Experiment Name: At_42deg_Heat_P Parameter: Tissue Value: Aerial
  misc_feature: MA Experiment ID: 20000182 Result: Up-regulated in Transcription
  misc_feature: MA Experiment 20000182 PARAMETER Experiment Name: At_2mM_SA_P Parameter: Age (day) Value: 14
  misc_feature: MA Experiment 20000182 PARAMETER Experiment Name: At_2mM_SA_P Parameter: Organism Value: A. thaliana
  misc_feature: MA Experiment 20000182 PARAMETER Experiment Name: At_2mM_SA_P Parameter: Plant Line Value: WS
  misc_feature: MA Experiment 20000182 PARAMETER Experiment Name: At_2mM_SA_P Parameter: Timepoint (hr) Value: 6
  misc_feature: MA Experiment 20000182 PARAMETER Experiment Name: At_2mM_SA_P Parameter: Tissue Value: Aerial
  misc_feature: MA Experiment 20000182 PARAMETER Experiment Name: At_2mM_SA_P Parameter: Treatment Value: 2mM SA vs. No Treatment
  misc_feature: MA Experiment ID: 20000267 Result: Up-regulated in Transcription
  misc_feature: MA Experiment 20000267 PARAMETER Experiment Name: At_Drought_P Parameter: Age (day) Value: 7
  misc_feature: MA Experiment 20000267 PARAMETER Experiment Name: At_Drought_P Parameter: Organism Value: A. thaliana
  misc_feature: MA Experiment 20000267 PARAMETER Experiment Name: At_Drought_P Parameter: Plant Line Value: WS
  misc_feature: MA Experiment 20000267 PARAMETER Experiment Name: At_Drought_P Parameter: Timepoint (hr) Value: 6
  misc_feature: MA Experiment 20000267 PARAMETER Experiment Name: At_Drought_P Parameter: Tissue Value: Whole Plant
  misc_feature: MA Experiment 20000267 PARAMETER Experiment Name: At_Drought_P Parameter: Treatment Value: Drought vs. No Drought
  misc_feature: MA Experiment ID: 20000436 Result: Up-regulated in Transcription
  misc_feature: MA Experiment 20000436 PARAMETER Experiment Name: At_Drought_P Parameter: Age (day) Value: 7
  misc_feature: MA Experiment 20000436 PARAMETER Experiment Name: At_Drought_P Parameter: Organism Value: A. thaliana
  misc_feature: MA Experiment 20000436 PARAMETER Experiment Name: At_Drought_P Parameter: Plant Line Value: WS
  misc_feature: MA Experiment 20000436 PARAMETER Experiment Name: At_Drought_P Parameter: Timepoint (hr) Value: 12
  misc_feature: MA Experiment 20000436 PARAMETER Experiment Name: At_Drought_P Parameter: Tissue Value: Whole Plant
  misc_feature: MA Experiment 20000436 PARAMETER Experiment Name: At_Drought_P Parameter: Treatment Value: Drought vs. No Drought
  misc_feature: MA Experiment ID: 20000437 Result: Up-regulated in Transcription
  misc_feature: MA Experiment 20000437 PARAMETER Experiment Name: At_Drought_P Parameter: Age (day) Value: 8
  misc_feature: MA Experiment 20000437 PARAMETER Experiment Name: At_Drought_P Parameter: Organism Value: A. thaliana
  misc_feature: MA Experiment 20000437 PARAMETER Experiment Name: At_Drought_P Parameter: Plant Line Value: WS
  misc_feature: MA Experiment 20000437 PARAMETER Experiment Name: At_Drought_P Parameter: Timepoint (hr) Value: 24
  misc_feature: MA Experiment 20000437 PARAMETER Experiment Name: At_Drought_P Parameter: Tissue Value: Whole Plant
  misc_feature: MA Experiment 20000437 PARAMETER Experiment Name: At_Drought_P Parameter: Treatment Value: Drought vs. No Drought
  misc_feature: MA Experiment ID: 20000453 Result: Up-regulated in Transcription
  misc_feature: MA Experiment 20000453 PARAMETER Experiment Name: At_100uM_ABA_P Parameter: Age (day) Value: 15
  misc_feature: MA Experiment 20000453 PARAMETER Experiment Name: At_100uM_ABA_P Parameter: Organism Value: A. thaliana
  misc_feature: MA Experiment 20000453 PARAMETER Experiment Name: At_100uM_ABA_P Parameter: Plant Line Value: WS
  misc_feature: MA Experiment 20000453 PARAMETER Experiment Name: At_100uM_ABA_P Parameter: Timepoint (hr) Value: 24
  misc_feature: MA Experiment 20000453 PARAMETER Experiment Name: At_100uM_ABA_P Parameter: Tissue Value: Aerial
  misc_feature: MA Experiment 20000453 PARAMETER Experiment Name: At_100uM_ABA_P Parameter: Treatment Value: 100uM ABA vs. No Treatment
  misc_feature: MA Experiment ID: 20000495 Result: Down-regulated in Transcription
  misc_feature: MA Experiment 20000495 PARAMETER Experiment Name: At_Guard_Cells_P Parameter: Harvest Date Value: 8/2/2002
  misc_feature: MA Experiment 20000495 PARAMETER Experiment Name: At_Guard_Cells_P Parameter: Organism Value: A. thaliana
  misc_feature: MA Experiment 20000495 PARAMETER Experiment Name: At_Guard_Cells_P Parameter: Tissue Value: Guard Cells vs. Leaves
  misc_feature: MA Experiment ID: 20001451 Result: Up-regulated in Transcription
  misc_feature: MA Experiment 20001451 PARAMETER Experiment Name: At_Far-red-induction_P Parameter: Age (day) Value: 7
  misc_feature: MA Experiment 20001451 PARAMETER Experiment Name: At_Far-red-induction_P Parameter: Light Value: Far-red vs. White
  misc_feature: MA Experiment 20001451 PARAMETER Experiment Name: At_Far-red-induction_P Parameter: Organism Value: A. thaliana
  misc_feature: MA Experiment 20001451 PARAMETER Experiment Name: At_Far-red-induction_P Parameter: Plant Line Value: Columbia
  misc_feature: MA Experiment 20001451 PARAMETER Experiment Name: At_Far-red-induction_P Parameter: Timepoint (hr) Value: 24
  misc_feature: MA Experiment 20001451 PARAMETER Experiment Name: At_Far-red-induction_P Parameter: Tissue Value: Whole Plant
  misc_feature: MA Experiment ID: 20001554 Result: Up-regulated in Transcription
  misc_feature: MA Experiment 20001554 PARAMETER Experiment Name: At_Drought_Soil_Dry_P Parameter: Age (day) Value: 21
  misc_feature: MA Experiment 20001554 PARAMETER Experiment Name: At_Drought_Soil_Dry_P Parameter: Organism Value: A. thaliana
  misc_feature: MA Experiment 20001554 PARAMETER Experiment Name: At_Drought_Soil_Dry_P Parameter: Plant Line Value: WS
  misc_feature: MA Experiment 20001554 PARAMETER Experiment Name: At_Drought_Soil_Dry_P Parameter: Post Timepoint (hr) Value: None
  misc_feature: MA Experiment 20001554 PARAMETER Experiment Name: At_Drought_Soil_Dry_P Parameter: Post-Treatment Value: None
  misc_feature: MA Experiment 20001554 PARAMETER Experiment Name: At_Drought_Soil_Dry_P Parameter: Timepoint (day) Value: 7
  misc_feature: MA Experiment 20001554 PARAMETER Experiment Name: At_Drought_Soil_Dry_P Parameter: Treatment Value: Drought vs. No Drought
  misc_feature: MA Experiment ID: 20001555 Result: Up-regulated in Transcription
  misc_feature: MA Experiment 20001555 PARAMETER Experiment Name: At_Drought_Soil_Dry_P Parameter: Age (day) Value: 24
  misc_feature: MA Experiment 20001555 PARAMETER Experiment Name: At_Drought_Soil_Dry_P Parameter: Organism Value: A. thaliana
  misc_feature: MA Experiment 20001555 PARAMETER Experiment Name: At_Drought_Soil_Dry_P Parameter: Plant Line Value: WS
  misc_feature: MA Experiment 20001555 PARAMETER Experiment Name: At_Drought_Soil_Dry_P Parameter: Post Timepoint (hr) Value: None
  misc_feature: MA Experiment 20001555 PARAMETER Experiment Name: At_Drought_Soil_Dry_P Parameter: Post-Treatment Value: None
  misc_feature: MA Experiment 20001555 PARAMETER Experiment Name: At_Drought_Soil_Dry_P Parameter: Timepoint (day) Value: 10
  misc_feature: MA Experiment 20001555 PARAMETER Experiment Name: At_Drought_Soil_Dry_P Parameter: Treatment Value: Drought vs. No Drought
  misc_feature: MA Experiment ID: 20001556 Result: Up-regulated in Transcription
  misc_feature: MA Experiment 20001556 PARAMETER Experiment Name: At_Drought_Soil_Dry_P Parameter: Age (day) Value: 26
  misc_feature: MA Experiment 20001556 PARAMETER Experiment Name: At_Drought_Soil_Dry_P Parameter: Organism Value: A. thaliana
  misc_feature: MA Experiment 20001556 PARAMETER Experiment Name: At_Drought_Soil_Dry_P Parameter: Plant Line Value: WS
  misc_feature: MA Experiment 20001556 PARAMETER Experiment Name: At_Drought_Soil_Dry_P Parameter: Post Timepoint (hr) Value: None
  misc_feature: MA Experiment 20001556 PARAMETER Experiment Name: At_Drought_Soil_Dry_P Parameter: Post-Treatment Value: None
  misc_feature: MA Experiment 20001556 PARAMETER Experiment Name: At_Drought_Soil_Dry_P Parameter: Timepoint (day) Value: 12
  misc_feature: MA Experiment 20001556 PARAMETER Experiment Name: At_Drought_Soil_Dry_P Parameter: Treatment Value: Drought vs. No Drought
  misc_feature: MA Experiment ID: 20001557 Result: Up-regulated in Transcription
  misc_feature: MA Experiment 20001557 PARAMETER Experiment Name: At_Drought_Soil_Dry_P Parameter: Age (day) Value: 27
  misc_feature: MA Experiment 20001557 PARAMETER Experiment Name: At_Drought_Soil_Dry_P Parameter: Organism Value: A. thaliana
  misc_feature: MA Experiment 20001557 PARAMETER Experiment Name: At_Drought_Soil_Dry_P Parameter: Plant Line Value: WS
  misc_feature: MA Experiment 20001557 PARAMETER Experiment Name: At_Drought_Soil_Dry_P Parameter: Post Timepoint (hr) Value: 3
  misc_feature: MA Experiment 20001557 PARAMETER Experiment Name: At_Drought_Soil_Dry_P Parameter: Post-Treatment Value: Re-Water vs. No Drought
  misc_feature: MA Experiment 20001557 PARAMETER Experiment Name: At_Drought_Soil_Dry_P Parameter: Timepoint (day) Value: 13
  misc_feature: MA Experiment 20001557 PARAMETER Experiment Name: At_Drought_Soil_Dry_P Parameter: Treatment Value: Drought vs. No Drought
  misc_feature: MA Experiment ID: 20001757 Result: Down-regulated in Transcription
  misc_feature: MA Experiment 20001757 PARAMETER Experiment Name: At_50mM_NH4NO3_L-to-H_P Parameter: Timepoint (hr) Value: 6
  misc_feature: MA Experiment 20001757 PARAMETER Experiment Name: At_50mM_NH4NO3_L-to-H_P Parameter: Tissue Value: Leaf
  misc_feature: MA Experiment 20001757 PARAMETER Experiment Name: At_50mM_NH4NO3_L-to-H_P Parameter: Treatment Value: 50mM NH4NO3 vs 100mM Mannitol
  misc_feature: MA Experiment ID: 20001904 Result: Up-regulated in Transcription
  misc_feature: MA Experiment 20001904 PARAMETER Experiment Name: At_Drought_Reproduction_P Parameter: Age (day) Value: 37
  misc_feature: MA Experiment 20001904 PARAMETER Experiment Name: At_Drought_Reproduction_P Parameter: Organism Value: A. thaliana
  misc_feature: MA Experiment 20001904 PARAMETER Experiment Name: At_Drought_Reproduction_P Parameter: Plant Line Value: WS
  misc_feature: MA Experiment 20001904 PARAMETER Experiment Name: At_Drought_Reproduction_P Parameter: Timepoint (day) Value: 7
  misc_feature: MA Experiment 20001904 PARAMETER Experiment Name: At_Drought_Reproduction_P Parameter: Tissue Value: Rosettes
  misc_feature: MA Experiment 20001904 PARAMETER Experiment Name: At_Drought_Reproduction_P Parameter: Treatment Value: Drought vs. No Drought
  misc_feature: MA Experiment ID: 20001906 Result: Up-regulated in Transcription
  misc_feature: MA Experiment 20001906 PARAMETER Experiment Name: At_Drought_Reproduction_P Parameter: Age (day) Value: 35
  misc_feature: MA Experiment 20001906 PARAMETER Experiment Name: At_Drought_Reproduction_P Parameter: Organism Value: A. thaliana
  misc_feature: MA Experiment 20001906 PARAMETER Experiment Name: At_Drought_Reproduction_P Parameter: Plant Line Value: WS
  misc_feature: MA Experiment 20001906 PARAMETER Experiment Name: At_Drought_Reproduction_P Parameter: Timepoint (day) Value: 5
  misc_feature: MA Experiment 20001906 PARAMETER Experiment Name: At_Drought_Reproduction_P Parameter: Tissue Value: Siliques
  misc_feature: MA Experiment 20001906 PARAMETER Experiment Name: At_Drought_Reproduction_P Parameter: Treatment Value: Drought vs. No Drought
agaccgcaaaaactcaaatgcttctagagggaagattctccgtcgtccagatgaacacgaatagacggctcaaatttaaccaaccgagtcgattacccaactcgggtaagtcaggtatagagaatgagcgagtcctggttcttgtcttcgagtccattagctgggacatccacacgctatgcacaatcgcctccctcagccgcagattctgcgcaatcgccagacgaattctgtggcggcggctctgtgtgaaccgtgcgccagggatggtggcggcattgtccggcgaagatcccagcggtcgaatcgacggcggctggcacgcgttagcgaaactcatgttcttctgcggcgggggtgagtcgactcggtatttcaatctgagtcaaccgacgtcgggtcacttcgcctgcgagtccagattctccaagacatccgggagattcttcctgccaaagaattgccgccgtgatctcctatacatgagcgatccgtgcgagcatcaggcggtgggtggagatgagcatttaggggttttcagaggggtatttcgggaatttatgaggtcaaagacgagggagtgtctcgtgagaagacaagcggcgctggaggagaaggttaggtgtccgtattgcggagggcgcgtgtggagcatgacggcggcgcgtctcgtcccgaagagtgcggcgcggcggctgggatcacgtgaaggtgggttagagttcttcgtgtgcgtgaacggtcacttgcacggcacttgctggctgattccgctttcatcggaggaagaagacaatggagaagacgacgacaacagtgacggaagtgtgatctaatccaatggtggtggcgatgtccacgtggaattaggtctcttgggccatatgcaaaccacaagaggaaaatctcagttagatttctcctatgagatgtggagctcactagtagtagttgcaggctgattgtggatcgtgagaagatctttctatctatcaccgatttgtctagtttgggtttagataattttggtacactacacactcatagataattttggtacactacacactcatagtcatagatcattagaattttattgtatctggtttgttttattgcgaaatgttggccattaatttggtgaagtataaaaagaaattgaaacaataacatttggtttt

SEQ ID NO: 46668 - protein, 277 aa, Arabidopsis thaliana
  peptide (1)..(277): Ceres Seq. ID no. 12575353
  misc_feature (41)..(263): Homolog of NCBI NO: 34393587 NR Description: unknown protein [Oryza sativa (japonica
  misc_feature (41)..(271): Homolog of NCBI NO: 15242296 NR Description: putative protein; protein id: At5g15440.1
  misc_feature (41)..(262): Homolog of NCBI NO: 15241717 NR Description: putative protein
  misc_feature (34)..(277): Homolog of NCBI NO: 34908976 NR Description: putative circadian clock coupling factor ZGT
  misc_feature (18)..(274): Homolog of NCBI NO: 14210079 NR Description: circadian clock coupling factor ZGT [Nicotiana
  misc_feature (6)..(275): Homolog of NCBI NO: 11281127 NR Description: hypothetical protein T20O10.160 - Arabidopsis
  misc_feature (6)..(277): Homolog of NCBI NO: 18412596 NR Description: putative protein
TAKTQMLLEGRFSVVQMNTNRRLKFNQPSRLPNSGKSGIENERVLVLVFESISWDIHTLCTIASLSRRFCAIARRILWRRLCVNRAPGMVAALSGEDPSGRIDGGWHALAKLMFFCGGGESTRYFNLSQPTSGHFACESRFSKTSGRFFLPKNCRRDLLYMSDPCEHQAVGGDEHLGVFRGVFREFMRSKTRECLVRRQAALEEKVRCPYCGGRVWSMTAARLVPKSAARRLGSREGGLEFFVCVNGHLHGTCWLIPLSSEEEDNGEDDDNSDGSVI

SEQ ID NO: 46669 - protein, 272 aa, Arabidopsis thaliana
  peptide (1)..(272): Ceres Seq. ID no. 12575354
  misc_feature (36)..(258): Homolog of NCBI NO: 34393587 NR Description: unknown protein [Oryza sativa (japonica
  misc_feature (36)..(266): Homolog of NCBI NO: 15242296 NR Description: putative protein; protein id: At5g15440.1
  misc_feature (36)..(257): Homolog of NCBI NO: 15241717 NR Description: putative protein
  misc_feature (29)..(272): Homolog of NCBI NO: 34908976 NR Description: putative circadian clock coupling factor ZGT
  misc_feature (13)..(269): Homolog of NCBI NO: 14210079 NR Description: circadian clock coupling factor ZGT [Nicotiana
  misc_feature (1)..(270): Homolog of NCBI NO: 11281127 NR Description: hypothetical protein T20O10.160 - Arabidopsis
  misc_feature (1)..(272): Homolog of NCBI NO: 18412596 NR Description: putative protein
MLLEGRFSVVQMNTNRRLKFNQPSRLPNSGKSGIENERVLVLVFESISWDIHTLCTIASLSRRFCAIARRILWRRLCVNRAPGMVAALSGEDPSGRIDGGWHALAKLMFFCGGGESTRYFNLSQPTSGHFACESRFSKTSGRFFLPKNCRRDLLYMSDPCEHQAVGGDEHLGVFRGVFREFMRSKTRECLVRRQAALEEKVRCPYCGGRVWSMTAARLVPKSAARRLGSREGGLEFFVCVNGHLHGTCWLIPLSSEEEDNGEDDDNSDGSVI

SEQ ID NO: 46670 - protein, 261 aa, Arabidopsis thaliana
  peptide (1)..(261): Ceres Seq. ID no. 12575355
  misc_feature (25)..(247): Homolog of NCBI NO: 34393587 NR Description: unknown protein [Oryza sativa (japonica
  misc_feature (25)..(255): Homolog of NCBI NO: 15242296 NR Description: putative protein; protein id: At5g15440.1
  misc_feature (25)..(246): Homolog of NCBI NO: 15241717 NR Description: putative protein
  misc_feature (18)..(261): Homolog of NCBI NO: 34908976 NR Description: putative circadian clock coupling factor ZGT
  misc_feature (2)..(258): Homolog of NCBI NO: 14210079 NR Description: circadian clock coupling factor ZGT [Nicotiana
  misc_feature (1)..(259): Homolog of NCBI NO: 11281127 NR Description: hypothetical protein T20O10.160 - Arabidopsis
  misc_feature (1)..(261): Homolog of NCBI NO: 18412596 NR Description: putative protein
MNTNRRLKFNQPSRLPNSGKSGIENERVLVLVFESISWDIHTLCTIASLSRRFCAIARRILWRRLCVNRAPGMVAALSGEDPSGRIDGGWHALAKLMFFCGGGESTRYFNLSQPTSGHFACESRFSKTSGRFFLPKNCRRDLLYMSDPCEHQAVGGDEHLGVFRGVFREFMRSKTRECLVRRQAALEEKVRCPYCGGRVWSMTAARLVPKSAARRLGSREGGLEFFVCVNGHLHGTCWLIPLSSEEEDNGEDDDNSDGSVI

SEQ ID NO: 46671 - protein, 189 aa, Arabidopsis thaliana
  peptide (1)..(189): Ceres Seq. ID no. 12575356
  misc_feature (1)..(175): Homolog of NCBI NO: 34393587 NR Description: unknown protein [Oryza sativa (japonica
  misc_feature (1)..(183): Homolog of NCBI NO: 15242296 NR Description: putative protein; protein id: At5g15440.1
  misc_feature (1)..(174): Homolog of NCBI NO: 15241717 NR Description: putative protein
  misc_feature (1)..(189): Homolog of NCBI NO: 34908976 NR Description: putative circadian clock coupling factor ZGT
  misc_feature (1)..(186): Homolog of NCBI NO: 14210079 NR Description: circadian clock coupling factor ZGT [Nicotiana
  misc_feature (1)..(187): Homolog of NCBI NO: 11281127 NR Description: hypothetical protein T20O10.160 - Arabidopsis
  misc_feature (1)..(189): Homolog of NCBI NO: 18412596 NR Description: putative protein
MVAALSGEDPSGRIDGGWHALAKLMFFCGGGESTRYFNLSQPTSGHFACESRFSKTSGRFFLPKNCRRDLLYMSDPCEHQAVGGDEHLGVFRGVFREFMRSKTRECLVRRQAALEEKVRCPYCGGRVWSMTAARLVPKSAARRLGSREGGLEFFVCVNGHLHGTCWLIPLSSEEEDNGEDDDNSDGSVI

SEQ ID NO: 46672 - DNA, 1950 bp, Arabidopsis thaliana; identical to SEQ ID NO: 44220
  misc_feature (1)..(1950): Ceres Seq. ID no. 12489291
  misc_feature: MA Experiment ID: 20000184 Result: Down-regulated in Transcription
  misc_feature: MA Experiment 20000184 PARAMETER Experiment Name: At_Shoots__P Parameter: Age (day) Value: 7
  misc_feature: MA Experiment 20000184 PARAMETER Experiment Name: At_Shoots__P Parameter: Tissue Value: Shoots vs. Whole Plant
  misc_feature: MA Experiment ID: 20000234 Result: Up-regulated in Transcription
  misc_feature: MA Experiment 20000234 PARAMETER Experiment Name: At_Siliques_P Parameter: Age (day) Value: 21
  misc_feature: MA Experiment 20000234 PARAMETER Experiment Name: At_Siliques_P Parameter: Organism Value: A. thaliana
  misc_feature: MA Experiment 20000234 PARAMETER Experiment Name: At_Siliques_P Parameter: Plant Line Value: WS
  misc_feature: MA Experiment 20000234 PARAMETER Experiment Name: At_Siliques_P Parameter: Tissue Value: Less Than 5mm Siliques vs. Whole Plant
  misc_feature: MA Experiment ID: 20000264 Result: Up-regulated in Transcription
  misc_feature: MA Experiment 20000264 PARAMETER Experiment Name: At_Open_Flower_P Parameter: Age (day) Value: 21
  misc_feature: MA Experiment 20000264 PARAMETER Experiment Name: At_Open_Flower_P Parameter: Plant Line Value: WS
  misc_feature: MA Experiment 20000264 PARAMETER Experiment Name: At_Open_Flower_P Parameter: Tissue Value: Open Flower vs. Whole Plant
  misc_feature: MA Experiment ID: 20000265 Result: Up-regulated in Transcription
  misc_feature: MA Experiment 20000265 PARAMETER Experiment Name: At_Open_Flower_P Parameter: Age (day) Value: 21
  misc_feature: MA Experiment 20000265 PARAMETER Experiment Name: At_Open_Flower_P Parameter: Plant Line Value: WS
  misc_feature: MA Experiment 20000265 PARAMETER Experiment Name: At_Open_Flower_P Parameter: Tissue Value: Closed Flower vs. Whole Plant
  misc_feature: MA Experiment ID: 20000286 Result: Up-regulated in Transcription
  misc_feature: MA Experiment 20000286 PARAMETER Experiment Name: At_Open_Flower_P Parameter: Age (day) Value: 21
  misc_feature: MA Experiment 20000286 PARAMETER Experiment Name: At_Open_Flower_P Parameter: Plant Line Value: WS
  misc_feature: MA Experiment 20000286 PARAMETER Experiment Name: At_Open_Flower_P Parameter: Tissue Value: Half Open vs. Whole Plant
  misc_feature: MA Experiment ID: 20000794 Result: Up-regulated in Transcription
  misc_feature: MA Experiment 20000794 PARAMETER Experiment Name: At_Petals_P Parameter: Age (day) Value: 23-25 days
  misc_feature: MA Experiment 20000794 PARAMETER Experiment Name: At_Petals_P Parameter: Plant Line Value: WS
  misc_feature: MA Experiment 20000794 PARAMETER Experiment Name: At_Petals_P Parameter: Tissue Value: Petals vs. Whole plant
  misc_feature: MA Experiment ID: 20001761 Result: Down-regulated in Transcription
  misc_feature: MA Experiment 20001761 PARAMETER Experiment Name: At_50mM_NH4NO3_L-to-H_P Parameter: Timepoint (hr) Value: 4
  misc_feature: MA Experiment 20001761 PARAMETER Experiment Name: At_50mM_NH4NO3_L-to-H_P Parameter: Tissue Value: Siliques
  misc_feature: MA Experiment 20001761 PARAMETER Experiment Name: At_50mM_NH4NO3_L-to-H_P Parameter: Treatment Value: 50mM NH4NO3 vs 100mM Mannitol
  misc_feature: MA Experiment ID: 20001768 Result: Up-regulated in Transcription
  misc_feature: MA Experiment 20001768 PARAMETER Experiment Name: At_Far-red-enriched-adult_P Parameter: Age (day) Value: 28
  misc_feature: MA Experiment 20001768 PARAMETER Experiment Name: At_Far-red-enriched-adult_P Parameter: Light Value: Far-red enriched vs. White
  misc_feature: MA Experiment 20001768 PARAMETER Experiment Name: At_Far-red-enriched-adult_P Parameter: Organism Value: A. thaliana
  misc_feature: MA Experiment 20001768 PARAMETER Experiment Name: At_Far-red-enriched-adult_P Parameter: Plant Line Value: Columbia
  misc_feature: MA Experiment 20001768 PARAMETER Experiment Name: At_Far-red-enriched-adult_P Parameter: Timepoint (hr) Value: 1
  misc_feature: MA Experiment 20001768 PARAMETER Experiment Name: At_Far-red-enriched-adult_P Parameter: Tissue Value: Aerial
  misc_feature: MA Experiment ID: 20001774 Result: Down-regulated in Transcription
  misc_feature: MA Experiment 20001774 PARAMETER Experiment Name: At_Far-red-enriched-adult_P Parameter: Age (day) Value: 31
  misc_feature: MA Experiment 20001774 PARAMETER Experiment Name: At_Far-red-enriched-adult_P Parameter: Light Value: Far-red enriched vs. White
  misc_feature: MA Experiment 20001774 PARAMETER Experiment Name: At_Far-red-enriched-adult_P Parameter: Organism Value: A. thaliana
  misc_feature: MA Experiment 20001774 PARAMETER Experiment Name: At_Far-red-enriched-adult_P Parameter: Plant Line Value: Columbia
  misc_feature: MA Experiment 20001774 PARAMETER Experiment Name: At_Far-red-enriched-adult_P Parameter: Timepoint (hr) Value: 72
  misc_feature: MA Experiment 20001774 PARAMETER Experiment Name: At_Far-red-enriched-adult_P Parameter: Tissue Value: Aerial
  misc_feature: MA Experiment ID: 20001905 Result: Up-regulated in Transcription
  misc_feature: MA Experiment 20001905 PARAMETER Experiment Name: At_Drought_Reproduction_P Parameter: Age (day) Value: 40
  misc_feature: MA Experiment 20001905 PARAMETER Experiment Name: At_Drought_Reproduction_P Parameter: Organism Value: A. thaliana
  misc_feature: MA Experiment 20001905 PARAMETER Experiment Name: At_Drought_Reproduction_P Parameter: Plant Line Value: WS
  misc_feature: MA Experiment 20001905 PARAMETER Experiment Name: At_Drought_Reproduction_P Parameter: Timepoint (day) Value: 10
  misc_feature: MA Experiment 20001905 PARAMETER Experiment Name: At_Drought_Reproduction_P Parameter: Tissue Value: Rosettes
  misc_feature: MA Experiment 20001905 PARAMETER Experiment Name: At_Drought_Reproduction_P Parameter: Treatment Value: Drought vs. No Drought
  misc_feature: MA Experiment ID: 20001910 Result: Up-regulated in Transcription
  misc_feature: MA Experiment 20001910 PARAMETER Experiment Name: At_Drought_Reproduction_P Parameter: Age (day) Value: 37
  misc_feature: MA Experiment 20001910 PARAMETER Experiment Name: At_Drought_Reproduction_P Parameter: Organism Value: A. thaliana
  misc_feature: MA Experiment 20001910 PARAMETER Experiment Name: At_Drought_Reproduction_P Parameter: Plant Line Value: WS
  misc_feature: MA Experiment 20001910 PARAMETER Experiment Name: At_Drought_Reproduction_P Parameter: Timepoint (day) Value: 7
  misc_feature: MA Experiment 20001910 PARAMETER Experiment Name: At_Drought_Reproduction_P Parameter: Tissue Value: Flowers
  misc_feature: MA Experiment 20001910 PARAMETER Experiment Name: At_Drought_Reproduction_P Parameter: Treatment Value: Drought vs. No Drought

SEQ ID NO: 46673 - protein, 595 aa, Arabidopsis thaliana; identical to SEQ ID NO: 44221
  peptide (1)..(595): Ceres Seq. ID no. 12489292
  misc_feature (283)..(581): Pfam Name: Pectinesterase Pfam Description: Pectinesterase
  misc_feature (283)..(581): Pfam Name: Pectinesterase Pfam Description: Pectinesterase
  misc_feature (39)..(201): Homolog of NCBI NO: 15234112 NR Description: pectinesterase family; protein id: At4g33230.1
  misc_feature (238)..(595): Homolog of NCBI NO: 15234112 NR Description: pectinesterase family; protein id: At4g33230.1
  misc_feature (34)..(192): Homolog of NCBI NO: 25313441 NR Description: pectinesterase (EC 3.1.1.11) [imported] - Salix
  misc_feature (249)..(595): Homolog of NCBI NO: 25313441 NR Description: pectinesterase (EC 3.1.1.11) [imported] - Salix
  misc_feature (13)..(595): Homolog of NCBI NO: 6093741 NR Description: Pectinesterase (Pectin methylesterase) (PE)
  misc_feature (39)..(201): Homolog of NCBI NO: 15234112 NR Description: pectinesterase family; protein id: At4g33230.1
  misc_feature (34)..(192): Homolog of NCBI NO: 25313441 NR Description: pectinesterase (EC 3.1.1.11) [imported] - Salix
  misc_feature (13)..(595): Homolog of NCBI NO: 6093741 NR Description: Pectinesterase (Pectin methylesterase) (PE)
  misc_feature (1)..(595): Homolog of NCBI NO: 15226482 NR Description: pectinesterase family
  misc_feature (1)..(595): Homolog of NCBI NO: 25313439 NR Description: pectinesterase (EC 3.1.1.11) precursor,
  misc_feature (2)..(595): Homolog of NCBI NO: 15228697 NR Description: pollen-specific pectin esterase, putative
  misc_feature (1)..(477): Homolog of NCBI NO: 23197964 NR Description: putative pectinesterase [Arabidopsis thaliana]
  misc_feature (2)..(595): Homolog of NCBI NO: 1172538 NR Description: Probable pectinesterase precursor (Pectin
  misc_feature (249)..(595): Homolog of NCBI NO: 25313441 NR Description: pectinesterase (EC 3.1.1.11) [imported] - Salix
  misc_feature (238)..(595): Homolog of NCBI NO: 15234112 NR Description: pectinesterase family; protein id: At4g33230.1
  misc_feature (2)..(595): Homolog of NCBI NO: 1172538 NR Description: Probable pectinesterase precursor (Pectin
  misc_feature (1)..(477): Homolog of NCBI NO: 23197964 NR Description: putative pectinesterase [Arabidopsis thaliana]
  misc_feature (2)..(595): Homolog of NCBI NO: 15228697 NR Description: pollen-specific pectin esterase, putative
  misc_feature (1)..(595): Homolog of NCBI NO: 25313439 NR Description: pectinesterase (EC 3.1.1.11) precursor,
  misc_feature (1)..(595): Homolog of NCBI NO: 15226482 NR Description: pectinesterase family

SEQ ID NO: 46674 - protein, 558 aa, Arabidopsis thaliana; identical to SEQ ID NO: 44222
  peptide (1)..(558): Ceres Seq. ID no. 12489293
  misc_feature (246)..(544): Pfam Name: Pectinesterase Pfam Description: Pectinesterase
  misc_feature (246)..(544): Pfam Name: Pectinesterase Pfam Description: Pectinesterase
  misc_feature (2)..(164): Homolog of NCBI NO: 15234112 NR Description: pectinesterase family; protein id: At4g33230.1
  misc_feature (201)..(558): Homolog of NCBI NO: 15234112 NR Description: pectinesterase family; protein id: At4g33230.1
  misc_feature (1)..(155): Homolog of NCBI NO: 25313441 NR Description: pectinesterase (EC 3.1.1.11) [imported] - Salix
  misc_feature (212)..(558): Homolog of NCBI NO: 25313441 NR Description: pectinesterase (EC 3.1.1.11) [imported] - Salix
  misc_feature (1)..(558): Homolog of NCBI NO: 6093741 NR Description: Pectinesterase (Pectin methylesterase) (PE)
  misc_feature (2)..(164): Homolog of NCBI NO: 15234112 NR Description: pectinesterase family; protein id: At4g33230.1
  misc_feature (1)..(155): Homolog of NCBI NO: 25313441 NR Description: pectinesterase (EC 3.1.1.11) [imported] - Salix
  misc_feature (1)..(558): Homolog of NCBI NO: 6093741 NR Description: Pectinesterase (Pectin methylesterase) (PE)
  misc_feature (1)..(558): Homolog of NCBI NO: 15226482 NR Description: pectinesterase family
  misc_feature (1)..(558): Homolog of NCBI NO: 25313439 NR Description: pectinesterase (EC 3.1.1.11) precursor,
  misc_feature (1)..(558): Homolog of NCBI NO: 15228697 NR Description: pollen-specific pectin esterase, putative
  misc_feature (1)..(440): Homolog of NCBI NO: 23197964 NR Description: putative pectinesterase [Arabidopsis thaliana]
  misc_feature (1)..(558): Homolog of NCBI NO: 1172538 NR Description: Probable pectinesterase precursor (Pectin
  misc_feature (212)..(558): Homolog of NCBI NO: 25313441 NR Description: pectinesterase (EC 3.1.1.11) [imported] - Salix
  misc_feature (201)..(558): Homolog of NCBI NO: 15234112 NR Description: pectinesterase family; protein id: At4g33230.1
  misc_feature (1)..(558): Homolog of NCBI NO: 1172538 NR Description: Probable pectinesterase precursor (Pectin
  misc_feature (1)..(440): Homolog of NCBI NO: 23197964 NR Description: putative pectinesterase [Arabidopsis thaliana]
  misc_feature (1)..(558): Homolog of NCBI NO: 15228697 NR Description: pollen-specific pectin esterase, putative
  misc_feature (1)..(558): Homolog of NCBI NO: 25313439 NR Description: pectinesterase (EC 3.1.1.11) precursor,
  misc_feature (1)..(558): Homolog of NCBI NO: 15226482 NR Description: pectinesterase family

SEQ ID NO: 46675 - protein, 522 aa, Arabidopsis thaliana; identical to SEQ ID NO: 44223
  peptide (1)..(522): Ceres Seq. ID no. 12489294
  misc_feature (210)..(508): Pfam Name: Pectinesterase Pfam Description: Pectinesterase
  misc_feature (210)..(508): Pfam Name: Pectinesterase Pfam Description: Pectinesterase
  misc_feature (1)..(128): Homolog of NCBI NO: 15234112 NR Description: pectinesterase family; protein id: At4g33230.1
  misc_feature (165)..(522): Homolog of NCBI NO: 15234112 NR Description: pectinesterase family; protein id: At4g33230.1
  misc_feature (1)..(119): Homolog of NCBI NO: 25313441 NR Description: pectinesterase (EC 3.1.1.11) [imported] - Salix
  misc_feature (176)..(522): Homolog of NCBI NO: 25313441 NR Description: pectinesterase (EC 3.1.1.11) [imported] - Salix
  misc_feature (1)..(522): Homolog of NCBI NO: 6093741 NR Description: Pectinesterase (Pectin methylesterase) (PE)
  misc_feature (1)..(128): Homolog of NCBI NO: 15234112 NR Description: pectinesterase family; protein id: At4g33230.1
  misc_feature (1)..(119): Homolog of NCBI NO: 25313441 NR Description: pectinesterase (EC 3.1.1.11) [imported] - Salix
  misc_feature (1)..(522): Homolog of NCBI NO: 6093741 NR Description: Pectinesterase (Pectin methylesterase) (PE)
  misc_feature (1)..(522): Homolog of NCBI NO: 15226482 NR Description: pectinesterase family
  misc_feature (1)..(522): Homolog of NCBI NO: 25313439 NR Description: pectinesterase (EC 3.1.1.11) precursor,
  misc_feature (1)..(522): Homolog of NCBI NO: 15228697 NR Description: pollen-specific pectin esterase, putative
  misc_feature (1)..(404): Homolog of NCBI NO: 23197964 NR Description: putative pectinesterase [Arabidopsis thaliana]
  misc_feature (1)..(522): Homolog of NCBI NO: 1172538 NR Description: Probable pectinesterase precursor (Pectin
  misc_feature (176)..(522): Homolog of NCBI NO: 25313441 NR Description: pectinesterase (EC 3.1.1.11) [imported] - Salix
  misc_feature (165)..(522): Homolog of NCBI NO: 15234112 NR Description: pectinesterase family; protein id: At4g33230.1
  misc_feature (1)..(522): Homolog of NCBI NO: 1172538 NR Description: Probable pectinesterase precursor (Pectin
  misc_feature (1)..(404): Homolog of NCBI NO: 23197964 NR Description: putative pectinesterase [Arabidopsis thaliana]
  misc_feature (1)..(522): Homolog of NCBI NO: 15228697 NR Description: pollen-specific pectin esterase, putative
  misc_feature (1)..(522): Homolog of NCBI NO: 25313439 NR Description: pectinesterase (EC 3.1.1.11) precursor,
  misc_feature (1)..(522): Homolog of NCBI NO: 15226482 NR Description: pectinesterase family

SEQ ID NO: 46676 - DNA, 2070 bp, Arabidopsis thaliana
  misc_feature (1)..(2070): Ceres Seq. ID no. 12601019
  misc_feature: MA Experiment ID: 20000179 Result: Up-regulated in Transcription
  misc_feature: MA Experiment 20000179 PARAMETER Experiment Name: At_Germinating_Seeds_P Parameter: Age (hr) Value: 6 vs. 0
  misc_feature: MA Experiment 20000179 PARAMETER Experiment Name: At_Germinating_Seeds_P Parameter: Tissue Value: Germinating Seeds
  misc_feature: MA Experiment ID: 20000180 Result: Up-regulated in Transcription
  misc_feature: MA Experiment 20000180 PARAMETER Experiment Name: At_Germinating_Seeds_P Parameter: Age (hr) Value: 24 vs. 0
  misc_feature: MA Experiment 20000180 PARAMETER Experiment Name: At_Germinating_Seeds_P Parameter: Tissue Value: Germinating Seeds
  misc_feature: MA Experiment ID: 20000234 Result: Up-regulated in Transcription
  misc_feature: MA Experiment 20000234 PARAMETER Experiment Name: At_Siliques_P Parameter: Age (day) Value: 21
  misc_feature: MA Experiment 20000234 PARAMETER Experiment Name: At_Siliques_P Parameter: Organism Value: A. thaliana
  misc_feature: MA Experiment 20000234 PARAMETER Experiment Name: At_Siliques_P Parameter: Plant Line Value: WS
  misc_feature: MA Experiment 20000234 PARAMETER Experiment Name: At_Siliques_P Parameter: Tissue Value: Less Than 5mm Siliques vs. Whole Plant
  misc_feature: MA Experiment ID: 20000264 Result: Up-regulated in Transcription
  misc_feature: MA Experiment 20000264 PARAMETER Experiment Name: At_Open_Flower_P Parameter: Age (day) Value: 21
  misc_feature: MA Experiment 20000264 PARAMETER Experiment Name: At_Open_Flower_P Parameter: Plant Line Value: WS
  misc_feature: MA Experiment 20000264 PARAMETER Experiment Name: At_Open_Flower_P Parameter: Tissue Value: Open Flower vs. Whole Plant
  misc_feature: MA Experiment ID: 20000265 Result: Up-regulated in Transcription
  misc_feature: MA Experiment 20000265 PARAMETER Experiment Name: At_Open_Flower_P Parameter: Age (day) Value: 21
  misc_feature: MA Experiment 20000265 PARAMETER Experiment Name: At_Open_Flower_P Parameter: Plant Line Value: WS
  misc_feature: MA Experiment 20000265 PARAMETER Experiment Name: At_Open_Flower_P Parameter: Tissue Value: Closed Flower vs. Whole Plant
  misc_feature: MA Experiment ID: 20000286 Result: Up-regulated in Transcription
  misc_feature: MA Experiment 20000286 PARAMETER Experiment Name: At_Open_Flower_P Parameter: Age (day) Value: 21
  misc_feature: MA Experiment 20000286 PARAMETER Experiment Name: At_Open_Flower_P Parameter: Plant Line Value: WS
  misc_feature: MA Experiment 20000286 PARAMETER Experiment Name: At_Open_Flower_P Parameter: Tissue Value: Half Open vs. Whole Plant
  misc_feature: MA Experiment ID: 20000573 Result: Down-regulated in Transcription
  misc_feature: MA Experiment 20000573 PARAMETER Experiment Name: At_100uM_ABA_Mutants__P Parameter: Organism Value: A. thaliana
  misc_feature: MA Experiment 20000573 PARAMETER Experiment Name: At_100uM_ABA_Mutants__P Parameter: Plant Line Value: CS22 vs. Ler wt
  misc_feature: MA Experiment 20000573 PARAMETER Experiment Name: At_100uM_ABA_Mutants__P Parameter: Timepoint (hr) Value: N/A
  misc_feature: MA Experiment 20000573 PARAMETER Experiment Name: At_100uM_ABA_Mutants__P Parameter: Tissue Value: Whole Plant
  misc_feature: MA Experiment 20000573 PARAMETER Experiment Name: At_100uM_ABA_Mutants__P Parameter: Treatment Value: None
  misc_feature: MA Experiment ID: 20001248 Result: Down-regulated in Transcription
  misc_feature: MA Experiment 20001248 PARAMETER Experiment Name: At_Far-red-induction_P Parameter: Age (day) Value: 7
  misc_feature: MA Experiment 20001248 PARAMETER Experiment Name: At_Far-red-induction_P Parameter: Light Value: Far-red vs. White
  misc_feature: MA Experiment 20001248 PARAMETER Experiment Name: At_Far-red-induction_P Parameter: Organism Value: A. thaliana
  misc_feature: MA Experiment 20001248 PARAMETER Experiment Name: At_Far-red-induction_P Parameter: Plant Line Value: Columbia
  misc_feature: MA Experiment 20001248 PARAMETER Experiment Name: At_Far-red-induction_P Parameter: Timepoint (hr) Value: 4
  misc_feature: MA Experiment 20001248 PARAMETER Experiment Name: At_Far-red-induction_P Parameter: Tissue Value: Whole Plant
  misc_feature: MA Experiment ID: 20001451 Result: Down-regulated in Transcription
  misc_feature: MA Experiment 20001451 PARAMETER Experiment Name: At_Far-red-induction_P Parameter: Age (day) Value: 7
  misc_feature: MA Experiment 20001451 PARAMETER Experiment Name: At_Far-red-induction_P Parameter: Light Value: Far-red vs. White
  misc_feature: MA Experiment 20001451 PARAMETER Experiment Name: At_Far-red-induction_P Parameter: Organism Value: A. thaliana
  misc_feature: MA Experiment 20001451 PARAMETER Experiment Name: At_Far-red-induction_P Parameter: Plant Line Value: Columbia
  misc_feature: MA Experiment 20001451 PARAMETER Experiment Name: At_Far-red-induction_P Parameter: Timepoint (hr) Value: 24
  misc_feature: MA Experiment 20001451 PARAMETER Experiment Name: At_Far-red-induction_P Parameter: Tissue Value: Whole Plant
  misc_feature: MA Experiment ID: 20001906 Result: Down-regulated in Transcription
  misc_feature: MA Experiment 20001906 PARAMETER Experiment Name: At_Drought_Reproduction_P Parameter: Age (day) Value: 35
  misc_feature: MA Experiment 20001906 PARAMETER Experiment Name: At_Drought_Reproduction_P Parameter: Organism Value: A. thaliana
  misc_feature: MA Experiment 20001906 PARAMETER Experiment Name: At_Drought_Reproduction_P Parameter: Plant Line Value: WS
  misc_feature: MA Experiment 20001906 PARAMETER Experiment Name: At_Drought_Reproduction_P Parameter: Timepoint (day) Value: 5
  misc_feature: MA Experiment 20001906 PARAMETER Experiment Name: At_Drought_Reproduction_P Parameter: Tissue Value: Siliques
  misc_feature: MA Experiment 20001906 PARAMETER Experiment Name: At_Drought_Reproduction_P Parameter: Treatment Value: Drought vs. No Drought
  misc_feature: MA Experiment ID: 20001908 Result: Down-regulated in Transcription
  misc_feature: MA Experiment 20001908 PARAMETER Experiment Name: At_Drought_Reproduction_P Parameter: Age (day) Value: 40
  misc_feature: MA Experiment 20001908 PARAMETER Experiment Name: At_Drought_Reproduction_P Parameter: Organism Value: A. thaliana
  misc_feature: MA Experiment 20001908 PARAMETER Experiment Name: At_Drought_Reproduction_P Parameter: Plant Line Value: WS
  misc_feature: MA Experiment 20001908 PARAMETER Experiment Name: At_Drought_Reproduction_P Parameter: Timepoint (day) Value: 10
  misc_feature: MA Experiment 20001908 PARAMETER Experiment Name: At_Drought_Reproduction_P Parameter: Tissue Value: Siliques
  misc_feature: MA Experiment 20001908 PARAMETER Experiment Name: At_Drought_Reproduction_P Parameter: Treatment Value: Drought vs. No Drought
gggggccaagtctatgaactccactcgtctctccctcgacgcacttaaatttacataactaagtgtatgtctattcatatcactcactctctctcttcctcacacttacattctccctctatttttttttctctctctccacaagaaacgccgtcgttcattaaaaatgatggcggtgggcagatccggaggcaccatcctattgttctgcctatcattcttcgccgcggtaaccgcggagagtccataccgattctttgactggaatgtaacatacggcgacatttacccactcggtgttcgtcagcagggaatattgattaatgggcaatttccgggaccagacattcacagtgtgacaaacgacaatctcatcattaacgtacacaacagcttagacgagcctttcttaatctcatggaacggagtacaaaacagaagaaattcttatgttgatggaatgtacggaaccacgtgtccaattccaccgagaagcaactacacatacattttgcaagtgaaagaccaaattggaagtttctattacttcccatctcttgcctttcacaaggcagctggtggattcggaggtatcagaatccttagccgtcctggaattccagttccatttgctgaccctgcaggagattacactgtcctcattggagattggtacaaatttaatcacacggatttgaagtctcgtcttgatagaggaaggaagttaccttcgcctgatggtattcttatcaatggccgaagtaacggtgctaccttaaacgttgaacaaggaaaaacataccgattgaggatatcaaacgttggattacaagattctctgaacttccgaatccaaaaccacagaatgaagcttgtggaagtcgaagggacgcacacacttcaaaccatgttttcctctcttgacgttcacgttggccagtcttactccgttctaattactgctgaccaatctcctcgtgactactacgtggttgtttcgtctcgattcacggataaaatcataaccaccaccggggttcttcgctacagtggctcgtctacccctgcttctggtcctattcctggcggtcccactattcaggttgattggtccttgaaccaagcacgtgccatcagaaccaatttgacagctagtggaccaagaccaaacccgcaaggctcataccattatggtcttataccgctcattaggacaattgtgttcggtagttcagccggacagataaacgggaaacaaagatatggtgtcaatagtgtgtcatttgtgccagctgatacccctctaaaactggctgacttcttcaagattagcggtgtctataagatcaacagcatctcagacaaacccacatatggaggtttataccttgacacctcagttttgcaagtcgactatcgaacctttatcgagattgtattcgagaaccaagaagatatcgtccaaagttatcatctcaatggttactccttttgggtggtcgggatggatggtggacagtggaagacaggaagcagaaatggttataatttacgcgatgcagtttcacgttccacagtccaagtgtacccaaaatcatggacagccatatacattgcattagacaacgttggaatgtggaacttaagatcagaattttgggcaagacagtacttgggacaacaactttacttacgtgtcttcacgtcatctacgtctttgagagatgagtaccctatcccgaagaattcgcgtttgtgcggccgggcaagaggacgacatactaggcctttgtaaggaagatatacgagcttacgtgaaattcgtcatatccatacacgtttaagtatttcttgggaagacttgcaaggttacaaacaatgagagaggatatatgtagtaacaatctagtttgacgtgatctcagctcgaggtctaaatttttatgtaattcgaatttgaagttccagtttttctttatatgcttttgtcattcatgttcttttaattttctttcctttttctacgaagttataaacttataatattaattgaattttactcatttggat

SEQ ID NO: 46677 - protein, 542 aa, Arabidopsis thaliana
  peptide (1)..(542): Ceres Seq. ID no. 12601020
  misc_feature (10)..(538): Homolog of NCBI NO: 15219120 NR Description: pectinesterase (pectin methylesterase), putative
  misc_feature (12)..(539): Homolog of NCBI NO: 15219118 NR Description: pectinesterase (pectin methylesterase), putative
  misc_feature (25)..(526): Homolog of NCBI NO: 7432997 NR Description: pollen-specific protein homolog - tomato
  misc_feature (16)..(542): Homolog of NCBI NO: 1255951 NR Description: PS60 [Nicotiana tabacum]
  misc_feature (2)..(542): Homolog of NCBI NO: 22531132 NR Description: pectinesterase, putative [Arabidopsis thaliana]
  misc_feature (2)..(542): Homolog of NCBI NO: 15982771 NR Description: At1g76160/T23E18_10 [Arabidopsis thaliana]
  misc_feature (2)..(542): Homolog of NCBI NO: 15222981 NR Description: pectinesterase (pectin methylesterase), putative
  misc_feature (2)..(542): Homolog of NCBI NO: 25285550 NR Description: probable pectinesterase [imported] - Arabidopsis
  misc_feature (1)..(542): Homolog of NCBI NO: 16648889 NR Description: Unknown protein [Arabidopsis thaliana]
  misc_feature (1)..(542): Homolog of NCBI NO: 18400509 NR Description: pectinesterase (pectin methylesterase), putative
MMAVGRSGGTILLFCLSFFAAVTAESPYRFFDWNVTYGDIYPLGVRQQGILINGQFPGPDIHSVTNDNLIINVHNSLDEPFLISWNGVQNRRNSYVDGMYGTTCPIPPRSNYTYILQVKDQIGSFYYFPSLAFHKAAGGFGGIRILSRPGIPVPFADPAGDYTVLIGDWYKFNHTDLKSRLDRGRKLPSPDGILINGRSNGATLNVEQGKTYRLRISNVGLQDSLNFRIQNHRMKLVEVEGTHTLQTMFSSLDVHVGQSYSVLITADQSPRDYYVVVSSRFTDKIITTTGVLRYSGSSTPASGPIPGGPTIQVDWSLNQARAIRTNLTASGPRPNPQGSYHYGLIPLIRTIVFGSSAGQINGKQRYGVNSVSFVPADTPLKLADFFKISGVYKINSISDKPTYGGLYLDTSVLQVDYRTFIEIVFENQEDIVQSYHLNGYSFWVVGMDGGQWKTGSRNGYNLRDAVSRSTVQVYPKSWTAIYIALDNVGMWNLRSEFWARQYLGQQLYLRVFTSSTSLRDEYPIPKNSRLCGRARGRHTRPL

SEQ ID NO: 46678 - protein, 541 aa, Arabidopsis thaliana
  peptide (1)..(541): Ceres Seq. ID no. 12601021
  misc_feature (9)..(537): Homolog of NCBI NO: 15219120 NR Description: pectinesterase (pectin methylesterase), putative
  misc_feature (11)..(538): Homolog of NCBI NO: 15219118 NR Description: pectinesterase (pectin methylesterase), putative
  misc_feature (24)..(525): Homolog of NCBI NO: 7432997 NR Description: pollen-specific protein homolog - tomato
  misc_feature (15)..(541): Homolog of NCBI NO: 1255951 NR Description: PS60 [Nicotiana tabacum]
  misc_feature (1)..(541): Homolog of NCBI NO: 22531132 NR Description: pectinesterase, putative [Arabidopsis thaliana]
  misc_feature (1)..(541): Homolog of NCBI NO: 15982771 NR Description: At1g76160/T23E18_10 [Arabidopsis thaliana]
  misc_feature (1)..(541): Homolog of NCBI NO: 15222981 NR Description: pectinesterase (pectin methylesterase), putative
  misc_feature (1)..(541): Homolog of NCBI NO: 25285550 NR Description: probable pectinesterase [imported] - Arabidopsis
  misc_feature (1)..(541): Homolog of NCBI NO: 16648889 NR Description: Unknown protein [Arabidopsis thaliana]
  misc_feature (1)..(541): Homolog of NCBI NO: 18400509 NR Description: pectinesterase (pectin methylesterase), putative
MAVGRSGGTILLFCLSFFAAVTAESPYRFFDWNVTYGDIYPLGVRQQGILINGQFPGPDIHSVTNDNLIINVHNSLDEPFLISWNGVQNRRNSYVDGMYGTTCPIPPRSNYTYILQVKDQIGSFYYFPSLAFHKAAGGFGGIRILSRPGIPVPFADPAGDYTVLIGDWYKFNHTDLKSRLDRGRKLPSPDGILINGRSNGATLNVEQGKTYRLRISNVGLQDSLNFRIQNHRMKLVEVEGTHTLQTMFSSLDVHVGQSYSVLITADQSPRDYYVVVSSRFTDKIITTTGVLRYSGSSTPASGPIPGGPTIQVDWSLNQARAIRTNLTASGPRPNPQGSYHYGLIPLIRTIVFGSSAGQINGKQRYGVNSVSFVPADTPLKLADFFKISGVYKINSISDKPTYGGLYLDTSVLQVDYRTFIEIVFENQEDIVQSYHLNGYSFWVVGMDGGQWKTGSRNGYNLRDAVSRSTVQVYPKSWTAIYIALDNVGMWNLRSEFWARQYLGQQLYLRVFTSSTSLRDEYPIPKNSRLCGRARGRHTRPL

SEQ ID NO: 46679 - protein, 444 aa, Arabidopsis thaliana
  peptide (1)..(444): Ceres Seq. ID no. 12601022
  misc_feature (1)..(440): Homolog of NCBI NO: 15219120 NR Description: pectinesterase (pectin methylesterase), putative
  misc_feature (1)..(441): Homolog of NCBI NO: 15219118 NR Description: pectinesterase (pectin methylesterase), putative
  misc_feature (1)..(428): Homolog of NCBI NO: 7432997 NR Description: pollen-specific protein homolog - tomato
  misc_feature (1)..(444): Homolog of NCBI NO: 1255951 NR Description: PS60 [Nicotiana tabacum]
  misc_feature (1)..(444): Homolog of NCBI NO: 22531132 NR Description: pectinesterase, putative [Arabidopsis thaliana]
  misc_feature (1)..(444): Homolog of NCBI NO: 15982771 NR Description: At1g76160/T23E18_10 [Arabidopsis thaliana]
  misc_feature (1)..(444): Homolog of NCBI NO: 15222981 NR Description: pectinesterase (pectin methylesterase), putative
  misc_feature (1)..(444): Homolog of NCBI NO: 25285550 NR Description: probable pectinesterase [imported] - Arabidopsis
  misc_feature (1)..(444): Homolog of NCBI NO: 16648889 NR Description: Unknown protein [Arabidopsis thaliana]
  misc_feature (1)..(444): Homolog of NCBI NO: 18400509 NR Description: pectinesterase (pectin methylesterase), putative
MYGTTCPIPPRSNYTYILQVKDQIGSFYYFPSLAFHKAAGGFGGIRILSRPGIPVPFADPAGDYTVLIGDWYKFNHTDLKSRLDRGRKLPSPDGILINGRSNGATLNVEQGKTYRLRISNVGLQDSLNFRIQNHRMKLVEVEGTHTLQTMFSSLDVHVGQSYSVLITADQSPRDYYVVVSSRFTDKIITTTGVLRYSGSSTPASGPIPGGPTIQVDWSLNQARAIRTNLTASGPRPNPQGSYHYGLIPLIRTIVFGSSAGQINGKQRYGVNSVSFVPADTPLKLADFFKISGVYKINSISDKPTYGGLYLDTSVLQVDYRTFIEIVFENQEDIVQSYHLNGYSFWVVGMDGGQWKTGSRNGYNLRDAVSRSTVQVYPKSWTAIYIALDNVGMWNLRSEFWARQYLGQQLYLRVFTSSTSLRDEYPIPKNSRLCGRARGRHTRPL

SEQ ID NO: 46680 - DNA, 1634 bp, Arabidopsis thaliana
  misc_feature (1)..(1634): Ceres Seq. ID no. 12575357
  misc_feature: MA Experiment ID: 20000185 Result: Up-regulated in Transcription
  misc_feature: MA Experiment 20000185 PARAMETER Experiment Name: At_Roots__P Parameter: Age (day) Value: 7 vs. 21
  misc_feature: MA Experiment 20000185 PARAMETER Experiment Name: At_Roots__P Parameter: Organism Value: A. thaliana
  misc_feature: MA Experiment 20000185 PARAMETER Experiment Name: At_Roots__P Parameter: Tissue Value: Roots vs. Whole Plant
gcgtctgcaaacgcgccaacggctactttttctccggagccggagctctcaaagctgaaaccctaaattttcccggtatcttcctcatcgtcgattttactcaatttagaataaaaatcggaaagcaatcgaattctagcgacgtgaattaagaagaaagagagaggcgcgattattgagtgggttctgaaaaacccgaaaatgccggagcagccaaagaaagttgctgataggtatctcaagcaagaggttcttgggcaaggtacctatggagtcgtcttcaaagccactgatactaagacggaacaaactgtagcaattaagaagataaggcttggtaaacaaagagaaggtgtaaatattacagctctcagagaaatcaaaatgctcaaagagctaaagcatcctcatattattctgctcattgatgcatttcctcacaaggaaaacttgcatcttgtctttgagttcatggagactgacctcgaagcagttattcgcgattctaacattttcctctcacccgccgacattaaatcctacctcctaatgacatttaaaggacttgcttattgccacgataaatgggttttgcacagggatatgaagccaaataacttgttaataggagttgatggacagcttaagcttgcagattttggcttagcacgtatatttggtagtccaaatcgtaagtttacccaccaggtgtttgctagatggtacagagcaccagaacttttgtttggtgcaaaacaatatggtgctgcagttgatgtttgggccgttgcctgcatattcgccgaacttctactacgcagaccatttcttcagggaaacagtgatattgatcaattaagcaaaatatttgctgcttttgggacaccaaaagcagatcagtggccggatttaacaaagcttccagattatgtagagtatcaatttgtccctgcaccgtctctacgttctttattcccagcagttagtgatgatgctctcgacttgttgtccaaaatgtttacctatgacccaaaggctagaatttccattaagcaggctctagaacacaggtacttcacttctgcacctgctcctactgacccggctaagctcccaaagcccgttcctaagcaggatggtaaatcatcttacggtaaacatgaggccattacagtgcaatcaccaccacgtaagcttagaagagtgatgcctgagcgtgggagggttgatagtttgaagtctcatgttgacaaggatcaacaagcacccatgtcattagattttaccatcctcgctgagcgacctccaaacaggccaacaatcaccagtgctgatagatctcatctgaagaggaaactcgatcttgagttccagtaagactgttggttatgcactcttctcttagcttctccattttcatgttctggtgaaaccacaccattgttaagttgtcaatttactgctgcttgtgtaatctggcgatttattcttttccatatttagcttgattacaaaccagagggaccttagattcacaatgataatattttgttgtcccataggctttttattcattgtaaactgatcatactgtactatgaagtctatgattataaagctttctactttttgct

SEQ ID NO: 46681 - protein, 391 aa, Arabidopsis thaliana
  peptide (1)..(391): Ceres Seq. ID no. 12575358
  misc_feature (12)..(292): Pfam Name: Protein kinase domain Pfam Description: Protein kinase domain
  misc_feature (6)..(307): Homolog of NCBI NO: 13529020 NR Description: cyclin-dependent kinase 7 (homolog of Xenopus
  misc_feature (6)..(307): Homolog of NCBI NO: 33304107 NR Description: cyclin-dependent kinase 7 [synthetic construct]
  misc_feature (6)..(307): Homolog of NCBI NO: 4502743 NR Description: cyclin-dependent kinase 7
  misc_feature (10)..(338): Homolog of NCBI NO: 15219730 NR Description: Cyclin-dependent kinase D1
  misc_feature (320)..(389): Homolog of NCBI NO: 266410 NR Description: CDC2+/CDC28-related protein kinase R2
  misc_feature (6)..(356): Homolog of NCBI NO: 266410 NR Description: CDC2+/CDC28-related protein kinase R2
  misc_feature (351)..(391): Homolog of NCBI NO: 15419985 NR Description: CDK-activating kinase [Medicago sativa subsp. x
  misc_feature (6)..(380): Homolog of NCBI NO: 15419985 NR Description: CDK-activating kinase [Medicago sativa subsp. x
  misc_feature (3)..(390): Homolog of NCBI NO: 15219522 NR Description: Cyclin-dependent kinase D1
  misc_feature (1)..(391): Homolog of NCBI NO: 15220917 NR Description: Cyclin-dependent kinase D1
MPEQPKKVADRYLKQEVLGQGTYGVVFKATDTKTEQTVAIKKIRLGKQREGVNITALREIKMLKELKHPHIILLIDAFPHKENLHLVFEFMETDLEAVIRDSNIFLSPADIKSYLLMTFKGLAYCHDKWVLHRDMKPNNLLIGVDGQLKLADFGLARIFGSPNRKFTHQVFARWYRAPELLFGAKQYGAAVDVWAVACIFAELLLRRPFLQGNSDIDQLSKIFAAFGTPKADQWPDLTKLPDYVEYQFVPAPSLRSLFPAVSDDALDLLSKMFTYDPKARISIKQALEHRYFTSAPAPTDPAKLPKPVPKQDGKSSYGKHEAITVQSPPRKLRRVMPERGRVDSLKSHVDKDQQAPMSLDFTILAERPPNRPTITSADRSHLKRKLDLEFQ

SEQ ID NO: 46682 - protein, 330 aa, Arabidopsis thaliana
  peptide (1)..(330): Ceres Seq. ID no. 12575359
  misc_feature (1)..(231): Pfam Name: Protein kinase domain Pfam Description: Protein kinase domain
  misc_feature (1)..(246): Homolog of NCBI NO: 13529020 NR Description: cyclin-dependent kinase 7 (homolog of Xenopus
  misc_feature (1)..(246): Homolog of NCBI NO: 33304107 NR Description: cyclin-dependent kinase 7 [synthetic construct]
  misc_feature (1)..(246): Homolog of NCBI NO: 4502743 NR Description: cyclin-dependent kinase 7
  misc_feature (1)..(277): Homolog of NCBI NO: 15219730 NR Description: Cyclin-dependent kinase D1
  misc_feature (259)..(328): Homolog of NCBI NO: 266410 NR Description: CDC2+/CDC28-related protein kinase R2
  misc_feature (1)..(295): Homolog of NCBI NO: 266410 NR Description: CDC2+/CDC28-related protein kinase R2
  misc_feature (290)..(330): Homolog of NCBI NO: 15419985 NR Description: CDK-activating kinase [Medicago sativa subsp. x
  misc_feature (1)..(319): Homolog of NCBI NO: 15419985 NR Description: CDK-activating kinase [Medicago sativa subsp. x
  misc_feature (1)..(329): Homolog of NCBI NO: 15219522 NR Description: Cyclin-dependent kinase D1
  misc_feature (1)..(330): Homolog of NCBI NO: 15220917 NR Description: Cyclin-dependent kinase D1
MLKELKHPHIILLIDAFPHKENLHLVFEFMETDLEAVIRDSNIFLSPADIKSYLLMTFKGLAYCHDKWVLHRDMKPNNLLIGVDGQLKLADFGLARIFGSPNRKFTHQVFARWYRAPELLFGAKQYGAAVDVWAVACIFAELLLRRPFLQGNSDIDQLSKIFAAFGTPKADQWPDLTKLPDYVEYQFVPAPSLRSLFPAVSDDALDLLSKMFTYDPKARISIKQALEHRYFTSAPAPTDPAKLPKPVPKQDGKSSYGKHEAITVQSPPRKLRRVMPERGRVDSLKSHVDKDQQAPMSLDFTILAERPPNRPTITSADRSHLKRKLDLEFQ

SEQ ID NO: 46683 - protein, 301 aa, Arabidopsis thaliana
  peptide (1)..(301): Ceres Seq. ID no. 12575360
  misc_feature (1)..(202): Pfam Name: Protein kinase domain Pfam Description: Protein kinase domain
  misc_feature (1)..(217): Homolog of NCBI NO: 13529020 NR Description: cyclin-dependent kinase 7 (homolog of Xenopus
  misc_feature (1)..(217): Homolog of NCBI NO: 33304107 NR Description: cyclin-dependent kinase 7 [synthetic construct]
  misc_feature (1)..(217): Homolog of NCBI NO: 4502743 NR Description: cyclin-dependent kinase 7
  misc_feature (1)..(248): Homolog of NCBI NO: 15219730 NR Description: Cyclin-dependent kinase D1
  misc_feature (230)..(299): Homolog of NCBI NO: 266410 NR Description: CDC2+/CDC28-related protein kinase R2
  misc_feature (1)..(266): Homolog of NCBI NO: 266410 NR Description: CDC2+/CDC28-related protein kinase R2
  misc_feature (261)..(301): Homolog of NCBI NO: 15419985 NR Description: CDK-activating kinase [Medicago sativa subsp. x
  misc_feature (1)..(290): Homolog of NCBI NO: 15419985 NR Description: CDK-activating kinase [Medicago sativa subsp. x
  misc_feature (1)..(300): Homolog of NCBI NO: 15219522 NR Description: Cyclin-dependent kinase D1
  misc_feature (1)..(301): Homolog of NCBI NO: 15220917 NR Description: Cyclin-dependent kinase D1
METDLEAVIRDSNIFLSPADIKSYLLMTFKGLAYCHDKWVLHRDMKPNNLLIGVDGQLKLADFGLARIFGSPNRKFTHQVFARWYRAPELLFGAKQYGAAVDVWAVACIFAELLLRRPFLQGNSDIDQLSKIFAAFGTPKADQWPDLTKLPDYVEYQFVPAPSLRSLFPAVSDDALDLLSKMFTYDPKARISIKQALEHRYFTSAPAPTDPAKLPKPVPKQDGKSSYGKHEAITVQSPPRKLRRVMPERGRVDSLKSHVDKDQQAPMSLDFTILAERPPNRPTITSADRSHLKRKLDLEFQ

SEQ ID NO: 46684 - DNA, 2529 bp, Arabidopsis thaliana
  misc_feature (1)..(2529): Ceres Seq. ID no. 12575369
  misc_feature: MA Experiment ID: 20000171 Result: Down-regulated in Transcription
  misc_feature: MA Experiment 20000171 PARAMETER Experiment Name: At_42deg_Heat_P Parameter: Age (day) Value: 14
  misc_feature: MA Experiment 20000171 PARAMETER Experiment Name: At_42deg_Heat_P Parameter: Organism Value: A. thaliana
  misc_feature: MA Experiment 20000171 PARAMETER Experiment Name: At_42deg_Heat_P Parameter: Plant Line Value: WS
  misc_feature: MA Experiment 20000171 PARAMETER Experiment Name: At_42deg_Heat_P Parameter: Temperature (deg C) Value: 42 vs. 22
  misc_feature: MA Experiment 20000171 PARAMETER Experiment Name: At_42deg_Heat_P Parameter: Timepoint (hr) Value: 1
  misc_feature: MA Experiment 20000171 PARAMETER Experiment Name: At_42deg_Heat_P Parameter: Tissue Value: Aerial
  misc_feature: MA Experiment ID: 20000184 Result: Down-regulated in Transcription
  misc_feature: MA Experiment 20000184 PARAMETER Experiment Name: At_Shoots__P Parameter: Age (day) Value: 7
  misc_feature: MA Experiment 20000184 PARAMETER Experiment Name: At_Shoots__P Parameter: Tissue Value: Shoots vs. Whole Plant
  misc_feature: MA Experiment ID: 20000185 Result: Up-regulated in Transcription
  misc_feature: MA Experiment 20000185 PARAMETER Experiment Name: At_Roots__P Parameter: Age (day) Value: 7 vs. 21
  misc_feature: MA Experiment 20000185 PARAMETER Experiment Name: At_Roots__P Parameter: Organism Value: A. thaliana
  misc_feature: MA Experiment 20000185 PARAMETER Experiment Name: At_Roots__P Parameter: Tissue Value: Roots vs. Whole Plant
  misc_feature: MA Experiment ID: 20000234 Result: Up-regulated in Transcription
  misc_feature: MA Experiment 20000234 PARAMETER Experiment Name: At_Siliques_P Parameter: Age (day) Value: 21
  misc_feature: MA Experiment 20000234 PARAMETER Experiment Name: At_Siliques_P Parameter: Organism Value: A. thaliana
  misc_feature: MA Experiment 20000234 PARAMETER Experiment Name: At_Siliques_P Parameter: Plant Line Value: WS
  misc_feature: MA Experiment 20000234 PARAMETER Experiment Name: At_Siliques_P Parameter: Tissue Value: Less Than 5mm Siliques vs. Whole Plant
  misc_feature: MA Experiment ID: 20000235 Result: Up-regulated in Transcription
  misc_feature: MA Experiment 20000235 PARAMETER Experiment Name: At_Siliques_P Parameter: Age (day) Value: 21
  misc_feature: MA Experiment 20000235 PARAMETER Experiment Name: At_Siliques_P Parameter: Organism Value: A. thaliana
  misc_feature: MA Experiment 20000235 PARAMETER Experiment Name: At_Siliques_P Parameter: Plant Line Value: WS
  misc_feature: MA Experiment 20000235 PARAMETER Experiment Name: At_Siliques_P Parameter: Tissue Value: 5-10mm Siliques vs. Whole Plant
  misc_feature: MA Experiment ID: 20000264 Result: Up-regulated in Transcription
  misc_feature: MA Experiment 20000264 PARAMETER Experiment Name: At_Open_Flower_P Parameter: Age (day) Value: 21
  misc_feature: MA Experiment 20000264 PARAMETER Experiment Name: At_Open_Flower_P Parameter: Plant Line Value: WS
  misc_feature: MA Experiment 20000264 PARAMETER Experiment Name: At_Open_Flower_P Parameter: Tissue Value: Open Flower vs. Whole Plant
  misc_feature: MA Experiment ID: 20000265 Result: Up-regulated in Transcription
  misc_feature: MA Experiment 20000265 PARAMETER Experiment Name: At_Open_Flower_P Parameter: Age (day) Value: 21
  misc_feature: MA Experiment 20000265 PARAMETER Experiment Name: At_Open_Flower_P Parameter: Plant Line Value: WS
  misc_feature: MA Experiment 20000265 PARAMETER Experiment Name: At_Open_Flower_P Parameter: Tissue Value: Closed Flower vs. Whole Plant
  misc_feature: MA Experiment ID: 20000286 Result: Up-regulated in Transcription
  misc_feature: MA Experiment 20000286 PARAMETER Experiment Name: At_Open_Flower_P Parameter: Age (day) Value: 21
  misc_feature: MA Experiment 20000286 PARAMETER Experiment Name: At_Open_Flower_P Parameter: Plant Line Value: WS
  misc_feature: MA Experiment 20000286 PARAMETER Experiment Name: At_Open_Flower_P Parameter: Tissue Value: Half Open vs. Whole Plant
  misc_feature: MA Experiment ID: 20000439 Result: Up-regulated in Transcription
  misc_feature: MA Experiment 20000439 PARAMETER Experiment Name: At_Roots__P Parameter: Age (day) Value: 14 vs. 21
  misc_feature: MA Experiment 20000439 PARAMETER Experiment Name: At_Roots__P Parameter: Organism Value: A. thaliana
  misc_feature: MA Experiment 20000439 PARAMETER Experiment Name: At_Roots__P Parameter: Tissue Value: Roots vs. Whole Plant
  misc_feature: MA Experiment ID: 20000495 Result: Up-regulated in Transcription
  misc_feature: MA Experiment 20000495 PARAMETER Experiment Name: At_Guard_Cells_P Parameter: Harvest Date Value: 8/2/2002
  misc_feature: MA Experiment 20000495 PARAMETER Experiment Name: At_Guard_Cells_P Parameter: Organism Value: A. thaliana
  misc_feature: MA Experiment 20000495 PARAMETER Experiment Name: At_Guard_Cells_P Parameter: Tissue Value: Guard Cells vs. Leaves
  misc_feature: MA Experiment ID: 20000794 Result: Up-regulated in Transcription
  misc_feature: MA Experiment 20000794 PARAMETER Experiment Name: At_Petals_P Parameter: Age (day) Value: 23-25 days
  misc_feature: MA Experiment 20000794 PARAMETER Experiment Name: At_Petals_P Parameter: Plant Line Value: WS
  misc_feature: MA Experiment 20000794 PARAMETER Experiment Name: At_Petals_P Parameter: Tissue Value: Petals vs. Whole plant
aaagagagagagagaagaagaaggtatcttttaagaagtcgtgaaggctctcttcgagcgatgcgttgaagaaaggcgagtgaccaacaacaatggcgaaaatatctttcctctcttcttattcttcttcttcttatcacgatcctcattataaaccctaaatttttccaacagtttttctctttctctctaacttctccgatctccgatttttctcttctccgagatgatgacggaggcgacgaaggtgttgtatatagtggtgcgtgaagaaggtgatgatgatgataataatggagatgattcgtttaggtatacgcgtcctgttttgcagagtactcttcagcttatgggttgcaaagctcgtcacgccttcaagatcagccgtagggtttttgagttaataagaagtgagggatcttgtaatacttcaccagagaatgggaaggaacctgaatttgctaaggaagttggtggttcaacttgtgtagagaaacttaactgtttggttgttgctggtgatgttgacaagaataagagtaagccatttgagatgtacaaaagacggacaactgttgttgtttcacgagagatattcgttgatgttgtgtgtgatgcactggctgaatataagtatgttggtcgcgaccaaagggcagatttgattctggcatgcagaatccgagaaaggaaagaatctgtaactgttttgctctgtggcaccagcggctgtggtaaatctacgttgtctgcattgctgggtagcaggttgggtattacgactgtggtatcaactgactctataaggcacatgatgaggagctttgctgatgagaagcagaatcctttgctgtgggcttcaacataccatgctggagagtaccttgaccctgtggcagttgccgagtcaaaagccaaaagaaaagccaaaaaactgaaaggctctcgaggtgtaaactccaatgcccaaaagacggatgctggatcaaactctagcaccactgagttgctaagtcataagcagatggctatagaagggtataaggcacaaagtgagatggtgattgacagtcttgataggctcattaccacttgggaagagaggaatgagtcagtagtcgttgaaggagtccacttaagcctcaactttgtgatgggactgatgaaaaagcacccttcgattgttcccttcatggtatacatcgctaacgaggagaaacacttggaacggtttgctgtccgagccaagtacatgacattggacccagcaaagaataagtatgtaaaatatatacgtaacatcagaacaatacaggattatctatgcaaacgagctgacaaacatctcgttcctaagataaacaacacaaatgtcgacaagagcgtggctacaatccacgcgacggtctttggttgcctgcgtagacgtgaaactggagagaagctctatgatacaaccacaaacaccgtttctgttattgacgacgagcataggaaccaatgtgcagccaattcattaacttccaagggaatgtttcaggtgatccaaagacaaggctcctctaggcgatttatggctctttgcaatactgatggtacggtagcaaaaacttggcctgttgcttccgttggtaagatcaggaagcccgtcgtgaatactgagatggatgatggaacagagcatcaactacataaagctgaaccagtgaatcttcaatttggtcactttgggatcagcgcttggcctagtgatggcgcaactagccacgccgggagtgtggatgacttaagagcagatattattgaaaccggaagcaggcattactcttcttgctgcagttcgcctcggacatctgatgggccttcaaaagagctgatggaggagcagtctgtgaatgggagcgatgaagatgatgaagaaggcgacgatgattttcatgagcctgattctgatgaagatctcagcgataacaatgacgagcgcaaccgcgacgagattggatcggtggatgaggaatcgacaaagtcagatgaagagtacgatgatctggcaatggaagacaagagttactggacagacaacgaagaagaagagtctcgagacacaatctccatggtatcgcaaaacaaccacaacgaggcttcaaagaccaacaaagatgacaaatactcccaaaacctcgatcttttcctcaagacaacgaaccagccattgactgaatcccttgagctcacgagtgaatacagaaacagaatgggagtagccgcctcggataaagccaagatgaggaaacgttcacttagtattccgcctgtcgggaaacatggttcaatcatagatgaccagattttggctaaccagactgattcagtactctaaagtgccccgtgacctctttgcctgtggttttctggtttttttttctttccgttttttttttttttgtgttttaacctatcaggtagcttaggtttccaaaactcattgaagtgtaaaacaaaatttgctaatttcatacatctctgtgc

SEQ ID NO: 46685 - protein, 717 aa, Arabidopsis thaliana
  peptide (1)..(717): Ceres Seq. ID no. 12575370
  misc_feature (165)..(216): Pfam Name: Thymidine kinase from herpesvirus Pfam Description: Thymidine kinase from herpesvirus
  misc_feature (148)..(216): Homolog of NCBI NO: 6855444 NR Description: hypothetical protein L2954.08 [Leishmania major]
  misc_feature (243)..(394): Homolog of NCBI NO: 6855444 NR Description: hypothetical protein L2954.08 [Leishmania major]
  misc_feature (151)..(220): Homolog of NCBI NO: 20094304 NR Description: 2-Phosphoglycerate kinase [Methanopyrus kandleri
  misc_feature (269)..(402): Homolog of NCBI NO: 20094304 NR Description: 2-Phosphoglycerate kinase [Methanopyrus kandleri
  misc_feature (155)..(395): Homolog of NCBI NO: 23619022 NR Description: hypothetical protein [Plasmodium falciparum 3D7]
  misc_feature (539)..(675): Homolog of NCBI NO: 28828411 NR Description: similar to Arabidopsis thaliana (Mouse-ear
  misc_feature (262)..(443): Homolog of NCBI NO: 28828411 NR Description: similar to Arabidopsis thaliana (Mouse-ear
  misc_feature (10)..(244): Homolog of NCBI NO: 28828411 NR Description: similar to Arabidopsis thaliana (Mouse-ear
  misc_feature (2)..(269): Homolog of NCBI NO: 30697428 NR Description: expressed protein [Arabidopsis thaliana]
  misc_feature (46)..(709): Homolog of NCBI NO: 30697428 NR Description: expressed protein [Arabidopsis thaliana]
MMTEATKVLYIVVREEGDDDDNNGDDSFRYTRPVLQSTLQLMGCKARHAFKISRRVFELIRSEGSCNTSPENGKEPEFAKEVGGSTCVEKLNCLVVAGDVDKNKSKPFEMYKRRTTVVVSREIFVDVVCDALAEYKYVGRDQRADLILACRIRERKESVTVLLCGTSGCGKSTLSALLGSRLGITTVVSTDSIRHMMRSFADEKQNPLLWASTYHAGEYLDPVAVAESKAKRKAKKLKGSRGVNSNAQKTDAGSNSSTTELLSHKQMAIEGYKAQSEMVIDSLDRLITTWEERNESVVVEGVHLSLNFVMGLMKKHPSIVPFMVYIANEEKHLERFAVRAKYMTLDPAKNKYVKYIRNIRTIQDYLCKRADKHLVPKINNTNVDKSVATIHATVFGCLRRRETGEKLYDTTTNTVSVIDDEHRNQCAANSLTSKGMFQVIQRQGSSRRFMALCNTDGTVAKTWPVASVGKIRKPVVNTEMDDGTEHQLHKAEPVNLQFGHFGISAWPSDGATSHAGSVDDLRADIIETGSRHYSSCCSSPRTSDGPSKELMEEQSVNGSDEDDEEGDDDFHEPDSDEDLSDNNDERNRDEIGSVDEESTKSDEEYDDLAMEDKSYWTDNEEEESRDTISMVSQNNHNEASKTNKDDKYSQNLDLFLKTTNQPLTESLELTSEYRNRMGVAASDKAKMRKRSLSIPPVGKHGSIIDDQILANQTDSVL

SEQ ID NO: 46686 - protein, 716 aa, Arabidopsis thaliana
  peptide (1)..(716): Ceres Seq. ID no. 12575371
  misc_feature (164)..(215): Pfam Name: Thymidine kinase from herpesvirus Pfam Description: Thymidine kinase from herpesvirus
  misc_feature (147)..(215): Homolog of NCBI NO: 6855444 NR Description: hypothetical protein L2954.08 [Leishmania major]
  misc_feature (242)..(393): Homolog of NCBI NO: 6855444 NR Description: hypothetical protein L2954.08 [Leishmania major]
  misc_feature (150)..(219): Homolog of NCBI NO: 20094304 NR Description: 2-Phosphoglycerate kinase [Methanopyrus kandleri
  misc_feature (268)..(401): Homolog of NCBI NO: 20094304 NR Description: 2-Phosphoglycerate kinase [Methanopyrus kandleri
  misc_feature (154)..(394): Homolog of NCBI NO: 23619022 NR Description: hypothetical protein [Plasmodium falciparum 3D7]
  misc_feature (538)..(674): Homolog of NCBI NO: 28828411 NR Description: similar to Arabidopsis thaliana (Mouse-ear
  misc_feature (261)..(442): Homolog of NCBI NO: 28828411 NR Description: similar to Arabidopsis thaliana (Mouse-ear
  misc_feature (9)..(243): Homolog of NCBI NO: 28828411 NR Description: similar to Arabidopsis thaliana (Mouse-ear
  misc_feature (1)..(268): Homolog of NCBI NO: 30697428 NR Description: expressed protein [Arabidopsis thaliana]
  misc_feature (45)..(708): Homolog of NCBI NO: 30697428 NR Description: expressed protein [Arabidopsis thaliana]
MTEATKVLYIVVREEGDDDDNNGDDSFRYTRPVLQSTLQLMGCKARHAFKISRRVFELIRSEGSCNTSPENGKEPEFAKEVGGSTCVEKLNCLVVAGDVDKNKSKPFEMYKRRTTVVVSREIFVDVVCDALAEYKYVGRDQRADLILACRIRERKESVTVLLCGTSGCGKSTLSALLGSRLGITTVVSTDSIRHMMRSFADEKQNPLLWASTYHAGEYLDPVAVAESKAKRKAKKLKGSRGVNSNAQKTDAGSNSSTTELLSHKQMAIEGYKAQSEMVIDSLDRLITTWEERNESVVVEGVHLSLNFVMGLMKKHPSIVPFMVYIANEEKHLERFAVRAKYMTLDPAKNKYVKYIRNIRTIQDYLCKRADKHLVPKINNTNVDKSVATIHATVFGCLRRRETGEKLYDTTTNTVSVIDDEHRNQCAANSLTSKGMFQVIQRQGSSRRFMALCNTDGTVAKTWPVASVGKIRKPVVNTEMDDGTEHQLHKAEPVNLQFGHFGISAWPSDGATSHAGSVDDLRADIIETGSRHYSSCCSSPRTSDGPSKELMEEQSVNGSDEDDEEGDDDFHEPDSDEDLSDNNDERNRDEIGSVDEESTKSDEEYDDLAMEDKSYWTDNEEEESRDTISMVSQNNHNEASKTNKDDKYSQNLDLFLKTTNQPLTESLELTSEYRNRMGVAASDKAKMRKRSLSIPPVGKHGSIIDDQILANQTDSVL

SEQ ID NO: 46687 - protein, 676 aa, Arabidopsis thaliana
  peptide (1)..(676): Ceres Seq. ID no. 12575372
  misc_feature (124)..(175): Pfam Name: Thymidine kinase from herpesvirus Pfam Description: Thymidine kinase from herpesvirus
  misc_feature (107)..(175): Homolog of NCBI NO: 6855444 NR Description: hypothetical protein L2954.08 [Leishmania major]
  misc_feature (202)..(353): Homolog of NCBI NO: 6855444 NR Description: hypothetical protein L2954.08 [Leishmania major]
  misc_feature (110)..(179): Homolog of NCBI NO: 20094304 NR Description: 2-Phosphoglycerate kinase [Methanopyrus kandleri
  misc_feature (228)..(361): Homolog of NCBI NO: 20094304 NR Description: 2-Phosphoglycerate kinase [Methanopyrus kandleri
  misc_feature (114)..(354): Homolog of NCBI NO: 23619022 NR Description: hypothetical protein [Plasmodium falciparum 3D7]
  misc_feature (498)..(634): Homolog of NCBI NO: 28828411 NR Description: similar to Arabidopsis thaliana (Mouse-ear
  misc_feature (221)..(402): Homolog of NCBI NO: 28828411 NR Description: similar to Arabidopsis thaliana (Mouse-ear
  misc_feature (1)..(203): Homolog of NCBI NO: 28828411 NR Description: similar to Arabidopsis thaliana (Mouse-ear
  misc_feature (1)..(228): Homolog of NCBI NO: 30697428 NR Description: expressed protein [Arabidopsis thaliana]
  misc_feature (5)..(668): Homolog of NCBI NO: 30697428 NR Description: expressed protein [Arabidopsis thaliana]
MGCKARHAFKISRRVFELIRSEGSCNTSPENGKEPEFAKEVGGSTCVEKLNCLVVAGDVDKNKSKPFEMYKRRTTVVVSREIFVDVVCDALAEYKYVGRDQRADLILACRIRERKESVTVLLCGTSGCGKSTLSALLGSRLGITTVVSTDSIRHMMRSFADEKQNPLLWASTYHAGEYLDPVAVAESKAKRKAKKLKGSRGVNSNAQKTDAGSNSSTTELLSHKQMAIEGYKAQSEMVIDSLDRLITTWEERNESVVVEGVHLSLNFVMGLMKKHPSIVPFMVYIANEEKHLERFAVRAKYMTLDPAKNKYVKYIRNIRTIQDYLCKRADKHLVPKINNTNVDKSVATIHATVFGCLRRRETGEKLYDTTTNTVSVIDDEHRNQCAANSLTSKGMFQVIQRQGSSRRFMALCNTDGTVAKTWPVASVGKIRKPVVNTEMDDGTEHQLHKAEPVNLQFGHFGISAWPSDGATSHAGSVDDLRADIIETGSRHYSSCCSSPRTSDGPSKELMEEQSVNGSDEDDEEGDDDFHEPDSDEDLSDNNDERNRDEIGSVDEESTKSDEEYDDLAMEDKSYWTDNEEEESRDTISMVSQNNHNEASKTNKDDKYSQNLDLFLKTTNQPLTESLELTSEYRNRMGVAASDKAKMRKRSLSIPPVGKHGSIIDDQILANQTDSVL

SEQ ID NO: 46688 - DNA, 2591 bp, Arabidopsis thaliana
  misc_feature (1)..(2591): Ceres Seq. ID no. 12575373
  misc_feature: MA Experiment ID: 108488 Result: Up-regulated in Transcription
  misc_feature: MA Experiment ID: 20000069 Result: Down-regulated in Transcription
  misc_feature: MA Experiment 20000069 PARAMETER Experiment Name: At_100uM_ABA_Mutants_cDNA_P Parameter: Plant Line Value: CS23
  misc_feature: MA Experiment 20000069 PARAMETER Experiment Name: At_100uM_ABA_Mutants_cDNA_P Parameter: Timepoint (hr) Value: 6
  misc_feature: MA Experiment 20000069 PARAMETER Experiment Name: At_100uM_ABA_Mutants_cDNA_P Parameter: Tissue Value: Aerial
  misc_feature: MA Experiment 20000069 PARAMETER Experiment Name: At_100uM_ABA_Mutants_cDNA_P Parameter: Treatment Value: 100uM ABA vs. No Treatment
  misc_feature: MA Experiment ID: 20000072 Result: Down-regulated in Transcription
  misc_feature: MA Experiment 20000072 PARAMETER Experiment Name: At_100uM_ABA_Mutants_cDNA_P Parameter: Plant Line Value: CS8105
  misc_feature: MA Experiment 20000072 PARAMETER Experiment Name: At_100uM_ABA_Mutants_cDNA_P Parameter: Timepoint (hr) Value: 6
  misc_feature: MA Experiment 20000072 PARAMETER Experiment Name: At_100uM_ABA_Mutants_cDNA_P Parameter: Tissue Value: Aerial
  misc_feature: MA Experiment 20000072 PARAMETER Experiment Name: At_100uM_ABA_Mutants_cDNA_P Parameter: Treatment Value: 100uM ABA vs. No Treatment
  misc_feature: MA Experiment ID: 20000087 Result: Down-regulated in Transcription
  misc_feature: MA Experiment 20000087 PARAMETER Experiment Name: At_100uM_ABA_Mutants_cDNA_P Parameter: Plant Line Value: WS
  misc_feature: MA Experiment 20000087 PARAMETER Experiment Name: At_100uM_ABA_Mutants_cDNA_P Parameter: Timepoint (hr) Value: 6
  misc_feature: MA Experiment 20000087 PARAMETER Experiment Name: At_100uM_ABA_Mutants_cDNA_P Parameter: Tissue Value: Aerial
  misc_feature: MA Experiment 20000087 PARAMETER Experiment Name: At_100uM_ABA_Mutants_cDNA_P Parameter: Treatment Value: 100uM ABA vs. No Treatment
  misc_feature: MA Experiment ID: 20000089 Result: Down-regulated in Transcription
  misc_feature: MA Experiment ID: 20000090 Result: Down-regulated in Transcription
  misc_feature: MA Experiment ID: 20000185 Result: Up-regulated in Transcription
  misc_feature: MA Experiment 20000185 PARAMETER Experiment Name: At_Roots__P Parameter: Age (day) Value: 7 vs. 21
  misc_feature: MA Experiment 20000185 PARAMETER Experiment Name: At_Roots__P Parameter: Organism Value: A. thaliana
  misc_feature: MA Experiment 20000185 PARAMETER Experiment Name: At_Roots__P Parameter: Tissue Value: Roots vs. Whole Plant
  misc_feature: MA Experiment ID: 20000234 Result: Up-regulated in Transcription
  misc_feature: MA Experiment 20000234 PARAMETER Experiment Name: At_Siliques_P Parameter: Age (day) Value: 21
  misc_feature: MA Experiment 20000234 PARAMETER Experiment Name: At_Siliques_P Parameter: Organism Value: A. thaliana
  misc_feature: MA Experiment 20000234 PARAMETER Experiment Name: At_Siliques_P Parameter: Plant Line Value: WS
  misc_feature: MA Experiment 20000234 PARAMETER Experiment Name: At_Siliques_P Parameter: Tissue Value: Less Than 5mm Siliques vs. Whole Plant
  misc_feature: MA Experiment ID: 20000235 Result: Up-regulated in Transcription
  misc_feature: MA Experiment 20000235 PARAMETER Experiment Name: At_Siliques_P Parameter: Age (day) Value: 21
  misc_feature: MA Experiment 20000235 PARAMETER Experiment Name: At_Siliques_P Parameter: Organism Value: A. thaliana
  misc_feature: MA Experiment 20000235 PARAMETER Experiment Name: At_Siliques_P Parameter: Plant Line Value: WS
  misc_feature: MA Experiment 20000235 PARAMETER Experiment Name: At_Siliques_P Parameter: Tissue Value: 5-10mm Siliques vs. Whole Plant
  misc_feature: MA Experiment ID: 20000265 Result: Up-regulated in Transcription
  misc_feature: MA Experiment 20000265 PARAMETER Experiment Name: At_Open_Flower_P Parameter: Age (day) Value: 21
  misc_feature: MA Experiment 20000265 PARAMETER Experiment Name: At_Open_Flower_P Parameter: Plant Line Value: WS
  misc_feature: MA Experiment 20000265 PARAMETER Experiment Name: At_Open_Flower_P Parameter: Tissue Value: Closed Flower vs. Whole Plant
  misc_feature: MA Experiment ID: 20000437 Result: Down-regulated in Transcription
  misc_feature: MA Experiment 20000437 PARAMETER Experiment Name: At_Drought_P Parameter: Age (day) Value: 8
  misc_feature: MA Experiment 20000437 PARAMETER Experiment Name: At_Drought_P Parameter: Organism Value: A. thaliana
  misc_feature: MA Experiment 20000437 PARAMETER Experiment Name: At_Drought_P Parameter: Plant Line Value: WS
  misc_feature: MA Experiment 20000437 PARAMETER Experiment Name: At_Drought_P Parameter: Timepoint (hr) Value: 24
  misc_feature: MA Experiment 20000437 PARAMETER Experiment Name: At_Drought_P Parameter: Tissue Value: Whole Plant
  misc_feature: MA Experiment 20000437 PARAMETER Experiment Name: At_Drought_P Parameter: Treatment Value: Drought vs. No Drought
  misc_feature: MA Experiment ID: 20000573 Result: Down-regulated in Transcription
  misc_feature: MA Experiment 20000573 PARAMETER Experiment Name: At_100uM_ABA_Mutants__P Parameter: Organism Value: A. thaliana
  misc_feature: MA Experiment 20000573 PARAMETER Experiment Name: At_100uM_ABA_Mutants__P Parameter: Plant Line Value: CS22 vs. Ler wt
  misc_feature: MA Experiment 20000573 PARAMETER Experiment Name: At_100uM_ABA_Mutants__P Parameter: Timepoint (hr) Value: N/A
  misc_feature: MA Experiment 20000573 PARAMETER Experiment Name: At_100uM_ABA_Mutants__P Parameter: Tissue Value: Whole Plant
  misc_feature: MA Experiment 20000573 PARAMETER Experiment Name: At_100uM_ABA_Mutants__P Parameter: Treatment Value: None
  misc_feature: MA Experiment ID: 20000794 Result: Down-regulated in Transcription
  misc_feature: MA Experiment 20000794 PARAMETER Experiment Name: At_Petals_P Parameter: Age (day) Value: 23-25 days
  misc_feature: MA Experiment 20000794 PARAMETER Experiment Name: At_Petals_P Parameter: Plant Line Value: WS
  misc_feature: MA Experiment 20000794 PARAMETER Experiment Name: At_Petals_P Parameter: Tissue Value: Petals vs. Whole plant
  misc_feature: MA Experiment ID: 20001557 Result: Up-regulated in Transcription
  misc_feature: MA Experiment 20001557 PARAMETER Experiment Name: At_Drought_Soil_Dry_P Parameter: Age (day) Value: 27
  misc_feature: MA Experiment 20001557 PARAMETER Experiment Name: At_Drought_Soil_Dry_P Parameter: Organism Value: A. thaliana
  misc_feature: MA Experiment 20001557 PARAMETER Experiment Name: At_Drought_Soil_Dry_P Parameter: Plant Line Value: WS
  misc_feature: MA Experiment 20001557 PARAMETER Experiment Name: At_Drought_Soil_Dry_P Parameter: Post Timepoint (hr) Value: 3
  misc_feature: MA Experiment 20001557 PARAMETER Experiment Name: At_Drought_Soil_Dry_P Parameter: Post-Treatment Value: Re-Water vs. No Drought
  misc_feature: MA Experiment 20001557 PARAMETER Experiment Name: At_Drought_Soil_Dry_P Parameter: Timepoint (day) Value: 13
  misc_feature: MA Experiment 20001557 PARAMETER Experiment Name: At_Drought_Soil_Dry_P Parameter: Treatment Value: Drought vs. No Drought
  misc_feature: MA Experiment ID: 20001558 Result: Up-regulated in Transcription
  misc_feature: MA Experiment 20001558 PARAMETER Experiment Name: At_Drought_Soil_Dry_P Parameter: Age (day) Value: 27
  misc_feature: MA Experiment 20001558 PARAMETER Experiment Name: At_Drought_Soil_Dry_P Parameter: Organism Value: A. thaliana
  misc_feature: MA Experiment 20001558 PARAMETER Experiment Name: At_Drought_Soil_Dry_P Parameter: Plant Line Value: WS
  misc_feature: MA Experiment 20001558 PARAMETER Experiment Name: At_Drought_Soil_Dry_P Parameter: Post Timepoint (hr) Value: 6
  misc_feature: MA Experiment 20001558 PARAMETER Experiment Name: At_Drought_Soil_Dry_P Parameter: Post-Treatment Value: Re-Water vs. No Drought
  misc_feature: MA Experiment 20001558 PARAMETER Experiment Name: At_Drought_Soil_Dry_P Parameter: Timepoint (day) Value: 13
  misc_feature: MA Experiment 20001558 PARAMETER Experiment Name: At_Drought_Soil_Dry_P Parameter: Treatment Value: Drought vs. No Drought
  misc_feature: MA Experiment ID: 20001560 Result: Up-regulated in Transcription
  misc_feature: MA Experiment 20001560 PARAMETER Experiment Name: At_Drought_Soil_Dry_P Parameter: Age (day) Value: 28
  misc_feature: MA Experiment 20001560 PARAMETER Experiment Name: At_Drought_Soil_Dry_P Parameter: Organism Value: A. thaliana
  misc_feature: MA Experiment 20001560 PARAMETER Experiment Name: At_Drought_Soil_Dry_P Parameter: Plant Line Value: WS
  misc_feature: MA Experiment 20001560 PARAMETER Experiment Name: At_Drought_Soil_Dry_P Parameter: Post Timepoint (hr) Value: None
  misc_feature: MA Experiment 20001560 PARAMETER Experiment Name: At_Drought_Soil_Dry_P Parameter: Post-Treatment Value: None
  misc_feature: MA Experiment 20001560 PARAMETER Experiment Name: At_Drought_Soil_Dry_P Parameter: Timepoint (day) Value: 14
  misc_feature: MA Experiment 20001560 PARAMETER Experiment Name: At_Drought_Soil_Dry_P Parameter: Treatment Value: Drought vs. No Drought
  misc_feature: MA Experiment ID: 20001905 Result: Down-regulated in Transcription
  misc_feature: MA Experiment 20001905 PARAMETER Experiment Name: At_Drought_Reproduction_P Parameter: Age (day) Value: 40
  misc_feature: MA Experiment 20001905 PARAMETER Experiment Name: At_Drought_Reproduction_P Parameter: Organism Value: A. thaliana
  misc_feature: MA Experiment 20001905 PARAMETER Experiment Name: At_Drought_Reproduction_P Parameter: Plant Line Value: WS
  misc_feature: MA Experiment 20001905 PARAMETER Experiment Name: At_Drought_Reproduction_P Parameter: Timepoint (day) Value: 10
  misc_feature: MA Experiment 20001905 PARAMETER Experiment Name: At_Drought_Reproduction_P Parameter: Tissue Value: Rosettes
  misc_feature: MA Experiment 20001905 PARAMETER Experiment Name: At_Drought_Reproduction_P Parameter: Treatment Value: Drought vs. No Drought
  misc_feature: MA Experiment ID: 20001911 Result: Down-regulated in Transcription
  misc_feature: MA Experiment 20001911 PARAMETER Experiment Name: At_Drought_Reproduction_P Parameter: Age (day) Value: 40
  misc_feature: MA Experiment 20001911 PARAMETER Experiment Name: At_Drought_Reproduction_P Parameter: Organism Value: A. thaliana
  misc_feature: MA Experiment 20001911 PARAMETER Experiment Name: At_Drought_Reproduction_P Parameter: Plant Line Value: WS
  misc_feature: MA Experiment 20001911 PARAMETER Experiment Name: At_Drought_Reproduction_P Parameter: Timepoint (day) Value: 10
  misc_feature: MA Experiment 20001911 PARAMETER Experiment Name: At_Drought_Reproduction_P Parameter: Tissue Value: Flowers
  misc_feature: MA Experiment 20001911 PARAMETER Experiment Name: At_Drought_Reproduction_P Parameter: Treatment Value: Drought vs. No Drought
accatcattcacacacactcatggcttcttcttcttcttcttcttcctccatcacaatcatcaccaccttcctcttccttctcctccacacaaccgccaaaaaaacctacatcatccgcgtcaatcactccgataaaccggaatcattcctcactcaccacgattggtacacatctcaactcaattcagaatcatctcttctctacacttacacaacctccttccatggcttctccgcttacctcgactccaccgaagccgattctctcctctcctcctcaaactcaatcctcgatatcttcgaagatcctctctacacacttcacactacgcgtactcctgagtttctcggtctcaattccgaattcggtgttcacgatctcggttcttcttctaacggcgttatcatcggagttttagatactggcgtttggcctgaatctagaagcttcgatgatactgatatgcctgagattccttctaaatggaaaggagaatgtgaatctggttccgatttcgattccaagttgtgtaacaagaagcttatcggagctagaagcttctccaaaggatttcaaatggcttctggtggtggtttttcgagtaagcgtgaatctgtttctcctcgtgatgttgacggacatggaacacatacttcaactaccgccgcgggatccgccgttagaaacgctagcttcctcggttacgccgccggtacggccagaggtatggccactcgtgctcgtgttgctacttataaagtttgttggagtactggttgttttggatctgatatactagctgctatggatcgagctatacttgatggtgttgatgtgctttcgttatctcttggtggtggttctgctccgtattatcgcgatacgattgcgattggagcgttttcggctatggagagaggtgtttttgtgtcttgttctgctggtaatagtggtcctactagagcttctgttgccaatgttgctccttgggttatgactgttggtgctggtactttagatagagattttccggcttttgcgaatctcggtaacgggaaacgacttaccggtgtttcgctgtatagcggtgtaggaatggggacgaagccgcttgaattggtttataataaagggaatagtagttcgagtaatctttgtttacctggttcgcttgattcgagtattgttcgtgggaagattgttgtttgtgatagaggtgttaatgctagagttgagaaaggagctgtggttagagatgctggtggtttagggatgataatggcgaatactgctgcgagtggagaggagcttgtggcggatagtcatttgcttcccgcgatcgctgtagggaagaagactggtgatttacttagggagtatgttaagtcagattctaaaccaaccgctcttcttgtttttaaaggaacggttcttgacgttaagccgtctcctgtggttgctgcttttagctcgagaggtcctaatactgttactcctgaaatcttgaagcctgatgttattggtcctggagttaatattttggctggttggtctgacgctattggtcctactggtcttgacaaggactctaggaggactcagttcaacatcatgtcaggtacgtcaatgtcatgcccacacatcagtggtttagcgggtcttttgaaagcagctcaccctgagtggagtccgagtgctatcaaatcagctctcatgactacagcttacgttcttgacaacaccaacgctcctctccatgatgctgcagacaacagcctatctaacccatatgctcacggctcgggccatgtagatccccaaaaggctctctcaccaggtcttgtctacgacatctcaaccgaggaatacatcaggtttttgtgctctctagactacacagtcgatcacattgttgcgattgtgaagcgacctagcgttaactgctcgaagaagttctcagatcctggtcagctcaactacccaagtttctcggttttgtttgggggtaaaagagttgtgcggtacactcgggaagtaacaaatgttggtgcagcaagctcggtttacaaagtgacggttaatggagctcctagtgtcggaatctctgttaaaccatcgaaactttcgtttaaaagcgtgggagagaagaagaggtacacagtcacgtttgttagcaagaaaggagtgagtatgacgaacaaggctgagtttggttccatcacttggagcaatccgcagcacgaagtgagaagtcccgttgcattctcttggaaccggttttgataaaaaaactaacatccctagtgatgatgttttctatttaagttatcttgattgggtttaggctaaaccaaagcccatcatgagccataagtagtgggaagtgttcttgtgtggtttggtttgagtcattgagtgtgtaggtgaaagcatcccaaaaaaagttagggatgataaaagaaaatgttgtcaggaaaagaacgttgatgtcgtcatatgtagtgcttcaagtttcttcattttaaccatcatactgatgtaatagtatctttcaaataagcaacaaaagtaatgtgacataatgtcatc

SEQ ID NO: 46689 - protein, 760 aa, Arabidopsis thaliana
  peptide (1)..(760): Ceres Seq. ID no. 12575374
  misc_feature (364)..(461): Pfam Name: PA domain Pfam Description: PA domain
  misc_feature (23)..(757): Homolog of NCBI NO: 30678198 NR Description: subtilisin-like serine protease, putative
  misc_feature (204)..(757): Homolog of NCBI NO: 29786399 NR Description: putative serine protease [Populus euramericana]
  misc_feature (35)..(753): Homolog of NCBI NO: 18400323 NR Description: subtilisin-like serine protease
  misc_feature (35)..(753): Homolog of NCBI NO: 13430434 NR Description: putative subtilisin serine protease [Arabidopsis
  misc_feature (34)..(759): Homolog of NCBI NO: 22331076 NR Description: subtilisin-like serine protease, putative
  misc_feature (17)..(757): Homolog of NCBI NO: 7435657 NR Description: subtilisin-like proteinase (EC 3.4.21.-) 1 -
  misc_feature (33)..(757): Homolog of NCBI NO: 14488360 NR Description: putative serine protease [Oryza sativa (japonica
  misc_feature (35)..(757): Homolog of NCBI NO: 1076414 NR Description: subtilisin-like proteinase (EC 3.4.21.-),
  misc_feature (7)..(757): Homolog of NCBI NO: 20147211 NR Description: AT5g67360/K8K14_8 [Arabidopsis thaliana]
  misc_feature (7)..(757): Homolog of NCBI NO: 18425181 NR Description: subtilisin-like serine protease ARA12
HHSHTLMASSSSSSSSITIITTFLFLLLHTTAKKTYIIRVNHSDKPESFLTHHDWYTSQLNSESSLLYTYTTSFHGFSAYLDSTEADSLLSSSNSILDIFEDPLYTLHTTRTPEFLGLNSEFGVHDLGSSSNGVIIGVLDTGVWPESRSFDDTDMPEIPSKWKGECESGSDFDSKLCNKKLIGARSFSKGFQMASGGGFSSKRESVSPRDVDGHGTHTSTTAAGSAVRNASFLGYAAGTARGMATRARVATYKVCWSTGCFGSDILAAMDRAILDGVDVLSLSLGGGSAPYYRDTIAIGAFSAMERGVFVSCSAGNSGPTRASVANVAPWVMTVGAGTLDRDFPAFANLGNGKRLTGVSLYSGVGMGTKPLELVYNKGNSSSSNLCLPGSLDSSIVRGKIVVCDRGVNARVEKGAVVRDAGGLGMIMANTAASGEELVADSHLLPAIAVGKKTGDLLREYVKSDSKPTALLVFKGTVLDVKPSPVVAAFSSRGPNTVTPEILKPDVIGPGVNILAGWSDAIGPTGLDKDSRRTQFNIMSGTSMSCPHISGLAGLLKAAHPEWSPSAIKSALMTTAYVLDNTNAPLHDAADNSLSNPYAHGSGHVDPQKALSPGLVYDISTEEYIRFLCSLDYTVDHIVAIVKRPSVNCSKKFSDPGQLNYPSFSVLFGGKRVVRYTREVTNVGAASSVYKVTVNGAPSVGISVKPSKLSFKSVGEKKRYTVTFVSKKGVSMTNKAEFGSITWSNPQHEVRSPVAFSWNRF

SEQ ID NO: 46690 - protein, 754 aa, Arabidopsis thaliana
  peptide (1)..(754): Ceres Seq. ID no. 12575375
  misc_feature (358)..(455): Pfam Name: PA domain Pfam Description: PA domain
  misc_feature (17)..(751): Homolog of NCBI NO: 30678198 NR Description: subtilisin-like serine protease, putative
  misc_feature (198)..(751): Homolog of NCBI NO: 29786399 NR Description: putative serine protease [Populus euramericana]
  misc_feature (29)..(747): Homolog of NCBI NO: 18400323 NR Description: subtilisin-like serine protease
  misc_feature (29)..(747): Homolog of NCBI NO: 13430434 NR Description: putative subtilisin serine protease [Arabidopsis
  misc_feature (28)..(753): Homolog of NCBI NO: 22331076 NR Description: subtilisin-like serine protease, putative
  misc_feature (11)..(751): Homolog of NCBI NO: 7435657 NR Description: subtilisin-like proteinase (EC 3.4.21.-) 1 -
  misc_feature (27)..(751): Homolog of NCBI NO: 14488360 NR Description: putative serine protease [Oryza sativa (japonica
  misc_feature (29)..(751): Homolog of NCBI NO: 1076414 NR Description: subtilisin-like proteinase (EC 3.4.21.-),
  misc_feature (1)..(751): Homolog of NCBI NO: 20147211 NR Description: AT5g67360/K8K14_8 [Arabidopsis thaliana]
  misc_feature (1)..(751): Homolog of NCBI NO: 18425181 NR Description: subtilisin-like serine protease ARA12
MASSSSSSSSITIITTFLFLLLHTTAKKTYIIRVNHSDKPESFLTHHDWYTSQLNSESSLLYTYTTSFHGFSAYLDSTEADSLLSSSNSILDIFEDPLYTLHTTRTPEFLGLNSEFGVHDLGSSSNGVIIGVLDTGVWPESRSFDDTDMPEIPSKWKGECESGSDFDSKLCNKKLIGARSFSKGFQMASGGGFSSKRESVSPRDVDGHGTHTSTTAAGSAVRNASFLGYAAGTARGMATRARVATYKVCWSTGCFGSDILAAMDRAILDGVDVLSLSLGGGSAPYYRDTIAIGAFSAMERGVFVSCSAGNSGPTRASVANVAPWVMTVGAGTLDRDFPAFANLGNGKRLTGVSLYSGVGMGTKPLELVYNKGNSSSSNLCLPGSLDSSIVRGKIVVCDRGVNARVEKGAVVRDAGGLGMIMANTAASGEELVADSHLLPAIAVGKKTGDLLREYVKSDSKPTALLVFKGTVLDVKPSPVVAAFSSRGPNTVTPEILKPDVIGPGVNILAGWSDAIGPTGLDKDSRRTQFNIMSGTSMSCPHISGLAGLLKAAHPEWSPSAIKSALMTTAYVLDNTNAPLHDAADNSLSNPYAHGSGHVDPQKALSPGLVYDISTEEYIRFLCSLDYTVDHIVAIVKRPSVNCSKKFSDPGQLNYPSFSVLFGGKRVVRYTREVTNVGAASSVYKVTVNGAPSVGISVKPSKLSFKSVGEKKRYTVTFVSKKGVSMTNKAEFGSITWSNPQHEVRSPVAFSWNRF

SEQ ID NO: 46691 - protein, 606 aa, Arabidopsis thaliana
  peptide (1)..(606): Ceres Seq. ID no. 12575376
  misc_feature (210)..(307): Pfam Name: PA domain Pfam Description: PA domain
  misc_feature (1)..(603): Homolog of NCBI NO: 30678198 NR Description: subtilisin-like serine protease, putative
  misc_feature (50)..(603): Homolog of NCBI NO: 29786399 NR Description: putative serine protease [Populus euramericana]
  misc_feature (1)..(599): Homolog of NCBI NO: 18400323 NR Description: subtilisin-like serine protease
  misc_feature (1)..(599): Homolog of NCBI NO: 13430434 NR Description: putative subtilisin serine protease [Arabidopsis
  misc_feature (1)..(605): Homolog of NCBI NO: 22331076 NR Description: subtilisin-like serine protease, putative
  misc_feature (1)..(603): Homolog of NCBI NO: 7435657 NR Description: subtilisin-like proteinase (EC 3.4.21.-) 1 -
  misc_feature (1)..(603): Homolog of NCBI NO: 14488360 NR Description: putative serine protease [Oryza sativa (japonica
  misc_feature (1)..(603): Homolog of NCBI NO: 1076414 NR Description: subtilisin-like proteinase (EC 3.4.21.-),
  misc_feature (1)..(603): Homolog of NCBI NO: 20147211 NR Description: AT5g67360/K8K14_8 [Arabidopsis thaliana]
  misc_feature (1)..(603): Homolog of NCBI NO: 18425181 NR Description: subtilisin-like serine protease ARA12
MPEIPSKWKGECESGSDFDSKLCNKKLIGARSFSKGFQMASGGGFSSKRESVSPRDVDGHGTHTSTTAAGSAVRNASFLGYAAGTARGMATRARVATYKVCWSTGCFGSDILAAMDRAILDGVDVLSLSLGGGSAPYYRDTIAIGAFSAMERGVFVSCSAGNSGPTRASVANVAPWVMTVGAGTLDRDFPAFANLGNGKRLTGVSLYSGVGMGTKPLELVYNKGNSSSSNLCLPGSLDSSIVRGKIVVCDRGVNARVEKGAVVRDAGGLGMIMANTAASGEELVADSHLLPAIAVGKKTGDLLREYVKSDSKPTALLVFKGTVLDVKPSPVVAAFSSRGPNTVTPEILKPDVIGPGVNILAGWSDAIGPTGLDKDSRRTQFNIMSGTSMSCPHISGLAGLLKAAHPEWSPSAIKSALMTTAYVLDNTNAPLHDAADNSLSNPYAHGSGHVDPQKALSPGLVYDISTEEYIRFLCSLDYTVDHIVAIVKRPSVNCSKKFSDPGQLNYPSFSVLFGGKRVVRYTREVTNVGAASSVYKVTVNGAPSVGISVKPSKLSFKSVGEKKRYTVTFVSKKGVSMTNKAEFGSITWSNPQHEVRSPVAFSWNRF

SEQ ID NO: 46692 - DNA, 2263 bp, Arabidopsis thaliana
  misc_feature (1)..(2263): Ceres Seq. ID no. 15174481
  misc_feature: MA Experiment ID: 20000184 Result: Down-regulated in Transcription
  misc_feature: MA Experiment 20000184 PARAMETER Experiment Name: At_Shoots__P Parameter: Age (day) Value: 7
  misc_feature: MA Experiment 20000184 PARAMETER Experiment Name: At_Shoots__P Parameter: Tissue Value: Shoots vs. Whole Plant
  misc_feature: MA Experiment ID: 20001905 Result: Down-regulated in Transcription
  misc_feature: MA Experiment 20001905 PARAMETER Experiment Name: At_Drought_Reproduction_P Parameter: Age (day) Value: 40
  misc_feature: MA Experiment 20001905 PARAMETER Experiment Name: At_Drought_Reproduction_P Parameter: Organism Value: A. thaliana
  misc_feature: MA Experiment 20001905 PARAMETER Experiment Name: At_Drought_Reproduction_P Parameter: Plant Line Value: WS
  misc_feature: MA Experiment 20001905 PARAMETER Experiment Name: At_Drought_Reproduction_P Parameter: Timepoint (day) Value: 10
  misc_feature: MA Experiment 20001905 PARAMETER Experiment Name: At_Drought_Reproduction_P Parameter: Tissue Value: Rosettes
  misc_feature: MA Experiment 20001905 PARAMETER Experiment Name: At_Drought_Reproduction_P Parameter: Treatment Value: Drought vs. No Drought
gctctctcttttcttgcaaacttttgctcggaattctatgctttgctgatctattgttttctctctgcaaaagtaatgagaagctttttgctatgttaagctttagatctgctattatttgttcctttcaagattctaactttggagcaagtaagcaagtcagagagaggacaaattagctgaaatgctggagattgaaagccctacgagtctctgtttccgtacaaacactacttgtaatgctctgcttcgagagcttcagaaaatatgggttgatattggtgagagtgatgctgagaaagaccggatgctaatggaattggagaaggaatgtcttgaaatctacagaagaaaagtggacgaggctgctaattccaaggcacagcttcatcagtcattggtatcaattgaagctgaaattgcttctttactggctgctcttggagtgttcaacagccactcaccgatgaaagcaaaggaaggttcaaaatcattgaaagaaaaacttgctgctgtgaggccaatgcttgaggacttaagattgcaaaaagatgaaagaatgaagcaatttgtggatataaaagcacaaattgagaagatgagtggtgaaatatctggatacagtgaccaactcaacaaaacgatggtcggttctttggctcttgatgaacaagaccagactcttcggaagcttaacgagtatcaaacacatctccgctcgctccagaaagagaagtcggatcgtctgaacaaggttttggactatgtgaatgaggtgcacactctaggtggtgttcttggagtcgactttggtcaaactgttagtgaggttcatccgagcttacataggactgaccatgagcagtctacaaacatttctgatgatacattggatggtctacaccacatgattcataagctgaaaaccgaaaggagcgttcggtttcaaaagttaaaggatgtagcgggttcactttttgagctatggaatctaatggacacatctcaagaagaaagaacgaaatttgcaagtgtcagttatgttgtaagatcatcagaatctgatatcactgagccaaatatcctctctagtgaaacaattgaacaggtgtctgcagaagtagactgttttaataagctgaaagctagcagaatgaaggagcttgtgatgaaaagaaggactgagttagagaatctttgcagattggctcacattgaggctgacacaagcacatcgcttgagaaatcaactgctttgattgattctggattagtggacccttcagagcttcttacaaatattgaattgcatataaacaaaatcaaagaagaagcacatagccggaaagaaataatcgataggattgaccgctggttatctgcgtgcgaagaggaaaactggctagaagaatacaatcaggatgaaacccggtatagtgccggaagaggtggacatgtaaacctcaagcatgcagaacgcgcccggatcacagtaaacaagatcccatgtatcaatggttgacaatctcatcaggaaaacacttctatgggaggacgaaacacggaaatcatttctatatgatggtgttcgattggtatccatacttgaagattataaattgacaaggaaacaacaggaagaggaaaagagacgataccgggatcaaaagaagatgcaggatctgttaataaagcggagggaatcaatttatggatcaaaaccgagtccaagaagaagcaacagtgtaagaaagaccaacggatacaatggggatgcatctgtgcctcctacgccccgcagaaactcagctggagcaacaaataacgacataatgaccaccccaagatcatactcaagccatcgccaaaacggatatttcaaggaagtaagaagactgtcaacagctcctttgaactttgtggcaataccaaaggaagactctgtctctacatacacttcggtttgcggctctgaaccagattcaccgttatataactaagtctcattaggcagcagttggttcaaccacaagaacttgagatggagtaggagttgggagttagatgaatgtaatcaaaaggaggagttactgatacagatcaagtaaccgtagacaattagtggtcgtatgtgtgtgactttgagttgacttgtgacggatacttcagggtaatagaagagtagaaaatggatgttatgttgagttgttaatttgttatagtagcttcaaaatatttcttttaatttcatcttttctttggt

SEQ ID NO: 46693 - protein, 445 aa, Arabidopsis thaliana
  peptide (1)..(445): Ceres Seq. ID no. 15174482
  misc_feature (38)..(441): Pfam Name: Microtubule associated protein (MAP65/ASE1 family) Pfam Description: Microtubule associated protein (MAP65/ASE1
  misc_feature (17)..(443): Homolog of NCBI NO: 15240485 NR Description: microtubule associated protein (MAP65/ASE1)
  misc_feature (16)..(443): Homolog of NCBI NO: 11558252 NR Description: microtubule-associated protein MAP65-1a
  misc_feature (16)..(441): Homolog of NCBI NO: 27357984 NR Description: Unknown protein [Oryza sativa (japonica
  misc_feature (256)..(445): Homolog of NCBI NO: 15223872 NR Description: microtubule associated protein (MAP65/ASE1)
  misc_feature (26)..(257): Homolog of NCBI NO: 15223872 NR Description: microtubule associated protein (MAP65/ASE1)
  misc_feature (42)..(441): Homolog of NCBI NO: 30677965 NR Description: microtubule associated protein (MAP65/ASE1)
  misc_feature (1)..(441): Homolog of NCBI NO: 25410943 NR Description: hypothetical protein At2g01910 [imported] -
  misc_feature (256)..(441): Homolog of NCBI NO: 8778239 NR Description: F10B6.9 [Arabidopsis thaliana]
  misc_feature (1)..(257): Homolog of NCBI NO: 8778239 NR Description: F10B6.9 [Arabidopsis thaliana]
  misc_feature (1)..(441): Homolog of NCBI NO: 21539547 NR Description: unknown protein [Arabidopsis thaliana]
MLEIESPTSLCFRTNTTCNALLRELQKIWVDIGESDAEKDRMLMELEKECLEIYRRKVDEAANSKAQLHQSLVSIEAEIASLLAALGVFNSHSPMKAKEGSKSLKEKLAAVRPMLEDLRLQKDERMKQFVDIKAQIEKMSGEISGYSDQLNKTMVGSLALDEQDQTLRKLNEYQTHLRSLQKEKSDRLNKVLDYVNEVHTLGGVLGVDFGQTVSEVHPSLHRTDHEQSTNISDDTLDGLHHMIHKLKTERSVRFQKLKDVAGSLFELWNLMDTSQEERTKFASVSYVVRSSESDITEPNILSSETIEQVSAEVDCFNKLKASRMKELVMKRRTELENLCRLAHIEADTSTSLEKSTALIDSGLVDPSELLTNIELHINKIKEEAHSRKEIIDRIDRWLSACEEENWLEEYNQDETRYSAGRGGHVNLKHAERARITVNKIPCING

SEQ ID NO: 46694 - protein, 404 aa, Arabidopsis thaliana
  peptide (1)..(404): Ceres Seq. ID no. 15174483
  misc_feature (1)..(400): Pfam Name: Microtubule associated protein (MAP65/ASE1 family) Pfam Description: Microtubule associated protein (MAP65/ASE1
  misc_feature (1)..(402): Homolog of NCBI NO: 15240485 NR Description: microtubule associated protein (MAP65/ASE1)
  misc_feature (1)..(402): Homolog of NCBI NO: 11558252 NR Description: microtubule-associated protein MAP65-1a
  misc_feature (1)..(400): Homolog of NCBI NO: 27357984 NR Description: Unknown protein [Oryza sativa (japonica
  misc_feature (215)..(404): Homolog of NCBI NO: 15223872 NR Description: microtubule associated protein (MAP65/ASE1)
  misc_feature (1)..(216): Homolog of NCBI NO: 15223872 NR Description: microtubule associated protein (MAP65/ASE1)
  misc_feature (1)..(400): Homolog of NCBI NO: 30677965 NR Description: microtubule associated protein (MAP65/ASE1)
  misc_feature (1)..(400): Homolog of NCBI NO: 25410943 NR Description: hypothetical protein At2g01910 [imported] -
  misc_feature (215)..(400): Homolog of NCBI NO: 8778239 NR Description: F10B6.9 [Arabidopsis thaliana]
  misc_feature (1)..(216): Homolog of NCBI NO: 8778239 NR Description: F10B6.9 [Arabidopsis thaliana]
  misc_feature (1)..(400): Homolog of NCBI NO: 21539547 NR Description: unknown protein [Arabidopsis thaliana]
MLMELEKECLEIYRRKVDEAANSKAQLHQSLVSIEAEIASLLAALGVFNSHSPMKAKEGSKSLKEKLAAVRPMLEDLRLQKDERMKQFVDIKAQIEKMSGEISGYSDQLNKTMVGSLALDEQDQTLRKLNEYQTHLRSLQKEKSDRLNKVLDYVNEVHTLGGVLGVDFGQTVSEVHPSLHRTDHEQSTNISDDTLDGLHHMIHKLKTERSVRFQKLKDVAGSLFELWNLMDTSQEERTKFASVSYVVRSSESDITEPNILSSETIEQVSAEVDCFNKLKASRMKELVMKRRTELENLCRLAHIEADTSTSLEKSTALIDSGLVDPSELLTNIELHINKIKEEAHSRKEIIDRIDRWLSACEEENWLEEYNQDETRYSAGRGGHVNLKHAERARITVNKIPCING

SEQ ID NO: 46695 - protein, 402 aa, Arabidopsis thaliana
  peptide (1)..(402): Ceres Seq. ID no. 15174484
  misc_feature (1)..(398): Pfam Name: Microtubule associated protein (MAP65/ASE1 family) Pfam Description: Microtubule associated protein (MAP65/ASE1
  misc_feature (1)..(400): Homolog of NCBI NO: 15240485 NR Description: microtubule associated protein (MAP65/ASE1)
  misc_feature (1)..(400): Homolog of NCBI NO: 11558252 NR Description: microtubule-associated protein MAP65-1a
  misc_feature (1)..(398): Homolog of NCBI NO: 27357984 NR Description: Unknown protein [Oryza sativa (japonica
  misc_feature (213)..(402): Homolog of NCBI NO: 15223872 NR Description: microtubule associated protein (MAP65/ASE1)
  misc_feature (1)..(214): Homolog of NCBI NO: 15223872 NR Description: microtubule associated protein (MAP65/ASE1)
  misc_feature (1)..(398): Homolog of NCBI NO: 30677965 NR Description: microtubule associated protein (MAP65/ASE1)
  misc_feature (1)..(398): Homolog of NCBI NO: 25410943 NR Description: hypothetical protein At2g01910 [imported] -
  misc_feature (213)..(398): Homolog of NCBI NO: 8778239 NR Description: F10B6.9 [Arabidopsis thaliana]
  misc_feature (1)..(214): Homolog of NCBI NO: 8778239 NR Description: F10B6.9 [Arabidopsis thaliana]
  misc_feature (1)..(398): Homolog of NCBI NO: 21539547 NR Description: unknown protein [Arabidopsis thaliana]
MELEKECLEIYRRKVDEAANSKAQLHQSLVSIEAEIASLLAALGVFNSHSPMKAKEGSKSLKEKLAAVRPMLEDLRLQKDERMKQFVDIKAQIEKMSGEISGYSDQLNKTMVGSLALDEQDQTLRKLNEYQTHLRSLQKEKSDRLNKVLDYVNEVHTLGGVLGVDFGQTVSEVHPSLHRTDHEQSTNISDDTLDGLHHMIHKLKTERSVRFQKLKDVAGSLFELWNLMDTSQEERTKFASVSYVVRSSESDITEPNILSSETIEQVSAEVDCFNKLKASRMKELVMKRRTELENLCRLAHIEADTSTSLEKSTALIDSGLVDPSELLTNIELHINKIKEEAHSRKEIIDRIDRWLSACEEENWLEEYNQDETRYSAGRGGHVNLKHAERARITVNKIPCING

SEQ ID NO: 46696 - DNA, 951 bp, Arabidopsis thaliana
  misc_feature (1)..(951): Ceres Seq. ID no. 14310146
  misc_feature: MA Experiment ID: 20000185 Result: Up-regulated in Transcription
  misc_feature: MA Experiment 20000185 PARAMETER Experiment Name: At_Roots__P Parameter: Age (day) Value: 7 vs. 21
  misc_feature: MA Experiment 20000185 PARAMETER Experiment Name: At_Roots__P Parameter: Organism Value: A. thaliana
  misc_feature: MA Experiment 20000185 PARAMETER Experiment Name: At_Roots__P Parameter: Tissue Value: Roots vs. Whole Plant
  misc_feature: MA Experiment ID: 20000439 Result: Up-regulated in Transcription
  misc_feature: MA Experiment 20000439 PARAMETER Experiment Name: At_Roots__P Parameter: Age (day) Value: 14 vs. 21
  misc_feature: MA Experiment 20000439 PARAMETER Experiment Name: At_Roots__P Parameter: Organism Value: A. thaliana
  misc_feature: MA Experiment 20000439 PARAMETER Experiment Name: At_Roots__P Parameter: Tissue Value: Roots vs. Whole Plant
gacaaccccacttttgtacttctcttccctctccccctcccaaataaccgccgataaacaatgctccggctaagcaacgccgccgtaataacaaccaatgcaattctcgcattgatcggcctcgccgctctatctttttccgtctacgtctacgttcaaggcccatcacagtgtcaacgtttcgttcaaaaccctctcattgtaactgcggctctcctcttcttcatctcgtccttaggccttatcgctgctctctacggtagccacatcatcatcacactctatctcttcttccttttcctctccattcttctgcttcttgtcctctctgtctttatcttcctcgtcacgaatcccaccgccggaaaagcgttatccggtagaggaataggcaatgtcaagaccggagattatcagaactggatcgggaaccatttccttcgtgggaagaattgggaagggatcaccaaatgtttgtctgattctagggtttgtaaaaggtttggtccacgtgacattgactttgactccaaacatctctctaatgtacagtttggttgttgtcgacctcccgtagaatgtgggttcgaatcaaagaatgccacgtggtggacagttcctgccacagcgactacggcgattataggggattgtaaggcatggagtaacacgcagagccagttatgttacgcgtgcgagtcgtgtaagattggagttttaaaagggataagaaaaagatggaggatacttattgtcgtcaatctccttcttatccttctcgtcgtttttctttactcgtgtggctgttgcgtgagaaagaacaatcgtgttccatggaagcgccggtttttctaacaactctttccatttgttttccaaattattaattaattctttatatatttttctgtttttgaaatatttagttgatgtttgatgtttcttttagtg

SEQ ID NO: 46697 - protein, 264 aa, Arabidopsis thaliana
  peptide (1)..(264): Ceres Seq. ID no. 14310147
  misc_feature (4)..(241): Pfam Name: Tetraspanin family Pfam Description: Tetraspanin family
  misc_feature (2)..(254): Homolog of NCBI NO: 15224802 NR Description: senescence-associated protein- related
  misc_feature (1)..(256): Homolog of NCBI NO: 15234743 NR Description: senescence-associated protein family [Arabidopsis
  misc_feature (79)..(256): Homolog of NCBI NO: 30682205 NR Description: senescence-associated protein family [Arabidopsis
  misc_feature (1)..(256): Homolog of NCBI NO: 15234374 NR Description: senescence-associated protein, putative
  misc_feature (3)..(256): Homolog of NCBI NO: 29367553 NR Description: senescence-associated protein-like protein
  misc_feature (1)..(256): Homolog of NCBI NO: 20197174 NR Description: hypothetical protein [Arabidopsis thaliana]
  misc_feature (1)..(255): Homolog of NCBI NO: 3551954 NR Description: senescence-associated protein 5 [Hemerocallis
  misc_feature (1)..(260): Homolog of NCBI NO: 21593310 NR Description: unknown [Arabidopsis thaliana]
  misc_feature (1)..(260): Homolog of NCBI NO: 18394621 NR Description: senescence-associated protein family [Arabidopsis
  misc_feature (1)..(264): Homolog of NCBI NO: 15237197 NR Description: senescence-associated protein family [Arabidopsis
MLRLSNAAVITTNAILALIGLAALSFSVYVYVQGPSQCQRFVQNPLIVTAALLFFISSLGLIAALYGSHIIITLYLFFLFLSILLLLVLSVFIFLVTNPTAGKALSGRGIGNVKTGDYQNWIGNHFLRGKNWEGITKCLSDSRVCKRFGPRDIDFDSKHLSNVQFGCCRPPVECGFESKNATWWTVPATATTAIIGDCKAWSNTQSQLCYACESCKIGVLKGIRKRWRILIVVNLLLILLVVFLYSCGCCVRKNNRVPWKRRFF

SEQ ID NO: 46698 - DNA, 1086 bp, Arabidopsis thaliana
  misc_feature (1)..(1086): Ceres Seq. ID no. 14310136
  misc_feature: MA Experiment ID: 20000179 Result: Down-regulated in Transcription
  misc_feature: MA Experiment 20000179 PARAMETER Experiment Name: At_Germinating_Seeds_P Parameter: Age (hr) Value: 6 vs. 0
  misc_feature: MA Experiment 20000179 PARAMETER Experiment Name: At_Germinating_Seeds_P Parameter: Tissue Value: Germinating Seeds
  misc_feature: MA Experiment ID: 20000184 Result: Up-regulated in Transcription
  misc_feature: MA Experiment 20000184 PARAMETER Experiment Name: At_Shoots__P Parameter: Age (day) Value: 7
  misc_feature: MA Experiment 20000184 PARAMETER Experiment Name: At_Shoots__P Parameter: Tissue Value: Shoots vs. Whole Plant
agattataacccagggccggcgcaacccttcttcttaacaaaaaccttttgattccaattgttcttctctcttcttcttcttcttcttcttcttcttcttcgccgcttcttctctctcgaattcaccccatctcaagtgtacgttagcctcctccctctaatggcgactcgtcttaagtttgagaacaactgcgaagttggtgtcttttccaaactcactaatgcctattgcttagtcgctataggaggctctgagaacttttacagtgcttttgagtcggagttagcagatgttatccctattgttaagacctctattggaggaacacgaattattgggcgtctttgtgctggaaacaagaatgggcttcttgtacctcatacaacaactgaccaagagcttcaacacttaaggaacagtctacctgatcaagttgaggtccagcgaattgatgaacgtctgtctgctcttggaaattgcattgcctgcaatgactatgtagctcttgcccacaccgaccttgataaggaaaccgaggaaataatagcggatgtacttggcgttgaagttttccgtcagacaattgcaggcaacattctcgtgggcagttactgtgccctatccaacaaaggtggaatggtccatcctcacacctcagtggaagacttggaagaactctcaacacttcttcaagtccctctcgttgcaggaaccgtgaaccgtggtagtgaagttatcgctgcgggtatgaccgttaatgattggacctctttctgcggttcagacacaactgcgactgagctctctgtcatagacagcatcttcaagctaagggaagcccaacccagctctatcgtcgatgagatgaggaagtcattgatcgatacctatgtttaaattttgtttgtttggatgacacacacatcccaacatcgccaatgtgtcaatgtcagaaaattttcatactctactgttagcaagaattagctgttttattttatttttgtgtggtttttaacagtttaaaagtaatctgttgatgtctctttgaatctttctgagtaagtgataagaaaattctcctt

SEQ ID NO: 46699 - protein, 245 aa, Arabidopsis thaliana
  peptide (1)..(245): Ceres Seq. ID no. 14310137
  misc_feature (3)..(204): Pfam Name: eIF-6 family Pfam Description: eIF-6 family
  misc_feature (1)..(242): Homolog of NCBI NO: 21492634 NR Description: CG17611-PA [Drosophila melanogaster]
  misc_feature (1)..(242): Homolog of NCBI NO: 31242655 NR Description: ENSANGP00000017466 [Anopheles gambiae]
  misc_feature (1)..(243): Homolog of NCBI NO: 13785574 NR Description: p27BBP protein [Homo sapiens]
  misc_feature (1)..(243): Homolog of NCBI NO: 37181067 NR Description: p27BBP/eIF6 [Xenopus laevis]
  misc_feature (1)..(244): Homolog of NCBI NO: 6325273 NR Description: similar to human translation initiation factor 6
  misc_feature (1)..(243): Homolog of NCBI NO: 6381991 NR Description: b4 integrin interactor homolog [Mus musculus]
  misc_feature (1)..(243): Homolog of NCBI NO: 4504771 NR Description: integrin beta 4 binding protein isoform a
  misc_feature (1)..(243): Homolog of NCBI NO: 27501448 NR Description: integrin beta 4 binding protein [Mus musculus]
  misc_feature (1)..(245): Homolog of NCBI NO: 27261099 NR Description: putative eukaryotic translation initiation factor
  misc_feature (1)..(245): Homolog of NCBI NO: 15228161 NR Description: eukaryotic translation initiation factor 6
MATRLKFENNCEVGVFSKLTNAYCLVAIGGSENFYSAFESELADVIPIVKTSIGGTRIIGRLCAGNKNGLLVPHTTTDQELQHLRNSLPDQVEVQRIDERLSALGNCIACNDYVALAHTDLDKETEEIIADVLGVEVFRQTIAGNILVGSYCALSNKGGMVHPHTSVEDLEELSTLLQVPLVAGTVNRGSEVIAAGMTVNDWTSFCGSDTTATELSVIDSIFKLREAQPSSIVDEMRKSLIDTYV

SEQ ID NO: 46700 - DNA, 2051 bp, Arabidopsis thaliana
  misc_feature (1)..(2051): Ceres Seq. ID no. 12575552
  misc_feature: MA Experiment ID: 20000173 Result: Up-regulated in Transcription
  misc_feature: MA Experiment 20000173 PARAMETER Experiment Name: At_42deg_Heat_P Parameter: Age (day) Value: 14
  misc_feature: MA Experiment 20000173 PARAMETER Experiment Name: At_42deg_Heat_P Parameter: Organism Value: A. thaliana
  misc_feature: MA Experiment 20000173 PARAMETER Experiment Name: At_42deg_Heat_P Parameter: Plant Line Value: WS
  misc_feature: MA Experiment 20000173 PARAMETER Experiment Name: At_42deg_Heat_P Parameter: Temperature (deg C) Value: 42 vs. 22
  misc_feature: MA Experiment 20000173 PARAMETER Experiment Name: At_42deg_Heat_P Parameter: Timepoint (hr) Value: 6
  misc_feature: MA Experiment 20000173 PARAMETER Experiment Name: At_42deg_Heat_P Parameter: Tissue Value: Aerial
  misc_feature: MA Experiment ID: 20000234 Result: Down-regulated in Transcription
  misc_feature: MA Experiment 20000234 PARAMETER Experiment Name: At_Siliques_P Parameter: Age (day) Value: 21
  misc_feature: MA Experiment 20000234 PARAMETER Experiment Name: At_Siliques_P Parameter: Organism Value: A. thaliana
  misc_feature: MA Experiment 20000234 PARAMETER Experiment Name: At_Siliques_P Parameter: Plant Line Value: WS
  misc_feature: MA Experiment 20000234 PARAMETER Experiment Name: At_Siliques_P Parameter: Tissue Value: Less Than 5mm Siliques vs. Whole Plant
  misc_feature: MA Experiment ID: 20000264 Result: Down-regulated in Transcription
  misc_feature: MA Experiment 20000264 PARAMETER Experiment Name: At_Open_Flower_P Parameter: Age (day) Value: 21
  misc_feature: MA Experiment 20000264 PARAMETER Experiment Name: At_Open_Flower_P Parameter: Plant Line Value: WS
  misc_feature: MA Experiment 20000264 PARAMETER Experiment Name: At_Open_Flower_P Parameter: Tissue Value: Open Flower vs. Whole Plant
  misc_feature: MA Experiment ID: 20000265 Result: Down-regulated in Transcription
  misc_feature: MA Experiment 20000265 PARAMETER Experiment Name: At_Open_Flower_P Parameter: Age (day) Value: 21
  misc_feature: MA Experiment 20000265 PARAMETER Experiment Name: At_Open_Flower_P Parameter: Plant Line Value: WS
  misc_feature: MA Experiment 20000265 PARAMETER Experiment Name: At_Open_Flower_P Parameter: Tissue Value: Closed Flower vs. Whole Plant
  misc_feature: MA Experiment ID: 20000286 Result: Down-regulated in Transcription
  misc_feature: MA Experiment 20000286 PARAMETER Experiment Name: At_Open_Flower_P Parameter: Age (day) Value: 21
  misc_feature: MA Experiment 20000286 PARAMETER Experiment Name: At_Open_Flower_P Parameter: Plant Line Value: WS
  misc_feature: MA Experiment 20000286 PARAMETER Experiment Name: At_Open_Flower_P Parameter: Tissue Value: Half Open vs. Whole Plant
  misc_feature: MA Experiment ID: 20001757 Result: Up-regulated in Transcription
  misc_feature: MA Experiment 20001757 PARAMETER Experiment Name: At_50mM_NH4NO3_L-to-H_P Parameter: Timepoint (hr) Value: 6
  misc_feature: MA Experiment 20001757 PARAMETER Experiment Name: At_50mM_NH4NO3_L-to-H_P Parameter: Tissue Value: Leaf
  misc_feature: MA Experiment 20001757 PARAMETER Experiment Name: At_50mM_NH4NO3_L-to-H_P Parameter: Treatment Value: 50mM NH4NO3 vs 100mM Mannitol
  misc_feature: MA Experiment ID: 20001905 Result: Up-regulated in Transcription
  misc_feature: MA Experiment 20001905 PARAMETER Experiment Name: At_Drought_Reproduction_P Parameter: Age (day) Value: 40
  misc_feature: MA Experiment 20001905 PARAMETER Experiment Name: At_Drought_Reproduction_P Parameter: Organism Value: A. thaliana
  misc_feature: MA Experiment 20001905 PARAMETER Experiment Name: At_Drought_Reproduction_P Parameter: Plant Line Value: WS
  misc_feature: MA Experiment 20001905 PARAMETER Experiment Name: At_Drought_Reproduction_P Parameter: Timepoint (day) Value: 10
  misc_feature: MA Experiment 20001905 PARAMETER Experiment Name: At_Drought_Reproduction_P Parameter: Tissue Value: Rosettes
  misc_feature: MA Experiment 20001905 PARAMETER Experiment Name: At_Drought_Reproduction_P Parameter: Treatment Value: Drought vs. No Drought
ggactggaactgtgatctaaaaaaaaatgcctgaagcagtctaaataattcttcttctctccagcaattaaacactacattacagccgtatagacccaaatcctttttcgttttttttttttttaataagacggcatttctctctcaatccgttcttatccaagcaaagctccgtcatcaaattcattagatcttccaaattgagntacaaagtccaaagtcggctcttttttggcattttccggcttanaataggcattttacctccaggggggctaaatagtgaagcttttttgtttgttcttgaagatataaagaaagatttgtagattangatttgagaaactgtagaagatagaatcaaaagatgagtttcagggatgataatgaggaggctaggaatgatttgcgtcggccgtttattcacaccggaagctggtaccggatgggttcgagacaatcgagtatgatgggttcctctcaagttattcgagacagctctatctctgttcttgcatgtgttttgatcgttgctcttggccctattcaattcggattcacttgtggttattcatctccaactcaagctgcaatcaccaaggatctcggtttaacagtatctgagtactctgtgtttggttctctttccaatgtgggtgctatggttggtgcaattgccagtggtcagattgcagaatacattggacgaaaagggtctcttatgattgctgcaattcccaatatcattggatggctttgcatatcatttgcaaaagatacttcttttctttacatgggaagacttttagaaggctttggcgttgggatcatctcttacactgtacctgtatatatcgctgagatagctccacaaaatatgagaggaggattgggttcggttaaccagctttctgtgacaattggaataatgttggcgtatttacttggcctctttgttccatggagaattcttgcagttctggggatattgccgtgtacataattgataccaggtctctttttcatccccgaatcccctcgctggctggcaaaaatgggtatgacagatgaatttgaaacttcattacaagttcttcgaggatttgagactgatattaccgttgaagttaatgaaatcaagagatctgtggcatcatctacaaagcgaaatacagttcggtttgtagatctcaaacgcaggagatactatttcccacttatggttggtatagggttgcttgtacttcaacaacttggtggaattaatggtgtcctattctattccagtacaatatttgaatctgcaggagttacatcgagtaacgcagcaacatttggggtcggggctattcaggtagtagcgactgcaatatccacttggttggtggacaaagcaggtcgtcggcttctgcttactatctcttcggttgggatgacgattagccttgtaattgttgcagctgctttctatcttaaggaatttgtgtctcctgattcagacatgtacagttggctgagcatattgtcagtagttggagttgtggcaatggttgtctttttctcattgggaatgggaccaataccgtggctcattatgtctgagatccttcctgtgaacataaagggtttagctggaagtattgcaactctagccaattggttcttttcttggttgatcaccatgacagcaaatttgctgttagcctggagcagtggaggaactttcactctgtatggattggtttgtgcattcacagtggtgttcgtgactctatgggttcctgagaccaaaggcaaaactcttgaagaacttcaatccttgttcagatgaacaaattgaaacaacttcattctttgtcaccctctctctccctctctgttttggccaagaacaagaagaaacaagagattttccagctttgttaattgggctgagaacgttactaagatttgtttgtttgttcgttgtgtgtcaataatcgcattatcttctatcacatgtatatcaacatactacattcaagtatttgtaattttattgaactctttac

SEQ ID NO: 46701 - protein, 258 aa, Arabidopsis thaliana
  peptide (1)..(258): Ceres Seq. ID no. 12575553
  misc_feature (1)..(257): Pfam Name: Sugar (and other) transporter Pfam Description: Sugar (and other) transporter
  misc_feature (1)..(257): Pfam Name: Sugar (and other) transporter Pfam Description: Sugar (and other) transporter
  misc_feature (1)..(254): Homolog of NCBI NO: 30695810 NR Description: sugar transporter, putative [Arabidopsis thaliana]
  misc_feature (1)..(255): Homolog of NCBI NO: 23504385 NR Description: putative sugar transporter [Lycopersicon
  misc_feature (1)..(258): Homolog of NCBI NO: 18419741 NR Description: sugar transporter - like protein
  misc_feature (1)..(256): Homolog of NCBI NO: 18407508 NR Description: putative sugar transporter
  misc_feature (1)..(256): Homolog of NCBI NO: 21536914 NR Description: putative sugar transporter [Arabidopsis thaliana]
  misc_feature (1)..(254): Homolog of NCBI NO: 30695810 NR Description: sugar transporter, putative [Arabidopsis thaliana]
  misc_feature (1)..(258): Homolog of NCBI NO: 18419741 NR Description: sugar transporter - like protein
  misc_feature (1)..(256): Homolog of NCBI NO: 21536914 NR Description: putative sugar transporter [Arabidopsis thaliana]
  misc_feature (1)..(258): Homolog of NCBI NO: 15222158 NR Description: integral membrane protein, putative
  misc_feature (1)..(258): Homolog of NCBI NO: 15223557 NR Description: integral membrane protein, putative
  misc_feature (1)..(258): Homolog of NCBI NO: 8778437 NR Description: F18O14.22 [Arabidopsis thaliana]
  misc_feature (1)..(258): Homolog of NCBI NO: 7446725 NR Description: probable sugar transporter protein - beet
  misc_feature (1)..(258): Homolog of NCBI NO: 5091611 NR Description: Similar to gb|U43629 integral membrane protein Beta vulgaris and is a member of the sugar transporter family
  misc_feature (1)..(256): Homolog of NCBI NO: 18407508 NR Description: putative sugar transporter
  misc_feature (1)..(255): Homolog of NCBI NO: 23504385 NR Description: putative sugar transporter [Lycopersicon
  misc_feature (1)..(258): Homolog of NCBI NO: 5091611 NR Description: Similar to gb|U43629 integral membrane protein Beta vulgaris and is a member of the sugar transporter family
  misc_feature (1)..(258): Homolog of NCBI NO: 7446725 NR Description: probable sugar transporter protein - beet
  misc_feature (1)..(258): Homolog of NCBI NO: 8778437 NR Description: F18O14.22 [Arabidopsis thaliana]
  misc_feature (1)..(258): Homolog of NCBI NO: 15223557 NR Description: integral membrane protein, putative
  misc_feature (1)..(258): Homolog of NCBI NO: 15222158 NR Description: integral membrane protein, putative
MGMTDEFETSLQVLRGFETDITVEVNEIKRSVASSTKRNTVRFVDLKRRRYYFPLMVGIGLLVLQQLGGINGVLFYSSTIFESAGVTSSNAATFGVGAIQVVATAISTWLVDKAGRRLLLTISSVGMTISLVIVAAAFYLKEFVSPDSDMYSWLSILSVVGVVAMVVFFSLGMGPIPWLIMSEILPVNIKGLAGSIATLANWFFSWLITMTANLLLAWSSGGTFTLYGLVCAFTVVFVTLWVPETKGKTLEELQSLFR

SEQ ID NO: 46702 - protein, 256 aa, Arabidopsis thaliana
  peptide (1)..(256): Ceres Seq. ID no. 12575554
  misc_feature (1)..(255): Pfam Name: Sugar (and other) transporter Pfam Description: Sugar (and other) transporter
  misc_feature (1)..(255): Pfam Name: Sugar (and other) transporter Pfam Description: Sugar (and other) transporter
  misc_feature (1)..(252): Homolog of NCBI NO: 30695810 NR Description: sugar transporter, putative [Arabidopsis thaliana]
  misc_feature (1)..(253): Homolog of NCBI NO: 23504385 NR Description: putative sugar transporter [Lycopersicon
  misc_feature (1)..(256): Homolog of NCBI NO: 18419741 NR Description: sugar transporter - like protein
  misc_feature (1)..(254): Homolog of NCBI NO: 18407508 NR Description: putative sugar transporter
  misc_feature (1)..(254): Homolog of NCBI NO: 21536914 NR Description: putative sugar transporter [Arabidopsis thaliana]
  misc_feature (1)..(252): Homolog of NCBI NO: 30695810 NR Description: sugar transporter, putative [Arabidopsis thaliana]
  misc_feature (1)..(256): Homolog of NCBI NO: 18419741 NR Description: sugar transporter - like protein
  misc_feature (1)..(254): Homolog of NCBI NO: 21536914 NR Description: putative sugar transporter [Arabidopsis thaliana]
  misc_feature (1)..(256): Homolog of NCBI NO: 15222158 NR Description: integral membrane protein, putative
  misc_feature (1)..(256): Homolog of NCBI NO: 15223557 NR Description: integral membrane protein, putative
  misc_feature (1)..(256): Homolog of NCBI NO: 8778437 NR Description: F18O14.22 [Arabidopsis thaliana]
  misc_feature (1)..(256): Homolog of NCBI NO: 7446725 NR Description: probable sugar transporter protein - beet
  misc_feature (1)..(256): Homolog of NCBI NO: 5091611 NR Description: Similar to gb|U43629 integral membrane protein Beta vulgaris and is a member of the sugar transporter family
  misc_feature (1)..(254): Homolog of NCBI NO: 18407508 NR Description: putative sugar transporter
  misc_feature (1)..(253): Homolog of NCBI NO: 23504385 NR Description: putative sugar transporter [Lycopersicon
  misc_feature (1)..(256): Homolog of NCBI NO: 5091611 NR Description: Similar to gb|U43629 integral membrane protein Beta vulgaris and is a member of the sugar transporter family
  misc_feature (1)..(256): Homolog of NCBI NO: 7446725 NR Description: probable sugar transporter protein - beet
  misc_feature (1)..(256): Homolog of NCBI NO: 8778437 NR Description: F18O14.22 [Arabidopsis thaliana]
  misc_feature (1)..(256): Homolog of NCBI NO: 15223557 NR Description: integral membrane protein, putative
  misc_feature (1)..(256): Homolog of NCBI NO: 15222158 NR Description: integral membrane protein, putative
MTDEFETSLQVLRGFETDITVEVNEIKRSVASSTKRNTVRFVDLKRRRYYFPLMVGIGLLVLQQLGGINGVLFYSSTIFESAGVTSSNAATFGVGAIQVVATAISTWLVDKAGRRLLLTISSVGMTISLVIVAAAFYLKEFVSPDSDMYSWLSILSVVGVVAMVVFFSLGMGPIPWLIMSEILPVNIKGLAGSIATLANWFFSWLITMTANLLLAWSSGGTFTLYGLVCAFTVVFVTLWVPETKGKTLEELQSLFR

SEQ ID NO: 46703 - protein, 211 aa, Arabidopsis thaliana
  peptide (1)..(211): Ceres Seq. ID no. 12575555
  misc_feature (51)..(211): Pfam Name: Sugar (and other) transporter Pfam Description: Sugar (and other) transporter
  misc_feature (51)..(211): Pfam Name: Sugar (and other) transporter Pfam Description: Sugar (and other) transporter
  misc_feature (42)..(211): Homolog of NCBI NO: 30695810 NR Description: sugar transporter, putative [Arabidopsis thaliana]
  misc_feature (4)..(211): Homolog of NCBI NO: 23504385 NR Description: putative sugar transporter [Lycopersicon
  misc_feature (43)..(211): Homolog of NCBI NO: 18419741 NR Description: sugar transporter - like protein
  misc_feature (33)..(211): Homolog of NCBI NO: 18407508 NR Description: putative sugar transporter
  misc_feature (33)..(211): Homolog of NCBI NO: 21536914 NR Description: putative sugar transporter [Arabidopsis thaliana]
  misc_feature (42)..(211): Homolog of NCBI NO: 30695810 NR Description: sugar transporter, putative [Arabidopsis thaliana]
  misc_feature (43)..(211): Homolog of NCBI NO: 18419741 NR Description: sugar transporter - like protein
  misc_feature (33)..(211): Homolog of NCBI NO: 21536914 NR Description: putative sugar transporter [Arabidopsis thaliana]
  misc_feature (1)..(211): Homolog of NCBI NO: 15222158 NR Description: integral membrane protein, putative
  misc_feature (1)..(211): Homolog of NCBI NO: 15223557 NR Description: integral membrane protein, putative
  misc_feature (1)..(211): Homolog of NCBI NO: 8778437 NR Description: F18O14.22 [Arabidopsis thaliana]
  misc_feature (13)..(211): Homolog of NCBI NO: 7446725 NR Description: probable sugar transporter protein - beet
  misc_feature (12)..(211): Homolog of NCBI NO: 5091611 NR Description: Similar to gb|U43629 integral membrane protein Beta vulgaris and is a member of the sugar transporter family
  misc_feature (33)..(211): Homolog of NCBI NO: 18407508 NR Description: putative sugar transporter
  misc_feature (4)..(211): Homolog of NCBI NO: 23504385 NR Description: putative sugar transporter [Lycopersicon
  misc_feature (12)..(211): Homolog of NCBI NO: 5091611 NR Description: Similar to gb|U43629 integral membrane protein Beta vulgaris and is a member of the sugar transporter family
  misc_feature (13)..(211): Homolog of NCBI NO: 7446725 NR Description: probable sugar transporter protein - beet
  misc_feature (1)..(211): Homolog of NCBI NO: 8778437 NR Description: F18O14.22 [Arabidopsis thaliana]
  misc_feature (1)..(211): Homolog of NCBI NO: 15223557 NR Description: integral membrane protein, putative
  misc_feature (1)..(211): Homolog of NCBI NO: 15222158 NR Description: integral membrane protein, putative
MSFRDDNEEARNDLRRPFIHTGSWYRMGSRQSSMMGSSQVIRDSSISVLACVLIVALGPIQFGFTCGYSSPTQAAITKDLGLTVSEYSVFGSLSNVGAMVGAIASGQIAEYIGRKGSLMIAAIPNIIGWLCISFAKDTSFLYMGRLLEGFGVGIISYTVPVYIAEIAPQNMRGGLGSVNQLSVTIGIMLAYLLGLFVPWRILAVLGILPCT

SEQ ID NO: 46704 - DNA, 2007 bp, Arabidopsis thaliana
  misc_feature (1)..(2007): Ceres Seq. ID no. 14310164
  misc_feature: MA Experiment ID: 20000173 Result: Down-regulated in Transcription
  misc_feature: MA Experiment 20000173 PARAMETER Experiment Name: At_42deg_Heat_P Parameter: Age (day) Value: 14
  misc_feature: MA Experiment 20000173 PARAMETER Experiment Name: At_42deg_Heat_P Parameter: Organism Value: A. thaliana
  misc_feature: MA Experiment 20000173 PARAMETER Experiment Name: At_42deg_Heat_P Parameter: Plant Line Value: WS
  misc_feature: MA Experiment 20000173 PARAMETER Experiment Name: At_42deg_Heat_P Parameter: Temperature (deg C) Value: 42 vs. 22
  misc_feature: MA Experiment 20000173 PARAMETER Experiment Name: At_42deg_Heat_P Parameter: Timepoint (hr) Value: 6
  misc_feature: MA Experiment 20000173 PARAMETER Experiment Name: At_42deg_Heat_P Parameter: Tissue Value: Aerial
  misc_feature: MA Experiment ID: 20000184 Result: Down-regulated in Transcription
  misc_feature: MA Experiment 20000184 PARAMETER Experiment Name: At_Shoots__P Parameter: Age (day) Value: 7
  misc_feature: MA Experiment 20000184 PARAMETER Experiment Name: At_Shoots__P Parameter: Tissue Value: Shoots vs. Whole Plant
tgcccaattctcgggtcaaatccatctaaaagtttgtgcttttcgtattgggattagttcgattcctaaatctgatttagggttttaatcaatttggcaatcgggtctcttgcgatgaagttttcggagatttattgatttcatggtgggtttttgttttcgaagctcgttgatgaagaattgacttctggaatctcaatctctgaagggctttttcgatgttaaattcgtgaatctgggttttaaatgctgaattggaaaacagatccaggggctaattaaggaaaaaaggaggtttcttttgatattgatttttgggaattttgaggtttgagagagatcggagaagatggatctcgtgatcggtgggaaatttaagcttgggaagaaaattggtagtggatcatttggagagctttatctaggtgtaaatgtccaaacaggagaagaagttgctgtcaagctggaaaatgtgaagaccaagcatccacaacttcattatgagtcaaagttgtatatgctgcttcaaggaggatctggtattccgaacatcaagtggtttggagttgaaggtgactacagcgtaatggttattgaccttctaggtcctagtcttgaagacttgtttaactactgcaacagaaagttaacattgaaaactgttctcatgcttgccgaccaattacttaacagggttgaatttatgcatactcgaggtttccttcaccgtgatataaaacctgacaactttttaatgggccttggacgcaaagcaaatcaggtgtatatcattgattttggactagggaagaaatacagagaccttcagactcacaagcacattccttacagagaaaacaaaaatcttactgggacagctcggtatgcaagtgttaacactcaccttggagtcgaacaaagtcgaagggatgatttagaatcacttggttatgttcttatgtattttctcaaaggaagcttaccttggcagggattaaagacagaagtatgacagaatcagtgagaagaaagtgtcaactcctatagaggtgttgtgtaaaaaccaaccgtctgaattcgtttcatactttcattactgccgatctttacggtttgatgacaaacctgattactcttacctcaagaggcttttccgtgacttgtttatccgagaaggttatcaattcgattatgtatttgactggacagtgctaaagtatcctcaagtcggatccagctctggttctagttcacgaacaaggcatcatacaacagcgaaacccggattcaatgcagatcctatcgaaagacaagagaggatcctaggaaaggaaacaacccgatataaaatcccaggtgcagtggaggcattctccagaagacacccgactacaacttcttcgcctcgagatcgttctagatcaagaaactcagacgacggacctttctctaagcagacacatggagactccgaaagagcaaacagttcctcaagatacagagcatcttcttctaggaaagccgttgctgcttcaagctcccggccaagttctgcaggtggaccaagcgaaagccgaacttcaagtcgtctggtttcctcaagcggtggtggtggcagcggcagtggaaatggccgtccctcaactagccagagagtgcaagctggatatgaatccaagactctgtctttctctcgtgcaacagcggcaagaaacactcgggaagatcaattaagaagcttcgagcttctctctcttcggaaataaaggaaaatgatggagagagagacagcaaactccatgaaaacccaaagaaattacctctgaagaaagatgagaatcttggtttgagggaattcatatatttgaacctgatgaaatcctcagatctttttacatgtaatttcagcttcagcttgcagagatctttttcactcgttttgtttatgtaatcgtgatatgtgttagacaaaaataacaatcaaaaatgtagagagagtttccatgt

SEQ ID NO: 46705 - protein, 220 aa, Arabidopsis thaliana
  peptide (1)..(220): Ceres Seq. ID no. 14310165
  misc_feature (1)..(217): Homolog of NCBI NO: 15236471 NR Description: casein kinase I (CKI1) [Arabidopsis thaliana]
  misc_feature (1)..(217): Homolog of NCBI NO: 27754653 NR Description: putative casein kinase I [Arabidopsis thaliana]
  misc_feature (1)..(217): Homolog of NCBI NO: 15219733 NR Description: casein kinase, putative [Arabidopsis thaliana]
  misc_feature (1)..(217): Homolog of NCBI NO: 15239840 NR Description: casein kinase I, putative [Arabidopsis thaliana]
  misc_feature (1)..(217): Homolog of NCBI NO: 1076386 NR Description: protein kinase ADK1 - Arabidopsis thaliana
  misc_feature (1)..(217): Homolog of NCBI NO: 21536851 NR Description: protein kinase ADK1-like protein [Arabidopsis
  misc_feature (1)..(217): Homolog of NCBI NO: 18417216 NR Description: casein kinase, putative [Arabidopsis thaliana]
  misc_feature (1)..(217): Homolog of NCBI NO: 30678728 NR Description: protein kinase (ADK1) [Arabidopsis thaliana]
  misc_feature (1)..(217): Homolog of NCBI NO: 18087640 NR Description: AT5g44100/MLN1_2 [Arabidopsis thaliana]
  misc_feature (1)..(217): Homolog of NCBI NO: 15240091 NR Description: casein kinase, putative [Arabidopsis thaliana]
MDLVIGGKFKLGKKIGSGSFGELYLGVNVQTGEEVAVKLENVKTKHPQLHYESKLYMLLQGGSGIPNIKWFGVEGDYSVMVIDLLGPSLEDLFNYCNRKLTLKTVLMLADQLLNRVEFMHTRGFLHRDIKPDNFLMGLGRKANQVYIIDFGLGKKYRDLQTHKHIPYRENKNLTGTARYASVNTHLGVEQSRRDDLESLGYVLMYFLKGSLPWQGLKTEV

SEQ ID NO: 46706 - protein, 164 aa, Arabidopsis thaliana
  peptide (1)..(164): Ceres Seq. ID no. 14310166
  misc_feature (1)..(161): Homolog of NCBI NO: 15236471 NR Description: casein kinase I (CKI1) [Arabidopsis thaliana]
  misc_feature (1)..(161): Homolog of NCBI NO: 27754653 NR Description: putative casein kinase I [Arabidopsis thaliana]
  misc_feature (1)..(161): Homolog of NCBI NO: 15219733 NR Description: casein kinase, putative [Arabidopsis thaliana]
  misc_feature (1)..(161): Homolog of NCBI NO: 15239840 NR Description: casein kinase I, putative [Arabidopsis thaliana]
  misc_feature (1)..(161): Homolog of NCBI NO: 1076386 NR Description: protein kinase ADK1 - Arabidopsis thaliana
  misc_feature (1)..(161): Homolog of NCBI NO: 21536851 NR Description: protein kinase ADK1-like protein [Arabidopsis
  misc_feature (1)..(161): Homolog of NCBI NO: 18417216 NR Description: casein kinase, putative [Arabidopsis thaliana]
  misc_feature (1)..(161): Homolog of NCBI NO: 30678728 NR Description: protein kinase (ADK1) [Arabidopsis thaliana]
  misc_feature (1)..(161): Homolog of NCBI NO: 18087640 NR Description: AT5g44100/MLN1_2 [Arabidopsis thaliana]
  misc_feature (1)..(161): Homolog of NCBI NO: 15240091 NR Description: casein kinase, putative [Arabidopsis thaliana]
MLLQGGSGIPNIKWFGVEGDYSVMVIDLLGPSLEDLFNYCNRKLTLKTVLMLADQLLNRVEFMHTRGFLHRDIKPDNFLMGLGRKANQVYIIDFGLGKKYRDLQTHKHIPYRENKNLTGTARYASVNTHLGVEQSRRDDLESLGYVLMYFLKGSLPWQGLKTEV

SEQ ID NO: 46707 - protein, 141 aa, Arabidopsis thaliana
  peptide (1)..(141): Ceres Seq. ID no. 14310167
  misc_feature (1)..(138): Homolog of NCBI NO: 15236471 NR Description: casein kinase I (CKI1) [Arabidopsis thaliana]
  misc_feature (1)..(138): Homolog of NCBI NO: 27754653 NR Description: putative casein kinase I [Arabidopsis thaliana]
  misc_feature (1)..(138): Homolog of NCBI NO: 15219733 NR Description: casein kinase, putative [Arabidopsis thaliana]
  misc_feature (1)..(138): Homolog of NCBI NO: 15239840 NR Description: casein kinase I, putative [Arabidopsis thaliana]
  misc_feature (1)..(138): Homolog of NCBI NO: 1076386 NR Description: protein kinase ADK1 - Arabidopsis thaliana
  misc_feature (1)..(138): Homolog of NCBI NO: 21536851 NR Description: protein kinase ADK1-like protein [Arabidopsis
  misc_feature (1)..(138): Homolog of NCBI NO: 18417216 NR Description: casein kinase, putative [Arabidopsis thaliana]
  misc_feature (1)..(138): Homolog of NCBI NO: 30678728 NR Description: protein kinase (ADK1) [Arabidopsis thaliana]
  misc_feature (1)..(138): Homolog of NCBI NO: 18087640 NR Description: AT5g44100/MLN1_2 [Arabidopsis thaliana]
  misc_feature (1)..(138): Homolog of NCBI NO: 15240091 NR Description: casein kinase, putative [Arabidopsis thaliana]
MVIDLLGPSLEDLFNYCNRKLTLKTVLMLADQLLNRVEFMHTRGFLHRDIKPDNFLMGLGRKANQVYIIDFGLGKKYRDLQTHKHIPYRENKNLTGTARYASVNTHLGVEQSRRDDLESLGYVLMYFLKGSLPWQGLKTEV

SEQ ID NO: 46708 - DNA, 2059 bp, Arabidopsis thaliana; identical to SEQ ID NO: 45907
  misc_feature (1)..(2059): Ceres Seq. ID no. 13591609
  misc_feature: MA Experiment ID: 20000169 Result: Down-regulated in Transcription
  misc_feature: MA Experiment 20000169 PARAMETER Experiment Name: At_100uM_ABA_P Parameter: Age (day) Value: 14
  misc_feature: MA Experiment 20000169 PARAMETER Experiment Name: At_100uM_ABA_P Parameter: Organism Value: A. thaliana
  misc_feature: MA Experiment 20000169 PARAMETER Experiment Name: At_100uM_ABA_P Parameter: Plant Line Value: WS
  misc_feature: MA Experiment 20000169 PARAMETER Experiment Name: At_100uM_ABA_P Parameter: Timepoint (hr) Value: 6
  misc_feature: MA Experiment 20000169 PARAMETER Experiment Name: At_100uM_ABA_P Parameter: Tissue Value: Aerial
  misc_feature: MA Experiment 20000169 PARAMETER Experiment Name: At_100uM_ABA_P Parameter: Treatment Value: 100uM ABA vs. No Treatment
  misc_feature: MA Experiment ID: 20000171 Result: Down-regulated in Transcription
  misc_feature: MA Experiment 20000171 PARAMETER Experiment Name: At_42deg_Heat_P Parameter: Age (day) Value: 14
  misc_feature: MA Experiment 20000171 PARAMETER Experiment Name: At_42deg_Heat_P Parameter: Organism Value: A. thaliana
  misc_feature: MA Experiment 20000171 PARAMETER Experiment Name: At_42deg_Heat_P Parameter: Plant Line Value: WS
  misc_feature: MA Experiment 20000171 PARAMETER Experiment Name: At_42deg_Heat_P Parameter: Temperature (deg C) Value: 42 vs. 22
  misc_feature: MA Experiment 20000171 PARAMETER Experiment Name: At_42deg_Heat_P Parameter: Timepoint (hr) Value: 1
  misc_feature: MA Experiment 20000171 PARAMETER Experiment Name: At_42deg_Heat_P Parameter: Tissue Value: Aerial
  misc_feature: MA Experiment ID: 20000173 Result: Down-regulated in Transcription
  misc_feature: MA Experiment 20000173 PARAMETER Experiment Name: At_42deg_Heat_P Parameter: Age (day) Value: 14
  misc_feature: MA Experiment 20000173 PARAMETER Experiment Name: At_42deg_Heat_P Parameter: Organism Value: A. thaliana
  misc_feature: MA Experiment 20000173 PARAMETER Experiment Name: At_42deg_Heat_P Parameter: Plant Line Value: WS
  misc_feature: MA Experiment 20000173 PARAMETER Experiment Name: At_42deg_Heat_P Parameter: Temperature (deg C) Value: 42 vs. 22
  misc_feature: MA Experiment 20000173 PARAMETER Experiment Name: At_42deg_Heat_P Parameter: Timepoint (hr) Value: 6
  misc_feature: MA Experiment 20000173 PARAMETER Experiment Name: At_42deg_Heat_P Parameter: Tissue Value: Aerial
  misc_feature: MA Experiment ID: 20000180 Result: Up-regulated in Transcription
  misc_feature: MA Experiment 20000180 PARAMETER Experiment Name: At_Germinating_Seeds_P Parameter: Age (hr) Value: 24 vs. 0
  misc_feature: MA Experiment 20000180 PARAMETER Experiment Name: At_Germinating_Seeds_P Parameter: Tissue Value: Germinating Seeds
  misc_feature: MA Experiment ID: 20000227 Result: Up-regulated in Transcription
  misc_feature: MA Experiment 20000227 PARAMETER Experiment Name: At_Root-Tips-vs-Tops_P Parameter: Tissue Value: Root Tips vs. Root Tops
  misc_feature: MA Experiment ID: 20000234 Result: Up-regulated in Transcription
  misc_feature: MA Experiment 20000234 PARAMETER Experiment Name: At_Siliques_P Parameter: Age (day) Value: 21
  misc_feature: MA Experiment 20000234 PARAMETER Experiment Name: At_Siliques_P Parameter: Organism Value: A. thaliana
  misc_feature: MA Experiment 20000234 PARAMETER Experiment Name: At_Siliques_P Parameter: Plant Line Value: WS
  misc_feature: MA Experiment 20000234 PARAMETER Experiment Name: At_Siliques_P Parameter: Tissue Value: Less Than 5mm Siliques vs. Whole Plant
  misc_feature: MA Experiment ID: 20000235 Result: Up-regulated in Transcription
  misc_feature: MA Experiment 20000235 PARAMETER Experiment Name: At_Siliques_P Parameter: Age (day) Value: 21
  misc_feature: MA Experiment 20000235 PARAMETER Experiment Name: At_Siliques_P Parameter: Organism Value: A. thaliana
  misc_feature: MA Experiment 20000235 PARAMETER Experiment Name: At_Siliques_P Parameter: Plant Line Value: WS
  misc_feature: MA Experiment 20000235 PARAMETER Experiment Name: At_Siliques_P Parameter: Tissue Value: 5-10mm Siliques vs. Whole Plant
  misc_feature: MA Experiment ID: 20000264 Result: Up-regulated in Transcription
  misc_feature: MA Experiment 20000264 PARAMETER Experiment Name: At_Open_Flower_P Parameter: Age (day) Value: 21
  misc_feature: MA Experiment 20000264 PARAMETER Experiment Name: At_Open_Flower_P Parameter: Plant Line Value: WS
  misc_feature: MA Experiment 20000264 PARAMETER Experiment Name: At_Open_Flower_P Parameter: Tissue Value: Open Flower vs. Whole Plant
  misc_feature: MA Experiment ID: 20000265 Result: Up-regulated in Transcription
  misc_feature: MA Experiment 20000265 PARAMETER Experiment Name: At_Open_Flower_P Parameter: Age (day) Value: 21
  misc_feature: MA Experiment 20000265 PARAMETER Experiment Name: At_Open_Flower_P Parameter: Plant Line Value: WS
  misc_feature: MA Experiment 20000265 PARAMETER Experiment Name: At_Open_Flower_P Parameter: Tissue Value: Closed Flower vs. Whole Plant
  misc_feature: MA Experiment ID: 20000286 Result: Up-regulated in Transcription
  misc_feature: MA Experiment 20000286 PARAMETER Experiment Name: At_Open_Flower_P Parameter: Age (day) Value: 21
  misc_feature: MA Experiment 20000286 PARAMETER Experiment Name: At_Open_Flower_P Parameter: Plant Line Value: WS
  misc_feature: MA Experiment 20000286 PARAMETER Experiment Name: At_Open_Flower_P Parameter: Tissue Value: Half Open vs. Whole Plant
  misc_feature: MA Experiment ID: 20000794 Result: Up-regulated in Transcription
  misc_feature: MA Experiment 20000794 PARAMETER Experiment Name: At_Petals_P Parameter: Age (day) Value: 23-25 days
  misc_feature: MA Experiment 20000794 PARAMETER Experiment Name: At_Petals_P Parameter: Plant Line Value: WS
  misc_feature: MA Experiment 20000794 PARAMETER Experiment Name: At_Petals_P Parameter: Tissue Value: Petals vs. Whole plant
  misc_feature: MA Experiment ID: 20001247 Result: Up-regulated in Transcription
  misc_feature: MA Experiment 20001247 PARAMETER Experiment Name: At_Far-red-induction_P Parameter: Age (day) Value: 7
  misc_feature: MA Experiment 20001247 PARAMETER Experiment Name: At_Far-red-induction_P Parameter: Light Value: Far-red vs. White
  misc_feature: MA Experiment 20001247 PARAMETER Experiment Name: At_Far-red-induction_P Parameter: Organism Value: A. thaliana
  misc_feature: MA Experiment 20001247 PARAMETER Experiment Name: At_Far-red-induction_P Parameter: Plant Line Value: Columbia
  misc_feature: MA Experiment 20001247 PARAMETER Experiment Name: At_Far-red-induction_P Parameter: Timepoint (hr) Value: 1
  misc_feature: MA Experiment 20001247 PARAMETER Experiment Name: At_Far-red-induction_P Parameter: Tissue Value: Whole Plant
  misc_feature: MA Experiment ID: 20001248 Result: Up-regulated in Transcription
  misc_feature: MA Experiment 20001248 PARAMETER Experiment Name: At_Far-red-induction_P Parameter: Age (day) Value: 7
  misc_feature: MA Experiment 20001248 PARAMETER Experiment Name: At_Far-red-induction_P Parameter: Light Value: Far-red vs. White
  misc_feature: MA Experiment 20001248 PARAMETER Experiment Name: At_Far-red-induction_P Parameter: Organism Value: A. thaliana
  misc_feature: MA Experiment 20001248 PARAMETER Experiment Name: At_Far-red-induction_P Parameter: Plant Line Value: Columbia
  misc_feature: MA Experiment 20001248 PARAMETER Experiment Name: At_Far-red-induction_P Parameter: Timepoint (hr) Value: 4
  misc_feature: MA Experiment 20001248 PARAMETER Experiment Name: At_Far-red-induction_P Parameter: Tissue Value: Whole Plant
  misc_feature: MA Experiment ID: 20001450 Result: Up-regulated in Transcription
  misc_feature: MA Experiment 20001450 PARAMETER Experiment Name: At_Far-red-induction_P Parameter: Age (day) Value: 7
  misc_feature: MA Experiment 20001450 PARAMETER Experiment Name: At_Far-red-induction_P Parameter: Light Value: Far-red vs. White
  misc_feature: MA Experiment 20001450 PARAMETER Experiment Name: At_Far-red-induction_P Parameter: Organism Value: A. thaliana
  misc_feature: MA Experiment 20001450 PARAMETER Experiment Name: At_Far-red-induction_P Parameter: Plant Line Value: Columbia
  misc_feature: MA Experiment 20001450 PARAMETER Experiment Name: At_Far-red-induction_P Parameter: Timepoint (hr) Value: 8
  misc_feature: MA Experiment 20001450 PARAMETER Experiment Name: At_Far-red-induction_P Parameter: Tissue Value: Whole Plant
  misc_feature: MA Experiment ID: 20001557 Result: Up-regulated in Transcription
  misc_feature: MA Experiment 20001557 PARAMETER Experiment Name: At_Drought_Soil_Dry_P Parameter: Age (day) Value: 27
  misc_feature: MA Experiment 20001557 PARAMETER Experiment Name: At_Drought_Soil_Dry_P Parameter: Organism Value: A. thaliana
  misc_feature: MA Experiment 20001557 PARAMETER Experiment Name: At_Drought_Soil_Dry_P Parameter: Plant Line Value: WS
  misc_feature: MA Experiment 20001557 PARAMETER Experiment Name: At_Drought_Soil_Dry_P Parameter: Post Timepoint (hr) Value: 3
  misc_feature: MA Experiment 20001557 PARAMETER Experiment Name: At_Drought_Soil_Dry_P Parameter: Post-Treatment Value: Re-Water vs. No Drought
  misc_feature: MA Experiment 20001557 PARAMETER Experiment Name: At_Drought_Soil_Dry_P Parameter: Timepoint (day) Value: 13
  misc_feature: MA Experiment 20001557 PARAMETER Experiment Name: At_Drought_Soil_Dry_P Parameter: Treatment Value: Drought vs. No Drought
  misc_feature: MA Experiment ID: 20001906 Result: Down-regulated in Transcription
  misc_feature: MA Experiment 20001906 PARAMETER Experiment Name: At_Drought_Reproduction_P Parameter: Age (day) Value: 35
  misc_feature: MA Experiment 20001906 PARAMETER Experiment Name: At_Drought_Reproduction_P Parameter: Organism Value: A. thaliana
  misc_feature: MA Experiment 20001906 PARAMETER Experiment Name: At_Drought_Reproduction_P Parameter: Plant Line Value: WS
  misc_feature: MA Experiment 20001906 PARAMETER Experiment Name: At_Drought_Reproduction_P Parameter: Timepoint (day) Value: 5
  misc_feature: MA Experiment 20001906 PARAMETER Experiment Name: At_Drought_Reproduction_P Parameter: Tissue Value: Siliques
  misc_feature: MA Experiment 20001906 PARAMETER Experiment Name: At_Drought_Reproduction_P Parameter: Treatment Value: Drought vs. No Drought

SEQ ID NO: 46709 - protein, 611 aa, Arabidopsis thaliana; identical to SEQ ID NO: 45908
  peptide (1)..(611): Ceres Seq. ID no. 13591610
  misc_feature (28)..(74): Pfam Name: F-box domain Pfam Description: F-box domain
  misc_feature (28)..(74): Pfam Name: F-box domain Pfam Description: F-box domain
  misc_feature (35)..(594): Homolog of NCBI NO: 13249030 NR Description: F-box containing protein TIR1
  misc_feature (11)..(594): Homolog of NCBI NO: 18423092 NR Description: transport inhibitor response 1 (TIR1), putative
  misc_feature (31)..(594): Homolog of NCBI NO: 18391439 NR Description: transport inhibitor response 1 (TIR1), putative
  misc_feature (31)..(594): Homolog of NCBI NO: 21740736 NR Description: OSJNBa0072K14.1 [Oryza sativa (japonica
  misc_feature (31)..(597): Homolog of NCBI NO: 18405102 NR Description: transport inhibitor response 1 (TIR1), putative
  misc_feature (35)..(594): Homolog of NCBI NO: 13249030 NR Description: F-box containing protein TIR1
  misc_feature (31)..(594): Homolog of NCBI NO: 18391439 NR Description: transport inhibitor response 1 (TIR1), putative
  misc_feature (31)..(597): Homolog of NCBI NO: 18405102 NR Description: transport inhibitor response 1 (TIR1), putative
  misc_feature (27)..(611): Homolog of NCBI NO: 18412177 NR Description: F-box protein GRR1-like protein 1, AtFBL18
  misc_feature (27)..(611): Homolog of NCBI NO: 12658970 NR Description: GRR1-like protein 1 [Arabidopsis thaliana]
  misc_feature (27)..(611): Homolog of NCBI NO: 15027885 NR Description: putative F-box protein GRR1 protein 1, AtFBL18
  misc_feature (27)..(600): Homolog of NCBI NO: 18412567 NR Description: transport inhibitor response 1 (TIR1), AtFBL1
  misc_feature (32)..(594): Homolog of NCBI NO: 12083523 NR Description: similar to Arabidopsis thaliana transport
  misc_feature (31)..(594): Homolog of NCBI NO: 21740736 NR Description: OSJNBa0072K14.1 [Oryza sativa (japonica
  misc_feature (11)..(594): Homolog of NCBI NO: 18423092 NR Description: transport inhibitor response 1 (TIR1), putative
  misc_feature (32)..(594): Homolog of NCBI NO: 12083523 NR Description: similar to Arabidopsis thaliana transport
  misc_feature (27)..(600): Homolog of NCBI NO: 18412567 NR Description: transport inhibitor response 1 (TIR1), AtFBL1
  misc_feature (27)..(611): Homolog of NCBI NO: 15027885 NR Description: putative F-box protein GRR1 protein 1, AtFBL18
  misc_feature (27)..(611): Homolog of NCBI NO: 12658970 NR Description: GRR1-like protein 1 [Arabidopsis thaliana]
  misc_feature (27)..(611): Homolog of NCBI NO: 18412177 NR Description: F-box protein GRR1-like protein 1, AtFBL18

SEQ ID NO: 46710 - protein, 585 aa, Arabidopsis thaliana; identical to SEQ ID NO: 45909
  peptide (1)..(585): Ceres Seq. ID no. 13591611
  misc_feature (2)..(48): Pfam Name: F-box domain Pfam Description: F-box domain
  misc_feature (2)..(48): Pfam Name: F-box domain Pfam Description: F-box domain
  misc_feature (9)..(568): Homolog of NCBI NO: 13249030 NR Description: F-box containing protein TIR1
  misc_feature (1)..(568): Homolog of NCBI NO: 18423092 NR Description: transport inhibitor response 1 (TIR1), putative
  misc_feature (5)..(568): Homolog of NCBI NO: 18391439 NR Description: transport inhibitor response 1 (TIR1), putative
  misc_feature (5)..(568): Homolog of NCBI NO: 21740736 NR Description: OSJNBa0072K14.1 [Oryza sativa (japonica
  misc_feature (5)..(571): Homolog of NCBI NO: 18405102 NR Description: transport inhibitor response 1 (TIR1), putative
  misc_feature (9)..(568): Homolog of NCBI NO: 13249030 NR Description: F-box containing protein TIR1
  misc_feature (5)..(568): Homolog of NCBI NO: 18391439 NR Description: transport inhibitor response 1 (TIR1), putative
  misc_feature (5)..(571): Homolog of NCBI NO: 18405102 NR Description: transport inhibitor response 1 (TIR1), putative
  misc_feature (1)..(585): Homolog of NCBI NO: 18412177 NR Description: F-box protein GRR1-like protein 1, AtFBL18
  misc_feature (1)..(585): Homolog of NCBI NO: 12658970 NR Description: GRR1-like protein 1 [Arabidopsis thaliana]
  misc_feature (1)..(585): Homolog of NCBI NO: 15027885 NR Description: putative F-box protein GRR1 protein 1, AtFBL18
  misc_feature (1)..(574): Homolog of NCBI NO: 18412567 NR Description: transport inhibitor response 1 (TIR1), AtFBL1
  misc_feature (6)..(568): Homolog of NCBI NO: 12083523 NR Description: similar to Arabidopsis thaliana transport
  misc_feature (5)..(568): Homolog of NCBI NO: 21740736 NR Description: OSJNBa0072K14.1 [Oryza sativa (japonica
  misc_feature (1)..(568): Homolog of NCBI NO: 18423092 NR Description: transport inhibitor response 1 (TIR1), putative
  misc_feature (6)..(568): Homolog of NCBI NO: 12083523 NR Description: similar to Arabidopsis thaliana transport
  misc_feature (1)..(574): Homolog of NCBI NO: 18412567 NR Description: transport inhibitor response 1 (TIR1), AtFBL1
  misc_feature (1)..(585): Homolog of NCBI NO: 15027885 NR Description: putative F-box protein GRR1 protein 1, AtFBL18
  misc_feature (1)..(585): Homolog of NCBI NO: 12658970 NR Description: GRR1-like protein 1 [Arabidopsis thaliana]
  misc_feature (1)..(585): Homolog of NCBI NO: 18412177 NR Description: F-box protein GRR1-like protein 1, AtFBL18

SEQ ID NO: 46711 - protein, 522 aa, Arabidopsis thaliana; identical to SEQ ID NO: 45910
  peptide (1)..(522): Ceres Seq. ID no. 13591612
  misc_feature (1)..(505): Homolog of NCBI NO: 13249030 NR Description: F-box containing protein TIR1
  misc_feature (1)..(505): Homolog of NCBI NO: 18423092 NR Description: transport inhibitor response 1 (TIR1), putative
  misc_feature (1)..(505): Homolog of NCBI NO: 18391439 NR Description: transport inhibitor response 1 (TIR1), putative
  misc_feature (1)..(505): Homolog of NCBI NO: 21740736 NR Description: OSJNBa0072K14.1 [Oryza sativa (japonica
  misc_feature (1)..(508): Homolog of NCBI NO: 18405102 NR Description: transport inhibitor response 1 (TIR1), putative
  misc_feature (1)..(505): Homolog of NCBI NO: 12083523 NR Description: similar to Arabidopsis thaliana transport
  misc_feature (1)..(511): Homolog of NCBI NO: 18412567 NR Description: transport inhibitor response 1 (TIR1), AtFBL1
  misc_feature (1)..(522): Homolog of NCBI NO: 15027885 NR Description: putative F-box protein GRR1 protein 1, AtFBL18
  misc_feature (1)..(522): Homolog of NCBI NO: 12658970 NR Description: GRR1-like protein 1 [Arabidopsis thaliana]
  misc_feature (1)..(522): Homolog of NCBI NO: 18412177 NR Description: F-box protein GRR1-like protein 1, AtFBL18
  misc_feature (1)..(505): Homolog of NCBI NO: 13249030 NR Description: F-box containing protein TIR1
  misc_feature (1)..(505): Homolog of NCBI NO: 18423092 NR Description: transport inhibitor response 1 (TIR1), putative
  misc_feature (1)..(505): Homolog of NCBI NO: 18391439 NR Description: transport inhibitor response 1 (TIR1), putative
  misc_feature (1)..(505): Homolog of NCBI NO: 21740736 NR Description: OSJNBa0072K14.1 [Oryza sativa (japonica
  misc_feature (1)..(508): Homolog of NCBI NO: 18405102 NR Description: transport inhibitor response 1 (TIR1), putative
  misc_feature (1)..(505): Homolog of NCBI NO: 12083523 NR Description: similar to Arabidopsis thaliana transport
  misc_feature (1)..(511): Homolog of NCBI NO: 18412567 NR Description: transport inhibitor response 1 (TIR1), AtFBL1
  misc_feature (1)..(522): Homolog of NCBI NO: 15027885 NR Description: putative F-box protein GRR1 protein 1, AtFBL18
  misc_feature (1)..(522): Homolog of NCBI NO: 12658970 NR Description: GRR1-like protein 1 [Arabidopsis thaliana]
  misc_feature (1)..(522): Homolog of NCBI NO: 18412177 NR Description: F-box protein GRR1-like protein 1, AtFBL18

SEQ ID NO: 46712 - DNA, 2578 bp, Arabidopsis thaliana
  misc_feature (1)..(2578): Ceres Seq. ID no. 13578913
  misc_feature: MA Experiment ID: 20001451 Result: Down-regulated in Transcription
  misc_feature: MA Experiment 20001451 PARAMETER Experiment Name: At_Far-red-induction_P Parameter: Age (day) Value: 7
  misc_feature: MA Experiment 20001451 PARAMETER Experiment Name: At_Far-red-induction_P Parameter: Light Value: Far-red vs. White
  misc_feature: MA Experiment 20001451 PARAMETER Experiment Name: At_Far-red-induction_P Parameter: Organism Value: A. thaliana
  misc_feature: MA Experiment 20001451 PARAMETER Experiment Name: At_Far-red-induction_P Parameter: Plant Line Value: Columbia
  misc_feature: MA Experiment 20001451 PARAMETER Experiment Name: At_Far-red-induction_P Parameter: Timepoint (hr) Value: 24
  misc_feature: MA Experiment 20001451 PARAMETER Experiment Name: At_Far-red-induction_P Parameter: Tissue Value: Whole Plant
gaatggagcgtgaaaatggagagagagagagtccaaacaccaagaccagctcctttttcacctatctctcttcttcatctgaatcagattttgtatcagaaagagagcacctgagctcataaattctggataagatcaaagtcagagtctttcttgtttttcatcacttacttgtatgacagaagaagatagctcagctaaaatgtcagaggatgttgagaaatatctcaacttaaatccaccttgctcctcctcctcctcttcttcctccgccgctacattcacgaacaagtctcgaaatttcaaatcttctcccccgccgtgtccagatcatgtccttgagaacgttttagagaacgtgcttcagttcctcacttccagatgcgatcgcaacgcagtctcattggtctgcagatcgtggtatcgcgtcgaggctcagactcgattagaggtttttattggaaactgttactcgctctctcctgctcggcttattcaccggttcaagcgtgttaggtctcttgtgcttaaagggaaacctaggtttgctgattttaatctcatgcctcctaattggggagctcaattctctccttgggttgctgctacagctaaggcttatccttggctcgagaaggttcatttgaagcgtatgtttgttacggatgatgatttggctcttcttgctgagtcgtttcctgggttcaaagagcttactttggtctgctgtgaaggttttgggactagtggtattgctattgttgctaacaaatgcaggcagctaaaggtccttgatttgatggagtcagaagtcacagatgatgagttggattggatttcttgttttcctgagggtgaaactcatctggagtctttgtcttttgactgtgttgaatcccctatcaatttcaaggcattggaggagctcgtggttaggtcaccattcttgaagaaacttagaacgaacaggtttgtttcccttgaagagctgcatcgactaatggttcgagcgccgcagttaacgagtcttgggacggggtcatttagtccagacaatgtgcctcagggagaacaacaaccggattatgcagctgcttttcgtgcttgtaaatccatagtttgtctctcaggattcagggaatttagaccggaatacctcctagccatctcttcagtttgtgctaatctcacctctcttaacttcagttatgctaacatttctcctcacatgctcaagcccatcataagcaactgtcacaatatccgagtcttctgggctcttgactcgatacgtgatgaaggactacaggcagtggctgccacatgcaaggagctccgtgagcttcggattttcccttttgatcctcgtgaagacagtgaaggtcctgtctcgggagtaggcctccaagcaatttcagagggctgtaggaaactggaatctatcctgtacttttgccagaatatgaccaatggagctgtgacagccatgtcggagaactgcccgcagcttactgtgtttagactttgcataatgggtcgccataggcctgaccacgtgacaggaaagccaatggacgatggatttggtgccattgttaaaaactgcaagaagctaacccgacttgcagtatcagggttactaacagatgaagcttttagctatataggagaatatgggaaattgatccgtacgctatctgtagcgtttgctgggaacagtgacaaggctctgagatacgttcttgagggttgtcctaaactacaaaagcttgagatcagggacagtccctttggagatgttggattgcgctctggtatgcatcggtattccaatatgaggtttgtttggttgtcgtcatgtctcatatcccgtggaggctgcaggggtgtttctcatgctctgcctaatgtagtcgtggaagtatttggagccgatggtgatgatgacgaagacactgtcactggggattatgttgagacattgtacttgtatcgatcccttgatggcccaaggaaggatgctccaaagtttgtaacaattttatgagaaaaactttggtgcaaatgaggccatgattggggaaaagcaaaactagcaagcagaagataatgtgtttgtaaactatgctctaaggtatcgataaatgcggtaactttctccaagcttttctcatcaagccttgggacagtatggcctttgggatgatggacaaccaccggattcttgtacgattctatcagctgagttccgtaaggtttcagaaaatcagtctctcctgcaacaaacaagccatttatcagattctcgatcatcaatgaacaaggttttgaagaattttcaaatcagcttttgcagaatgtacctaaaaagtggagggagagagtttccaaggaagacgaatatgcattctcggccaatttggcggatttgagcttagctcctccaatgattataacaaacttaatctttggtactttctgaaatgcaattccctgcaaaagttgtaaatgaatcagaaacagaatttgtaaataaatatgatcatgaatactatagtgtcattagtattgacgtacc

SEQ ID NO: 46713 - protein, 623 aa, Arabidopsis thaliana
  peptide (1)..(623): Ceres Seq. ID no. 13578914
  misc_feature (52)..(620): Homolog of NCBI NO: 34908378 NR Description: P0529E05.15 [Oryza sativa (japonica
  misc_feature (55)..(623): Homolog of NCBI NO: 18405209 NR Description: coronatine-insensitive 1 (COI1), AtFBL2
  misc_feature (58)..(620): Homolog of NCBI NO: 12658970 NR Description: GRR1-like protein 1 [Arabidopsis thaliana]
  misc_feature (56)..(623): Homolog of NCBI NO: 21740736 NR Description: OSJNBa0072K14.1 [Oryza sativa (japonica
  misc_feature (56)..(620): Homolog of NCBI NO: 18412567 NR Description: transport inhibitor response 1 (TIR1), AtFBL1
  misc_feature (56)..(623): Homolog of NCBI NO: 18391439 NR Description: transport inhibitor response 1 (TIR1), putative
  misc_feature (56)..(623): Homolog of NCBI NO: 18405102 NR Description: transport inhibitor response 1 (TIR1), putative
  misc_feature (44)..(623): Homolog of NCBI NO: 34902412 NR Description: Putative F-box containing protein TIR1
  misc_feature (5)..(623): Homolog of NCBI NO: 13249030 NR Description: F-box containing protein TIR1
  misc_feature (1)..(623): Homolog of NCBI NO: 18423092 NR Description: transport inhibitor response 1 (TIR1), putative
MTEEDSSAKMSEDVEKYLNLNPPCSSSSSSSSAATFTNKSRNFKSSPPPCPDHVLENVLENVLQFLTSRCDRNAVSLVCRSWYRVEAQTRLEVFIGNCYSLSPARLIHRFKRVRSLVLKGKPRFADFNLMPPNWGAQFSPWVAATAKAYPWLEKVHLKRMFVTDDDLALLAESFPGFKELTLVCCEGFGTSGIAIVANKCRQLKVLDLMESEVTDDELDWISCFPEGETHLESLSFDCVESPINFKALEELVVRSPFLKKLRTNRFVSLEELHRLMVRAPQLTSLGTGSFSPDNVPQGEQQPDYAAAFRACKSIVCLSGFREFRPEYLLAISSVCANLTSLNFSYANISPHMLKPIISNCHNIRVFWALDSIRDEGLQAVAATCKELRELRIFPFDPREDSEGPVSGVGLQAISEGCRKLESILYFCQNMTNGAVTAMSENCPQLTVFRLCIMGRHRPDHVTGKPMDDGFGAIVKNCKKLTRLAVSGLLTDEAFSYIGEYGKLIRTLSVAFAGNSDKALRYVLEGCPKLQKLEIRDSPFGDVGLRSGMHRYSNMRFVWLSSCLISRGGCRGVSHALPNVVVEVFGADGDDDEDTVTGDYVETLYLYRSLDGPRKDAPKFVTIL

SEQ ID NO: 46714 - protein, 614 aa, Arabidopsis thaliana
  peptide (1)..(614): Ceres Seq. ID no. 13578915
  misc_feature (43)..(611): Homolog of NCBI NO: 34908378 NR Description: P0529E05.15 [Oryza sativa (japonica
  misc_feature (46)..(614): Homolog of NCBI NO: 18405209 NR Description: coronatine-insensitive 1 (COI1), AtFBL2
  misc_feature (49)..(611): Homolog of NCBI NO: 12658970 NR Description: GRR1-like protein 1 [Arabidopsis thaliana]
  misc_feature (47)..(614): Homolog of NCBI NO: 21740736 NR Description: OSJNBa0072K14.1 [Oryza sativa (japonica
  misc_feature (47)..(611): Homolog of NCBI NO: 18412567 NR Description: transport inhibitor response 1 (TIR1), AtFBL1
  misc_feature (47)..(614): Homolog of NCBI NO: 18391439 NR Description: transport inhibitor response 1 (TIR1), putative
  misc_feature (47)..(614): Homolog of NCBI NO: 18405102 NR Description: transport inhibitor response 1 (TIR1), putative
  misc_feature (35)..(614): Homolog of NCBI NO: 34902412 NR Description: Putative F-box containing protein TIR1
  misc_feature (1)..(614): Homolog of NCBI NO: 13249030 NR Description: F-box containing protein TIR1
  misc_feature (1)..(614): Homolog of NCBI NO: 18423092 NR Description: transport inhibitor response 1 (TIR1), putative
MSEDVEKYLNLNPPCSSSSSSSSAATFTNKSRNFKSSPPPCPDHVLENVLENVLQFLTSRCDRNAVSLVCRSWYRVEAQTRLEVFIGNCYSLSPARLIHRFKRVRSLVLKGKPRFADFNLMPPNWGAQFSPWVAATAKAYPWLEKVHLKRMFVTDDDLALLAESFPGFKELTLVCCEGFGTSGIAIVANKCRQLKVLDLMESEVTDDELDWISCFPEGETHLESLSFDCVESPINFKALEELVVRSPFLKKLRTNRFVSLEELHRLMVRAPQLTSLGTGSFSPDNVPQGEQQPDYAAAFRACKSIVCLSGFREFRPEYLLAISSVCANLTSLNFSYANISPHMLKPIISNCHNIRVFWALDSIRDEGLQAVAATCKELRELRIFPFDPREDSEGPVSGVGLQAISEGCRKLESILYFCQNMTNGAVTAMSENCPQLTVFRLCIMGRHRPDHVTGKPMDDGFGAIVKNCKKLTRLAVSGLLTDEAFSYIGEYGKLIRTLSVAFAGNSDKALRYVLEGCPKLQKLEIRDSPFGDVGLRSGMHRYSNMRFVWLSSCLISRGGCRGVSHALPNVVVEVFGADGDDDEDTVTGDYVETLYLYRSLDGPRKDAPKFVTIL

SEQ ID NO: 46715 - protein, 494 aa, Arabidopsis thaliana
  peptide (1)..(494): Ceres Seq. ID no. 13578916
  misc_feature (1)..(491): Homolog of NCBI NO: 34908378 NR Description: P0529E05.15 [Oryza sativa (japonica
  misc_feature (1)..(494): Homolog of NCBI NO: 18405209 NR Description: coronatine-insensitive 1 (COI1), AtFBL2
  misc_feature (1)..(491): Homolog of NCBI NO: 12658970 NR Description: GRR1-like protein 1 [Arabidopsis thaliana]
  misc_feature (1)..(494): Homolog of NCBI NO: 21740736 NR Description: OSJNBa0072K14.1 [Oryza sativa (japonica
  misc_feature (1)..(491): Homolog of NCBI NO: 18412567 NR Description: transport inhibitor response 1 (TIR1), AtFBL1
  misc_feature (1)..(494): Homolog of NCBI NO: 18391439 NR Description: transport inhibitor response 1 (TIR1), putative
  misc_feature (1)..(494): Homolog of NCBI NO: 18405102 NR Description: transport inhibitor response 1 (TIR1), putative
  misc_feature (1)..(494): Homolog of NCBI NO: 34902412 NR Description: Putative F-box containing protein TIR1
  misc_feature (1)..(494): Homolog of NCBI NO: 13249030 NR Description: F-box containing protein TIR1
  misc_feature (1)..(494): Homolog of NCBI NO: 18423092 NR Description: transport inhibitor response 1 (TIR1), putative
MPPNWGAQFSPWVAATAKAYPWLEKVHLKRMFVTDDDLALLAESFPGFKELTLVCCEGFGTSGIAIVANKCRQLKVLDLMESEVTDDELDWISCFPEGETHLESLSFDCVESPINFKALEELVVRSPFLKKLRTNRFVSLEELHRLMVRAPQLTSLGTGSFSPDNVPQGEQQPDYAAAFRACKSIVCLSGFREFRPEYLLAISSVCANLTSLNFSYANISPHMLKPIISNCHNIRVFWALDSIRDEGLQAVAATCKELRELRIFPFDPREDSEGPVSGVGLQAISEGCRKLESILYFCQNMTNGAVTAMSENCPQLTVFRLCIMGRHRPDHVTGKPMDDGFGAIVKNCKKLTRLAVSGLLTDEAFSYIGEYGKLIRTLSVAFAGNSDKALRYVLEGCPKLQKLEIRDSPFGDVGLRSGMHRYSNMRFVWLSSCLISRGGCRGVSHALPNVVVEVFGADGDDDEDTVTGDYVETLYLYRSLDGPRKDAPKFVTIL

SEQ ID NO: 46716 - DNA, 2402 bp, Arabidopsis thaliana
  misc_feature (1)..(2402): Ceres Seq. ID no. 14310194
  misc_feature: MA Experiment ID: 20000166 Result: Down-regulated in Transcription
  misc_feature: MA Experiment 20000166 PARAMETER Experiment Name: At_100uM_ABA_P Parameter: Age (day) Value: 14
  misc_feature: MA Experiment 20000166 PARAMETER Experiment Name: At_100uM_ABA_P Parameter: Organism Value: A. thaliana
  misc_feature: MA Experiment 20000166 PARAMETER Experiment Name: At_100uM_ABA_P Parameter: Plant Line Value: WS
  misc_feature: MA Experiment 20000166 PARAMETER Experiment Name: At_100uM_ABA_P Parameter: Timepoint (hr) Value: 1
  misc_feature: MA Experiment 20000166 PARAMETER Experiment Name: At_100uM_ABA_P Parameter: Tissue Value: Aerial
  misc_feature: MA Experiment 20000166 PARAMETER Experiment Name: At_100uM_ABA_P Parameter: Treatment Value: 100uM ABA vs. No Treatment
  misc_feature: MA Experiment ID: 20000169 Result: Up-regulated in Transcription
  misc_feature: MA Experiment 20000169 PARAMETER Experiment Name: At_100uM_ABA_P Parameter: Age (day) Value: 14
  misc_feature: MA Experiment 20000169 PARAMETER Experiment Name: At_100uM_ABA_P Parameter: Organism Value: A. thaliana
  misc_feature: MA Experiment 20000169 PARAMETER Experiment Name: At_100uM_ABA_P Parameter: Plant Line Value: WS
  misc_feature: MA Experiment 20000169 PARAMETER Experiment Name: At_100uM_ABA_P Parameter: Timepoint (hr) Value: 6
  misc_feature: MA Experiment 20000169 PARAMETER Experiment Name: At_100uM_ABA_P Parameter: Tissue Value: Aerial
  misc_feature: MA Experiment 20000169 PARAMETER Experiment Name: At_100uM_ABA_P Parameter: Treatment Value: 100uM ABA vs. No Treatment
  misc_feature: MA Experiment ID: 20000171 Result: Down-regulated in Transcription
  misc_feature: MA Experiment 20000171 PARAMETER Experiment Name: At_42deg_Heat_P Parameter: Age (day) Value: 14
  misc_feature: MA Experiment 20000171 PARAMETER Experiment Name: At_42deg_Heat_P Parameter: Organism Value: A. thaliana
  misc_feature: MA Experiment 20000171 PARAMETER Experiment Name: At_42deg_Heat_P Parameter: Plant Line Value: WS
  misc_feature: MA Experiment 20000171 PARAMETER Experiment Name: At_42deg_Heat_P Parameter: Temperature (deg C) Value: 42 vs. 22
  misc_feature: MA Experiment 20000171 PARAMETER Experiment Name: At_42deg_Heat_P Parameter: Timepoint (hr) Value: 1
  misc_feature: MA Experiment 20000171 PARAMETER Experiment Name: At_42deg_Heat_P Parameter: Tissue Value: Aerial
  misc_feature: MA Experiment ID: 20000173 Result: Down-regulated in Transcription
  misc_feature: MA Experiment 20000173 PARAMETER Experiment Name: At_42deg_Heat_P Parameter: Age (day) Value: 14
  misc_feature: MA Experiment 20000173 PARAMETER Experiment Name: At_42deg_Heat_P Parameter: Organism Value: A. thaliana
  misc_feature: MA Experiment 20000173 PARAMETER Experiment Name: At_42deg_Heat_P Parameter: Plant Line Value: WS
  misc_feature: MA Experiment 20000173 PARAMETER Experiment Name: At_42deg_Heat_P Parameter: Temperature (deg C) Value: 42 vs. 22
  misc_feature: MA Experiment 20000173 PARAMETER Experiment Name: At_42deg_Heat_P Parameter: Timepoint (hr) Value: 6
  misc_feature: MA Experiment 20000173 PARAMETER Experiment Name: At_42deg_Heat_P Parameter: Tissue Value: Aerial
  misc_feature: MA Experiment ID: 20000179 Result: Down-regulated in Transcription
  misc_feature: MA Experiment 20000179 PARAMETER Experiment Name: At_Germinating_Seeds_P Parameter: Age (hr) Value: 6 vs. 0
  misc_feature: MA Experiment 20000179 PARAMETER Experiment Name: At_Germinating_Seeds_P Parameter: Tissue Value: Germinating Seeds
  misc_feature: MA Experiment ID: 20000184 Result: Down-regulated in Transcription
  misc_feature: MA Experiment 20000184 PARAMETER Experiment Name: At_Shoots__P Parameter: Age (day) Value: 7
  misc_feature: MA Experiment 20000184 PARAMETER Experiment Name: At_Shoots__P Parameter: Tissue Value: Shoots vs. Whole Plant
  misc_feature: MA Experiment ID: 20000227 Result: Up-regulated in Transcription
  misc_feature: MA Experiment 20000227 PARAMETER Experiment Name: At_Root-Tips-vs-Tops_P Parameter: Tissue Value: Root Tips vs. Root Tops
  misc_feature: MA Experiment ID: 20000264 Result: Up-regulated in Transcription
  misc_feature: MA Experiment 20000264 PARAMETER Experiment Name: At_Open_Flower_P Parameter: Age (day) Value: 21
  misc_feature: MA Experiment 20000264 PARAMETER Experiment Name: At_Open_Flower_P Parameter: Plant Line Value: WS
  misc_feature: MA Experiment 20000264 PARAMETER Experiment Name: At_Open_Flower_P Parameter: Tissue Value: Open Flower vs. Whole Plant
  misc_feature: MA Experiment ID: 20000269 Result: Down-regulated in Transcription
  misc_feature: MA Experiment 20000269 PARAMETER Experiment Name: At_1mM_KNO3_L-vs-H_Roots_P Parameter: Age (day) Value: 7,10,12
  misc_feature: MA Experiment 20000269 PARAMETER Experiment Name: At_1mM_KNO3_L-vs-H_Roots_P Parameter: Organism Value: A. thaliana
  misc_feature: MA Experiment 20000269 PARAMETER Experiment Name: At_1mM_KNO3_L-vs-H_Roots_P Parameter: Plant Line Value: WS
  misc_feature: MA Experiment 20000269 PARAMETER Experiment Name: At_1mM_KNO3_L-vs-H_Roots_P Parameter: Timepoint (day) Value: 7,10,12
  misc_feature: MA Experiment 20000269 PARAMETER Experiment Name: At_1mM_KNO3_L-vs-H_Roots_P Parameter: Tissue Value: Roots
  misc_feature: MA Experiment 20000269 PARAMETER Experiment Name: At_1mM_KNO3_L-vs-H_Roots_P Parameter: Treatment Value: 1mM KNO3 vs. 50mM KNO3
  misc_feature: MA Experiment ID: 20000436 Result: Up-regulated in Transcription
  misc_feature: MA Experiment 20000436 PARAMETER Experiment Name: At_Drought_P Parameter: Age (day) Value: 7
  misc_feature: MA Experiment 20000436 PARAMETER Experiment Name: At_Drought_P Parameter: Organism Value: A. thaliana
  misc_feature: MA Experiment 20000436 PARAMETER Experiment Name: At_Drought_P Parameter: Plant Line Value: WS
  misc_feature: MA Experiment 20000436 PARAMETER Experiment Name: At_Drought_P Parameter: Timepoint (hr) Value: 12
  misc_feature: MA Experiment 20000436 PARAMETER Experiment Name: At_Drought_P Parameter: Tissue Value: Whole Plant
  misc_feature: MA Experiment 20000436 PARAMETER Experiment Name: At_Drought_P Parameter: Treatment Value: Drought vs. No Drought
  misc_feature: MA Experiment ID: 20000438 Result: Down-regulated in Transcription
  misc_feature: MA Experiment 20000438 PARAMETER Experiment Name: At_Shoots__P Parameter: Age (day) Value: 14
  misc_feature: MA Experiment 20000438 PARAMETER Experiment Name: At_Shoots__P Parameter: Tissue Value: Shoots vs. Whole Plant
  misc_feature: MA Experiment ID: 20000439 Result: Down-regulated in Transcription
  misc_feature: MA Experiment 20000439 PARAMETER Experiment Name: At_Roots__P Parameter: Age (day) Value: 14 vs. 21
  misc_feature: MA Experiment 20000439 PARAMETER Experiment Name: At_Roots__P Parameter: Organism Value: A. thaliana
  misc_feature: MA Experiment 20000439 PARAMETER Experiment Name: At_Roots__P Parameter: Tissue Value: Roots vs. Whole Plant
  misc_feature: MA Experiment ID: 20000441 Result: Up-regulated in Transcription
  misc_feature: MA Experiment 20000441 PARAMETER Experiment Name: At_1uM_BR-BRZ__P Parameter: Tissue Value: Shoot Apices
  misc_feature: MA Experiment 20000441 PARAMETER Experiment Name: At_1uM_BR-BRZ__P Parameter: Treatment Value: 1uM BR vs. No Treatment
  misc_feature: MA Experiment ID: 20000443 Result: Up-regulated in Transcription
  misc_feature: MA Experiment 20000443 PARAMETER Experiment Name: At_1uM_BR-BRZ__P Parameter: Tissue Value: Shoot Apices
  misc_feature: MA Experiment 20000443 PARAMETER Experiment Name: At_1uM_BR-BRZ__P Parameter: Treatment Value: 1uM BRZ vs. No Treatment
  misc_feature: MA Experiment ID: 20000453 Result: Up-regulated in Transcription
  misc_feature: MA Experiment 20000453 PARAMETER Experiment Name: At_100uM_ABA_P Parameter: Age (day) Value: 15
  misc_feature: MA Experiment 20000453 PARAMETER Experiment Name: At_100uM_ABA_P Parameter: Organism Value: A. thaliana
  misc_feature: MA Experiment 20000453 PARAMETER Experiment Name: At_100uM_ABA_P Parameter: Plant Line Value: WS
  misc_feature: MA Experiment 20000453 PARAMETER Experiment Name: At_100uM_ABA_P Parameter: Timepoint (hr) Value: 24
  misc_feature: MA Experiment 20000453 PARAMETER Experiment Name: At_100uM_ABA_P Parameter: Tissue Value: Aerial
  misc_feature: MA Experiment 20000453 PARAMETER Experiment Name: At_100uM_ABA_P Parameter: Treatment Value: 100uM ABA vs. No Treatment
  misc_feature: MA Experiment ID: 20000495 Result: Up-regulated in Transcription
  misc_feature: MA Experiment 20000495 PARAMETER Experiment Name: At_Guard_Cells_P Parameter: Harvest Date Value: 8/2/2002
  misc_feature: MA Experiment 20000495 PARAMETER Experiment Name: At_Guard_Cells_P Parameter: Organism Value: A. thaliana
  misc_feature: MA Experiment 20000495 PARAMETER Experiment Name: At_Guard_Cells_P Parameter: Tissue Value: Guard Cells vs. Leaves
  misc_feature: MA Experiment ID: 20000496 Result: Up-regulated in Transcription
  misc_feature: MA Experiment 20000496 PARAMETER Experiment Name: At_Guard_Cells_P Parameter: Harvest Date Value: 7/19/2002
  misc_feature: MA Experiment 20000496 PARAMETER Experiment Name: At_Guard_Cells_P Parameter: Organism Value: Canola
  misc_feature: MA Experiment 20000496 PARAMETER Experiment Name: At_Guard_Cells_P Parameter: Tissue Value: Guard Cells vs. Leaves
  misc_feature: MA Experiment ID: 20000573 Result: Up-regulated in Transcription
  misc_feature: MA Experiment 20000573 PARAMETER Experiment Name: At_100uM_ABA_Mutants__P Parameter: Organism Value: A. thaliana
  misc_feature: MA Experiment 20000573 PARAMETER Experiment Name: At_100uM_ABA_Mutants__P Parameter: Plant Line Value: CS22 vs. Ler wt
  misc_feature: MA Experiment 20000573 PARAMETER Experiment Name: At_100uM_ABA_Mutants__P Parameter: Timepoint (hr) Value: N/A
  misc_feature: MA Experiment 20000573 PARAMETER Experiment Name: At_100uM_ABA_Mutants__P Parameter: Tissue Value: Whole Plant
  misc_feature: MA Experiment 20000573 PARAMETER Experiment Name: At_100uM_ABA_Mutants__P Parameter: Treatment Value: None
  misc_feature: MA Experiment ID: 20000606 Result: Up-regulated in Transcription
  misc_feature: MA Experiment 20000606 PARAMETER Experiment Name: At_CS8548_Mutant_P Parameter: Age (day) Value: 14
  misc_feature: MA Experiment 20000606 PARAMETER Experiment Name: At_CS8548_Mutant_P Parameter: Plant Line Value: CS8548 vs. wt
  misc_feature: MA Experiment 20000606 PARAMETER Experiment Name: At_CS8548_Mutant_P Parameter: Tissue Value: Whole Plant
  misc_feature: MA Experiment ID: 20000794 Result: Up-regulated in Transcription
  misc_feature: MA Experiment 20000794 PARAMETER Experiment Name: At_Petals_P Parameter: Age (day) Value: 23-25 days
  misc_feature: MA Experiment 20000794 PARAMETER Experiment Name: At_Petals_P Parameter: Plant Line Value: WS
  misc_feature: MA Experiment 20000794 PARAMETER Experiment Name: At_Petals_P Parameter: Tissue Value: Petals vs. Whole plant
  misc_feature: MA Experiment ID: 20001247 Result: Up-regulated in Transcription
  misc_feature: MA Experiment 20001247 PARAMETER Experiment Name: At_Far-red-induction_P Parameter: Age (day) Value: 7
  misc_feature: MA Experiment 20001247 PARAMETER Experiment Name: At_Far-red-induction_P Parameter: Light Value: Far-red vs. White
  misc_feature: MA Experiment 20001247 PARAMETER Experiment Name: At_Far-red-induction_P Parameter: Organism Value: A. thaliana
  misc_feature: MA Experiment 20001247 PARAMETER Experiment Name: At_Far-red-induction_P Parameter: Plant Line Value: Columbia
  misc_feature: MA Experiment 20001247 PARAMETER Experiment Name: At_Far-red-induction_P Parameter: Timepoint (hr) Value: 1
  misc_feature: MA Experiment 20001247 PARAMETER Experiment Name: At_Far-red-induction_P Parameter: Tissue Value: Whole Plant
  misc_feature: MA Experiment ID: 20001248 Result: Up-regulated in Transcription
  misc_feature: MA Experiment 20001248 PARAMETER Experiment Name: At_Far-red-induction_P Parameter: Age (day) Value: 7
  misc_feature: MA Experiment 20001248 PARAMETER Experiment Name: At_Far-red-induction_P Parameter: Light Value: Far-red vs. White
  misc_feature: MA Experiment 20001248 PARAMETER Experiment Name: At_Far-red-induction_P Parameter: Organism Value: A. thaliana
  misc_feature: MA Experiment 20001248 PARAMETER Experiment Name: At_Far-red-induction_P Parameter: Plant Line Value: Columbia
  misc_feature: MA Experiment 20001248 PARAMETER Experiment Name: At_Far-red-induction_P Parameter: Timepoint (hr) Value: 4
  misc_feature: MA Experiment 20001248 PARAMETER Experiment Name: At_Far-red-induction_P Parameter: Tissue Value: Whole Plant
  misc_feature: MA Experiment ID: 20001450 Result: Up-regulated in Transcription
  misc_feature: MA Experiment 20001450 PARAMETER Experiment Name: At_Far-red-induction_P Parameter: Age (day) Value: 7
  misc_feature: MA Experiment 20001450 PARAMETER Experiment Name: At_Far-red-induction_P Parameter: Light Value: Far-red vs. White
  misc_feature: MA Experiment 20001450 PARAMETER Experiment Name: At_Far-red-induction_P Parameter: Organism Value: A. thaliana
  misc_feature: MA Experiment 20001450 PARAMETER Experiment Name: At_Far-red-induction_P Parameter: Plant Line Value: Columbia
  misc_feature: MA Experiment 20001450 PARAMETER Experiment Name: At_Far-red-induction_P Parameter: Timepoint (hr) Value: 8
  misc_feature: MA Experiment 20001450 PARAMETER Experiment Name: At_Far-red-induction_P Parameter: Tissue Value: Whole Plant
  misc_feature: MA Experiment ID: 20001451 Result: Up-regulated in Transcription
  misc_feature: MA Experiment 20001451 PARAMETER Experiment Name: At_Far-red-induction_P Parameter: Age (day) Value: 7
  misc_feature: MA Experiment 20001451 PARAMETER Experiment Name: At_Far-red-induction_P Parameter: Light Value: Far-red vs. White
  misc_feature: MA Experiment 20001451 PARAMETER Experiment Name: At_Far-red-induction_P Parameter: Organism Value: A. thaliana
  misc_feature: MA Experiment 20001451 PARAMETER Experiment Name: At_Far-red-induction_P Parameter: Plant Line Value: Columbia
  misc_feature: MA Experiment 20001451 PARAMETER Experiment Name: At_Far-red-induction_P Parameter: Timepoint (hr) Value: 24
  misc_feature: MA Experiment 20001451 PARAMETER Experiment Name: At_Far-red-induction_P Parameter: Tissue Value: Whole Plant
  misc_feature: MA Experiment ID: 20001554 Result: Up-regulated in Transcription
  misc_feature: MA Experiment 20001554 PARAMETER Experiment Name: At_Drought_Soil_Dry_P Parameter: Age (day) Value: 21
  misc_feature: MA Experiment 20001554 PARAMETER Experiment Name: At_Drought_Soil_Dry_P Parameter: Organism Value: A. thaliana
  misc_feature: MA Experiment 20001554 PARAMETER Experiment Name: At_Drought_Soil_Dry_P Parameter: Plant Line Value: WS
  misc_feature: MA Experiment 20001554 PARAMETER Experiment Name: At_Drought_Soil_Dry_P Parameter: Post Timepoint (hr) Value: None
  misc_feature: MA Experiment 20001554 PARAMETER Experiment Name: At_Drought_Soil_Dry_P Parameter: Post-Treatment Value: None
  misc_feature: MA Experiment 20001554 PARAMETER Experiment Name: At_Drought_Soil_Dry_P Parameter: Timepoint (day) Value: 7
  misc_feature: MA Experiment 20001554 PARAMETER Experiment Name: At_Drought_Soil_Dry_P Parameter: Treatment Value: Drought vs. No Drought
tttcctctgtttatctaatctttctctgtttcttcctctactttttaaatttctcaaacgctcaatcatcgccggttttcgcctgcgacgtagctgcaaacccttctctcgccgcctatggtttctgcaacaccgttttgaagatcgaataccgagtcgctgatctggtcgcgaggctcacgttgcaagaaaagatcgggtttttagtgagtaaagctaacggcgtgactcgtcttgggattccaacgtatgaatggtggtctgaagcacttcacggcgtttcttacatcggacccggcacgcatttttctagccaagttcccggagctacgagtttcccgcaggttatactcaccgccgcttctttcaacgtatctctgtttcaagccattggcaaggtcgtctcaacggaagcgagggcaatgtacaacgtgggattagccggactaacgtattggtcaccgaacgtgaacatattccgagatccaagatggggaagagggcaagagactccaggagaagatccattgctcgctagtaagtatgcttcagggtacgttaagggtcttcaagagactgacggtggcgattctaaccgtctcaaagtcgccgcctgctgcaaacactataccgcttacgatgtcgataattggaaaggcgtagaacgttacagtttcaacgccgtggtgactcaacaagatatggatgatacgtatcaaccaccgttcaagagttgtgtggttgatgggaatgtggcgagtgttatgtgttcttacaatcaagttaacggcaaaccgacatgcgctgatccagatctgctctctggtgttatccgcggtgaatggaaattaaatgggtacattgtttcagattgtgattcagtagatgtcttgtataagaaccaacactatacaaagactccagctgaagctgcagccatatctatattggaggtttggatttaaactgtggttcattcttgggtcaacatacagaggaagcagttaagtcgggtttggtaaacgaggcagctatcgataaagcgatttcgaacaactttttgacccttatgcgtttaggattctttgatggaaacccaaagaaccaaatctatggcgggttaggtcctaccgacgtttgcacgtctgcgaatcaagagctagcagcagatgcagcaagacaaggcattgttctactcaagaacactggatgcttaccgctttctcctaaatcgatcaaaacactagccgtgattggaccaaacgcgaatgtcaccaaaacaatgattggaaactacgaaggcacgccgtgtaaatacacaacaccactacaaggactagccgggacggtatctacaacatatctaccaggctgctccaatgtagcttgtgctgtagcggatgtagccggcgccacgaaactagcagccactgcagatgtgtctgtgcttgtgatcggtgccgatcaatcaatcgaggcagagagccgagacagagtcgacctgcatcttcctggacagcaacaagagctggtgatccaagtggctaaagcagcaaaaggaccggtcttgctcgtcattatgtccggtggaggtttcgatattacattcgctaagaatgacccaaagatcgccggaattttgtgggttggttatcccggagaagccggtggtatcgccattgctgatatcatctttggccgttataatccaagtgggaaattaccgatgacgtggtatccacagtcgtatgtagagaaagttccgatgacaataatgaacatgagacccgataaagcaagcgggtatccgggtcggacttaccgattctacaccggagaaacagtatacgcattcggagatggactcagctacaccaaattcagtcacactttagtcaaagctccaagtctcgtttctctcggtctcgaagagaatcacgtttgccgatcatcggaatgtcaatcgctagacgcgatcggaccgcactgcgaaaacgctgtctccggcggtggatcggcgtttgaagttcatatcaaggtacgaaacggaggagatagagaagggattcacacggtgtttctattcacgacgccgccggcgattcacggatcgccgaggaagcatttggtaggattcgagaagattcgattggggaagagggaagaagcggtggttaggtttaaggtagagatatgtaaagatctgagtgtggttgatgagattgggaagaggaagattggtttgggaaagcatcttcttcatgtcggagatttaaaacattccttaagcattagaatctgattctatatttttatttgaggaagaaaaaaagaatatttaatatgcttaagcttttgcaagttggaaaagaaaagtaataaaaaaagaaattgtgaatctc

SEQ ID NO: 46717 - protein, 410 aa, Arabidopsis thaliana
  peptide (1)..(410): Ceres Seq. ID no. 14310195
  misc_feature (40)..(270): Pfam Name: Glycosyl hydrolase family 3 C terminal domain Pfam Description: Glycosyl hydrolase family 3 C terminal domain
  misc_feature (1)..(410): Homolog of NCBI NO: 34894432 NR Description: putative beta-xylosidase [Oryza sativa (japonica
  misc_feature (1)..(408): Homolog of NCBI NO: 38346629 NR Description: OSJNBa0074L08.23 [Oryza sativa (japonica
  misc_feature (1)..(409): Homolog of NCBI NO: 25518461 NR Description: hypothetical protein T14P4.8 - Arabidopsis
  misc_feature (1)..(409): Homolog of NCBI NO: 18378991 NR Description: glycosyl hydrolase family 3 [Arabidopsis
  misc_feature (1)..(410): Homolog of NCBI NO: 25453520 NR Description: beta-1,4-xylosidase [imported] - Arabidopsis
  misc_feature (1)..(410): Homolog of NCBI NO: 15230897 NR Description: glycosyl hydrolase family 3 [Arabidopsis thaliana]
  misc_feature (1)..(410): Homolog of NCBI NO: 32481073 NR Description: auxin-induced beta-glucosidase [Chenopodium
  misc_feature (1)..(409): Homolog of NCBI NO: 15239867 NR Description: glycosyl hydrolase family 3 [Arabidopsis
  misc_feature (1)..(410): Homolog of NCBI NO: 18025340 NR Description: alpha-L-arabinofuranosidase/beta-D-xylosidase
  misc_feature (1)..(410): Homolog of NCBI NO: 38344900 NR Description: OSJNBb0079B02.3 [Oryza sativa (japonica
MRLGFFDGNPKNQIYGGLGPTDVCTSANQELAADAARQGIVLLKNTGCLPLSPKSIKTLAVIGPNANVTKTMIGNYEGTPCKYTTPLQGLAGTVSTTYLPGCSNVACAVADVAGATKLAATADVSVLVIGADQSIEAESRDRVDLHLPGQQQELVIQVAKAAKGPVLLVIMSGGGFDITFAKNDPKIAGILWVGYPGEAGGIAIADIIFGRYNPSGKLPMTWYPQSYVEKVPMTIMNMRPDKASGYPGRTYRFYTGETVYAFGDGLSYTKFSHTLVKAPSLVSLGLEENHVCRSSECQSLDAIGPHCENAVSGGGSAFEVHIKVRNGGDREGIHTVFLFTTPPAIHGSPRKHLVGFEKIRLGKREEAVVRFKVEICKDLSVVDEIGKRKIGLGKHLLHVGDLKHSLSIRI

SEQ ID NO: 46718 - protein, 339 aa, Arabidopsis thaliana
  peptide (1)..(339): Ceres Seq. ID no. 14310196
  misc_feature (1)..(199): Pfam Name: Glycosyl hydrolase family 3 C terminal domain Pfam Description: Glycosyl hydrolase family 3 C terminal domain
  misc_feature (1)..(339): Homolog of NCBI NO: 34894432 NR Description: putative beta-xylosidase [Oryza sativa (japonica
  misc_feature (1)..(337): Homolog of NCBI NO: 38346629 NR Description: OSJNBa0074L08.23 [Oryza sativa (japonica
  misc_feature (1)..(338): Homolog of NCBI NO: 25518461 NR Description: hypothetical protein T14P4.8 - Arabidopsis
  misc_feature (1)..(338): Homolog of NCBI NO: 18378991 NR Description: glycosyl hydrolase family 3 [Arabidopsis
  misc_feature (1)..(339): Homolog of NCBI NO: 25453520 NR Description: beta-1,4-xylosidase [imported] - Arabidopsis
  misc_feature (1)..(339): Homolog of NCBI NO: 15230897 NR Description: glycosyl hydrolase family 3 [Arabidopsis thaliana]
  misc_feature (1)..(339): Homolog of NCBI NO: 32481073 NR Description: auxin-induced beta-glucosidase [Chenopodium
  misc_feature (1)..(338): Homolog of NCBI NO: 15239867 NR Description: glycosyl hydrolase family 3 [Arabidopsis
  misc_feature (1)..(339): Homolog of NCBI NO: 18025340 NR Description: alpha-L-arabinofuranosidase/beta-D-xylosidase
  misc_feature (1)..(339): Homolog of NCBI NO: 38344900 NR Description: OSJNBb0079B02.3 [Oryza sativa (japonica
MIGNYEGTPCKYTTPLQGLAGTVSTTYLPGCSNVACAVADVAGATKLAATADVSVLVIGADQSIEAESRDRVDLHLPGQQQELVIQVAKAAKGPVLLVIMSGGGFDITFAKNDPKIAGILWVGYPGEAGGIAIADIIFGRYNPSGKLPMTWYPQSYVEKVPMTIMNMRPDKASGYPGRTYRFYTGETVYAFGDGLSYTKFSHTLVKAPSLVSLGLEENHVCRSSECQSLDAIGPHCENAVSGGGSAFEVHIKVRNGGDREGIHTVFLFTTPPAIHGSPRKHLVGFEKIRLGKREEAVVRFKVEICKDLSVVDEIGKRKIGLGKHLLHVGDLKHSLSIRI

SEQ ID NO: 46719 - protein, 320 aa, Arabidopsis thaliana
  peptide (1)..(320): Ceres Seq. ID no. 14310197
  misc_feature (31)..(313): Homolog of NCBI NO: 34894432 NR Description: putative beta-xylosidase [Oryza sativa (japonica
  misc_feature (22)..(313): Homolog of NCBI NO: 38346629 NR Description: OSJNBa0074L08.23 [Oryza sativa (japonica
  misc_feature (5)..(315): Homolog of NCBI NO: 25518461 NR Description: hypothetical protein T14P4.8 - Arabidopsis
  misc_feature (5)..(315): Homolog of NCBI NO: 18378991 NR Description: glycosyl hydrolase family 3 [Arabidopsis
  misc_feature (8)..(315): Homolog of NCBI NO: 25453520 NR Description: beta-1,4-xylosidase [imported] - Arabidopsis
  misc_feature (8)..(315): Homolog of NCBI NO: 15230897 NR Description: glycosyl hydrolase family 3 [Arabidopsis thaliana]
  misc_feature (7)..(315): Homolog of NCBI NO: 32481073 NR Description: auxin-induced beta-glucosidase [Chenopodium
  misc_feature (5)..(315): Homolog of NCBI NO: 15239867 NR Description: glycosyl hydrolase family 3 [Arabidopsis
  misc_feature (18)..(315): Homolog of NCBI NO: 18025340 NR Description: alpha-L-arabinofuranosidase/beta-D-xylosidase
  misc_feature (16)..(315): Homolog of NCBI NO: 38344900 NR Description: OSJNBb0079B02.3 [Oryza sativa (japonica
SSVYLIFLCFFLYFLNFSNAQSSPVFACDVAANPSLAAYGFCNTVLKIEYRVADLVARLTLQEKIGFLVSKANGVTRLGIPTYEWWSEALHGVSYIGPGTHFSSQVPGATSFPQVILTAASFNVSLFQAIGKVVSTEARAMYNVGLAGLTYWSPNVNIFRDPRWGRGQETPGEDPLLASKYASGYVKGLQETDGGDSNRLKVAACCKHYTAYDVDNWKGVERYSFNAVVTQQDMDDTYQPPFKSCVVDGNVASVMCSYNQVNGKPTCADPDLLSGVIRGEWKLNGYIVSDCDSVDVLYKNQHYTKTPAEAAAISILEVWI

SEQ ID NO: 46720 - DNA, 2477 bp, Arabidopsis thaliana
  misc_feature (1)..(2477): Ceres Seq. ID no. 12574674
  misc_feature: MA Experiment ID: 20000180 Result: Down-regulated in Transcription
  misc_feature: MA Experiment 20000180 PARAMETER Experiment Name: At_Germinating_Seeds_P Parameter: Age (hr) Value: 24 vs. 0
  misc_feature: MA Experiment 20000180 PARAMETER Experiment Name: At_Germinating_Seeds_P Parameter: Tissue Value: Germinating Seeds
aataaaacacgatttcatgagagaaaatcgacaaaacccctctcaaccaaataatacaccttcttcttcttcttcttcttcttcttcttcacagctgggtttcttctaatggcggaaccgattccctcatcgtctctgtcaccgaaatctctacaatctcctaatcctatggaaccttctcctgcatcttctactcctttaccttcatcatcatctcaacaacaacaactcatgacagctccgatttccaattctgttaattccgctgcgtctccggcgatgactgtaactaccaccgaaggtattgtaattcagaacaattcgcaacctaacatctcctctcccaaccctacttcttctaacccaccaatcggagctcagatcccgtcgccttctcctctctctcacccttcttcatctttagatcagcaaacacagactcagcaactcgttcaacaaactcagcaattgcctcaacaacaacaacagattatgcagcaaatctcttcatctccgattccacaattatcgccgcaacagcaacagattctgcagcaacaacacatgacttcacagcaaatcccaatgtcgagttaccaaattgctcaatctcttcagcgatccccttctctttctcgcctgagccaaattcagcaacaacagcagcagcagcatcaaggtcaatacggcaacgtgttgagacagcaagctggtttgtacggaaccatgaactttggtggctcaggttcagttcaacagagccagcagaatcagcagatggttaaccctaatatgtccagagcaggtttagttggccaaagcggtcacttgcctatgcttaacggtgctgctggagctgctcagatgaatattcaaccccaattattggctgcttcgccgaggcagaaatctggcatggttcaaggttcgcagtttcatccgggaagttctggacaacagttacaagggatgcaagctatgggaatgatgggatcactgaatttgacctcgcaaatgagaggtaaccctgctctctatgcgcagcagagaatcaacccggggcagatgagacagcaattgtcacagcaaaacgctcttacttcacctcaggtccagaacctccagagaacatcttctctcgcatttatgaatcctcagctatcgggtttggcccagaatggacaagctggcatgatgcaaaactctttgtcacagcagcaatggctgaagcaaatgtcgggaataacgagccccaattcattccgactccaaccgagtcaaagacaggctcttctcttacagcagcagcagcagcaacaacaacaactgtcctctcctcagttacatcaatcttctatgtccttgaatcagcagcagatatcacagataatacaacagcagcagcaacaatcacaattaggccagtcgcagatgaaccaatcccattcccaacaacaactacaacagatgcagcagcaactacagcagcaaccacaacagcagatgcagcagcagcagcaacaacaacagcaaatgcagattaatcaacaacagccatctccaaggatgttgagtcatgcaggacaaaaatctgtcagtttaacgggttcacaaccagaggctacacaatcgggtacaacaacaccaggtggtagctcaagccagggaacagaagcaacaaaccaactccttggtaaaaggaagatacaggatctggtttcgcaggtggatgtacatgcgaaactggatcctgatgttgaagacctccttttggaggtggcagatgacttcattgattcggtcacatcttttgcatgtagcttggctaagcatcgtaaatcatctgtattggagcccaaggatatattactccacctagagaaaaacttgcacttgacaattcctggattctcaagtgaggataaacgtcaaacaaaaactgtaccaactgatctccacaagaagcgacttgcaatggtgcgtgcattactagaatcctcaaaaccagagacgaatgcaagcaattccaaggaaactatgagacaagcgatggtgaacccaaatggtccgaatcatctcttaagaccctcccaaagttcagaacaattggtttcgcagacatccggtcctcacatattacaacacatgacacgatactaaaggacttgaatatagaagcctgagccagctctcactgctatgttcatcttcttggttgcaggagtttacacatctatggagagttgaaggcacaagtagtgaaactgtatgtattatatataaaattcatgagtcttataggcaatcaaataatacagttatttttttcgtagttgtgggactttctaactatttcgtcttcttttttagtgggtttttgttttttccttttgtaattttagttgtcctctccattttaagcttgaaagttttagctctttgatgactcagcagttgatgatatgttaaatgatgtc

SEQ ID NO: 46721 - protein, 683 aa, Arabidopsis thaliana [sequence omitted]

SEQ ID NO: 46722 - protein, 663 aa, Arabidopsis thaliana
  peptide (1)..(663): Ceres Seq. ID no. 12574676
  misc_feature (509)..(576): Pfam Name: Transcription initiation factor TFIID subunit A Pfam Description: Transcription initiation factor TFIID subunit A
  misc_feature (17)..(421): Homolog of NCBI NO: 28850409 NR Description: similar to Dictyostelium discoideum (Slime mold).
  misc_feature (1)..(464): Homolog of NCBI NO: 28828998 NR Description: similar to Dictyostelium discoideum (Slime mold).
  misc_feature (1)..(482): Homolog of NCBI NO: 23480318 NR Description: Drosophila melanogaster CG8797 gene
  misc_feature (4)..(483): Homolog of NCBI NO: 28828998 NR Description: similar to Dictyostelium discoideum (Slime mold).
  misc_feature (1)..(508): Homolog of NCBI NO: 23480318 NR Description: Drosophila melanogaster CG8797 gene
  misc_feature (1)..(503): Homolog of NCBI NO: 24664026 NR Description: CG32133-PA [Drosophila melanogaster]
  misc_feature (1)..(462): Homolog of NCBI NO: 24664026 NR Description: CG32133-PA [Drosophila melanogaster]
  misc_feature (210)..(633): Homolog of NCBI NO: 18398741 NR Description: conserved hypothetical protein
  misc_feature (450)..(570): Homolog of NCBI NO: 34908268 NR Description: P0446B05.23 [Oryza sativa (japonica
  misc_feature (64)..(428): Homolog of NCBI NO: 34908268 NR Description: P0446B05.23 [Oryza sativa (japonica
MEPSPASSTPLPSSSSQQQQLMTAPISNSVNSAASPAMTVTTTEGIVIQNNSQPNISSPNPTSSNPPIGAQIPSPSPLSHPSSSLDQQTQTQQLVQQTQQLPQQQQQIMQQISSSPIPQLSPQQQQILQQQHMTSQQIPMSSYQIAQSLQRSPSLSRLSQIQQQQQQQHQGQYGNVLRQQAGLYGTMNFGGSGSVQQSQQNQQMVNPNMSRAGLVGQSGHLPMLNGAAGAAQMNIQPQLLAASPRQKSGMVQGSQFHPGSSGQQLQGMQAMGMMGSLNLTSQMRGNPALYAQQRINPGQMRQQLSQQNALTSPQVQNLQRTSSLAFMNPQLSGLAQNGQAGMMQNSLSQQQWLKQMSGITSPNSFRLQPSQRQALLLQQQQQQQQQLSSPQLHQSSMSLNQQQISQIIQQQQQQSQLGQSQMNQSHSQQQLQQMQQQLQQQPQQQMQQQQQQQQQMQINQQQPSPRMLSHAGQKSVSLTGSQPEATQSGTTTPGGSSSQGTEATNQLLGKRKIQDLVSQVDVHAKLDPDVEDLLLEVADDFIDSVTSFACSLAKHRKSSVLEPKDILLHLEKNLHLTIPGFSSEDKRQTKTVPTDLHKKRLAMVRALLESSKPETNASNSKETMRQAMVNPNGPNHLLRPSQSSEQLVSQTSGPHILQHMTRY

SEQ ID NO: 46723 - protein, 642 aa, Arabidopsis thaliana
  peptide (1)..(642): Ceres Seq. ID no. 12574677
  misc_feature (488)..(555): Pfam Name: Transcription initiation factor TFIID subunit A Pfam Description: Transcription initiation factor TFIID subunit A
  misc_feature (1)..(400): Homolog of NCBI NO: 28850409 NR Description: similar to Dictyostelium discoideum (Slime mold).
  misc_feature (1)..(443): Homolog of NCBI NO: 28828998 NR Description: similar to Dictyostelium discoideum (Slime mold).
  misc_feature (1)..(461): Homolog of NCBI NO: 23480318 NR Description: Drosophila melanogaster CG8797 gene
  misc_feature (1)..(462): Homolog of NCBI NO: 28828998 NR Description: similar to Dictyostelium discoideum (Slime mold).
  misc_feature (1)..(487): Homolog of NCBI NO: 23480318 NR Description: Drosophila melanogaster CG8797 gene
  misc_feature (1)..(482): Homolog of NCBI NO: 24664026 NR Description: CG32133-PA [Drosophila melanogaster]
  misc_feature (1)..(441): Homolog of NCBI NO: 24664026 NR Description: CG32133-PA [Drosophila melanogaster]
  misc_feature (189)..(612): Homolog of NCBI NO: 18398741 NR Description: conserved hypothetical protein
  misc_feature (429)..(549): Homolog of NCBI NO: 34908268 NR Description: P0446B05.23 [Oryza sativa (japonica
  misc_feature (43)..(407): Homolog of NCBI NO: 34908268 NR Description: P0446B05.23 [Oryza sativa (japonica
MTAPISNSVNSAASPAMTVTTTEGIVIQNNSQPNISSPNPTSSNPPIGAQIPSPSPLSHPSSSLDQQTQTQQLVQQTQQLPQQQQQIMQQISSSPIPQLSPQQQQILQQQHMTSQQIPMSSYQIAQSLQRSPSLSRLSQIQQQQQQQHQGQYGNVLRQQAGLYGTMNFGGSGSVQQSQQNQQMVNPNMSRAGLVGQSGHLPMLNGAAGAAQMNIQPQLLAASPRQKSGMVQGSQFHPGSSGQQLQGMQAMGMMGSLNLTSQMRGNPALYAQQRINPGQMRQQLSQQNALTSPQVQNLQRTSSLAFMNPQLSGLAQNGQAGMMQNSLSQQQWLKQMSGITSPNSFRLQPSQRQALLLQQQQQQQQQLSSPQLHQSSMSLNQQQISQIIQQQQQQSQLGQSQMNQSHSQQQLQQMQQQLQQQPQQQMQQQQQQQQQMQINQQQPSPRMLSHAGQKSVSLTGSQPEATQSGTTTPGGSSSQGTEATNQLLGKRKIQDLVSQVDVHAKLDPDVEDLLLEVADDFIDSVTSFACSLAKHRKSSVLEPKDILLHLEKNLHLTIPGFSSEDKRQTKTVPTDLHKKRLAMVRALLESSKPETNASNSKETMRQAMVNPNGPNHLLRPSQSSEQLVSQTSGPHILQHMTRY

SEQ ID NO: 46724 - DNA, 2009 bp, Arabidopsis thaliana
  misc_feature (1)..(2009): Ceres Seq. ID no. 13591952
  misc_feature: MA Experiment ID: 20000234 Result: Up-regulated in Transcription
  misc_feature: MA Experiment 20000234 PARAMETER Experiment Name: At_Siliques_P Parameter: Age (day) Value: 21
  misc_feature: MA Experiment 20000234 PARAMETER Experiment Name: At_Siliques_P Parameter: Organism Value: A. thaliana
  misc_feature: MA Experiment 20000234 PARAMETER Experiment Name: At_Siliques_P Parameter: Plant Line Value: WS
  misc_feature: MA Experiment 20000234 PARAMETER Experiment Name: At_Siliques_P Parameter: Tissue Value: Less Than 5mm Siliques vs. Whole Plant
  misc_feature: MA Experiment ID: 20000235 Result: Up-regulated in Transcription
  misc_feature: MA Experiment 20000235 PARAMETER Experiment Name: At_Siliques_P Parameter: Age (day) Value: 21
  misc_feature: MA Experiment 20000235 PARAMETER Experiment Name: At_Siliques_P Parameter: Organism Value: A. thaliana
  misc_feature: MA Experiment 20000235 PARAMETER Experiment Name: At_Siliques_P Parameter: Plant Line Value: WS
  misc_feature: MA Experiment 20000235 PARAMETER Experiment Name: At_Siliques_P Parameter: Tissue Value: 5-10mm Siliques vs. Whole Plant
  misc_feature: MA Experiment ID: 20000264 Result: Up-regulated in Transcription
  misc_feature: MA Experiment 20000264 PARAMETER Experiment Name: At_Open_Flower_P Parameter: Age (day) Value: 21
  misc_feature: MA Experiment 20000264 PARAMETER Experiment Name: At_Open_Flower_P Parameter: Plant Line Value: WS
  misc_feature: MA Experiment 20000264 PARAMETER Experiment Name: At_Open_Flower_P Parameter: Tissue Value: Open Flower vs. Whole Plant
  misc_feature: MA Experiment ID: 20000286 Result: Up-regulated in Transcription
  misc_feature: MA Experiment 20000286 PARAMETER Experiment Name: At_Open_Flower_P Parameter: Age (day) Value: 21
  misc_feature: MA Experiment 20000286 PARAMETER Experiment Name: At_Open_Flower_P Parameter: Plant Line Value: WS
  misc_feature: MA Experiment 20000286 PARAMETER Experiment Name: At_Open_Flower_P Parameter: Tissue Value: Half Open vs. Whole Plant
  misc_feature: MA Experiment ID: 20000437 Result: Down-regulated in Transcription
  misc_feature: MA Experiment 20000437 PARAMETER Experiment Name: At_Drought_P Parameter: Age (day) Value: 8
  misc_feature: MA Experiment 20000437 PARAMETER Experiment Name: At_Drought_P Parameter: Organism Value: A. thaliana
  misc_feature: MA Experiment 20000437 PARAMETER Experiment Name: At_Drought_P Parameter: Plant Line Value: WS
  misc_feature: MA Experiment 20000437 PARAMETER Experiment Name: At_Drought_P Parameter: Timepoint (hr) Value: 24
  misc_feature: MA Experiment 20000437 PARAMETER Experiment Name: At_Drought_P Parameter: Tissue Value: Whole Plant
  misc_feature: MA Experiment 20000437 PARAMETER Experiment Name: At_Drought_P Parameter: Treatment Value: Drought vs. No Drought
  misc_feature: MA Experiment ID: 20000439 Result: Up-regulated in Transcription
  misc_feature: MA Experiment 20000439 PARAMETER Experiment Name: At_Roots__P Parameter: Age (day) Value: 14 vs. 21
  misc_feature: MA Experiment 20000439 PARAMETER Experiment Name: At_Roots__P Parameter: Organism Value: A. thaliana
  misc_feature: MA Experiment 20000439 PARAMETER Experiment Name: At_Roots__P Parameter: Tissue Value: Roots vs. Whole Plant
  misc_feature: MA Experiment ID: 20000453 Result: Down-regulated in Transcription
  misc_feature: MA Experiment 20000453 PARAMETER Experiment Name: At_100uM_ABA_P Parameter: Age (day) Value: 15
  misc_feature: MA Experiment 20000453 PARAMETER Experiment Name: At_100uM_ABA_P Parameter: Organism Value: A. thaliana
  misc_feature: MA Experiment 20000453 PARAMETER Experiment Name: At_100uM_ABA_P Parameter: Plant Line Value: WS
  misc_feature: MA Experiment 20000453 PARAMETER Experiment Name: At_100uM_ABA_P Parameter: Timepoint (hr) Value: 24
  misc_feature: MA Experiment 20000453 PARAMETER Experiment Name: At_100uM_ABA_P Parameter: Tissue Value: Aerial
  misc_feature: MA Experiment 20000453 PARAMETER Experiment Name: At_100uM_ABA_P Parameter: Treatment Value: 100uM ABA vs. No Treatment
  misc_feature: MA Experiment ID: 20001450 Result: Down-regulated in Transcription
  misc_feature: MA Experiment 20001450 PARAMETER Experiment Name: At_Far-red-induction_P Parameter: Age (day) Value: 7
  misc_feature: MA Experiment 20001450 PARAMETER Experiment Name: At_Far-red-induction_P Parameter: Light Value: Far-red vs. White
  misc_feature: MA Experiment 20001450 PARAMETER Experiment Name: At_Far-red-induction_P Parameter: Organism Value: A. thaliana
  misc_feature: MA Experiment 20001450 PARAMETER Experiment Name: At_Far-red-induction_P Parameter: Plant Line Value: Columbia
  misc_feature: MA Experiment 20001450 PARAMETER Experiment Name: At_Far-red-induction_P Parameter: Timepoint (hr) Value: 8
  misc_feature: MA Experiment 20001450 PARAMETER Experiment Name: At_Far-red-induction_P Parameter: Tissue Value: Whole Plant
  misc_feature: MA Experiment ID: 20001451 Result: Down-regulated in Transcription
  misc_feature: MA Experiment 20001451 PARAMETER Experiment Name: At_Far-red-induction_P Parameter: Age (day) Value: 7
  misc_feature: MA Experiment 20001451 PARAMETER Experiment Name: At_Far-red-induction_P Parameter: Light Value: Far-red vs. White
  misc_feature: MA Experiment 20001451 PARAMETER Experiment Name: At_Far-red-induction_P Parameter: Organism Value: A. thaliana
  misc_feature: MA Experiment 20001451 PARAMETER Experiment Name: At_Far-red-induction_P Parameter: Plant Line Value: Columbia
  misc_feature: MA Experiment 20001451 PARAMETER Experiment Name: At_Far-red-induction_P Parameter: Timepoint (hr) Value: 24
  misc_feature: MA Experiment 20001451 PARAMETER Experiment Name: At_Far-red-induction_P Parameter: Tissue Value: Whole Plant
  misc_feature: MA Experiment ID: 20001557 Result: Up-regulated in Transcription
  misc_feature: MA Experiment 20001557 PARAMETER Experiment Name: At_Drought_Soil_Dry_P Parameter: Age (day) Value: 27
  misc_feature: MA Experiment 20001557 PARAMETER Experiment Name: At_Drought_Soil_Dry_P Parameter: Organism Value: A. thaliana
  misc_feature: MA Experiment 20001557 PARAMETER Experiment Name: At_Drought_Soil_Dry_P Parameter: Plant Line Value: WS
  misc_feature: MA Experiment 20001557 PARAMETER Experiment Name: At_Drought_Soil_Dry_P Parameter: Post Timepoint (hr) Value: 3
  misc_feature: MA Experiment 20001557 PARAMETER Experiment Name: At_Drought_Soil_Dry_P Parameter: Post-Treatment Value: Re-Water vs. No Drought
  misc_feature: MA Experiment 20001557 PARAMETER Experiment Name: At_Drought_Soil_Dry_P Parameter: Timepoint (day) Value: 13
  misc_feature: MA Experiment 20001557 PARAMETER Experiment Name: At_Drought_Soil_Dry_P Parameter: Treatment Value: Drought vs. No Drought
  misc_feature: MA Experiment ID: 20001558 Result: Up-regulated in Transcription
  misc_feature: MA Experiment 20001558 PARAMETER Experiment Name: At_Drought_Soil_Dry_P Parameter: Age (day) Value: 27
  misc_feature: MA Experiment 20001558 PARAMETER Experiment Name: At_Drought_Soil_Dry_P Parameter: Organism Value: A. thaliana
  misc_feature: MA Experiment 20001558 PARAMETER Experiment Name: At_Drought_Soil_Dry_P Parameter: Plant Line Value: WS
  misc_feature: MA Experiment 20001558 PARAMETER Experiment Name: At_Drought_Soil_Dry_P Parameter: Post Timepoint (hr) Value: 6
  misc_feature: MA Experiment 20001558 PARAMETER Experiment Name: At_Drought_Soil_Dry_P Parameter: Post-Treatment Value: Re-Water vs. No Drought
  misc_feature: MA Experiment 20001558 PARAMETER Experiment Name: At_Drought_Soil_Dry_P Parameter: Timepoint (day) Value: 13
  misc_feature: MA Experiment 20001558 PARAMETER Experiment Name: At_Drought_Soil_Dry_P Parameter: Treatment Value: Drought vs. No Drought
atttctctgaagccgttgtgttctcttattgccgccaccaccaccatgtgtgggattctcgctgtgttaggctgcgtcgataactctcaagctaaacgttcccgtatcatcgaactctctcgcagattgaggcatagaggtcctgactggagtggtctacattgttatgaggattgttatttggctcatgagcgtttggctatcgttgaccccacttctggagatcaaccactctataacgaagataagaccattgctgtcacggtcaatggagagatttacaaccacaaggctttgcgtgaaaatttgaagtctcaccaattccgtactgggagtgattgtgaagtgattgcccatctttacgaagaacatggagaggaatttgtcgacatgttggatggcatgtttgcatttgtgcttcttgatacccgagacaaaagctttattgctgcaagggatgccattggtatcactccactctacatcgggtggggtctcgatggttctgtttggtttgcttccgagatgaaagcacttagtgatgattgtgagcagtttatgtgcttccccccaggccacatctattcaagtaaacaaggtgggcttaggaggtggtacaaccccccgtggttctctgaggttgttccttcaaccccatatgatcccctagtggtgcgcaatacttttgagaaggctgttataaaacgactaatgactgatgtgccttttggtgtcctcctatctggtggattagattcatcccttgttgcttcagtagcattacgccatctggaaaaatcagaagctgcttgtcagtggggttcaaagttgcacacattttgtatcggtttgaagggatccccggatcttaaagctggcagagaagtcgctgactatttaggaactcgccaccacgagttacactttacagttcaggacggaatagatgccatagaagaagtcatctaccatgttgagacctatgatgtgactactattagagccagcactccaatgtttcttatgtcgcgaaaaatcaaatcgcttggtgtaaagatggttctttctggggaaggctctgatgaaatttttggaggatatttgtacttccataaagctcccaacaagaaggaatttcatgaggaaacatgtcgaaagatcaaagctcttcatcaatatgactgcttgagggctaacaaatcaacttctgcatggggtgttgaggctcgtgtacctttcctcgataaagaatttataaatgtcgcaatgagcatcgatccagagtggaagatgattaggcctgatttgggaaggatcgagaaatgggtgttacgcaatgcctttgatgatgagaaaaatccttacctaccaaagcacattctatataggcagaaagaacagttcagtgatggagttggatacagctggattgatggtctaaaagatcatgcaaacaaacatgtctctgagacaatgctgatgaacgcaagctttgtcttccctgataacacacctttgacaaaagaagcttactactacagaaccatctttgaaaagttcttccctaagagtgctgctagagcaactgtaccaggaggtccaagtgtggcatgtagcacagcaaaagctgtggaatgggacgcagcttggtcacagaatcttgacccatcaggtcgtgcggctcttggagttcatgtttcagcttatggggaagataaaaccgaagattctcgtcccgagaagctacagaaactagcagagaagactccagccattgtttgaggataaacaaacaaggtttcagctaatgttgaatcgtgcaatactcttattgtctcaaagacaatagatatcctcttctataggttctaaaaaggctttctttttttcttgttttctggggttctttggatgtgtacctaataagttcctggtgaatttctgtgtttagtgttattagacaatccatgaaagcttgatacttcagattatgaacgttatttttcatg

SEQ ID NO: 46725 - protein, 593 aa, Arabidopsis thaliana
  peptide (1)..(593): Ceres Seq. ID no. 13591953
  misc_feature (208)..(531): Pfam Name: Asparagine synthase Pfam Description: Asparagine synthase
  misc_feature (208)..(531): Pfam Name: Asparagine synthase Pfam Description: Asparagine synthase
  misc_feature (16)..(573): Homolog of NCBI NO: 39939080 NR Description: asparagine synthase [Onion yellows phytoplasma]
  misc_feature (16)..(569): Homolog of NCBI NO: 26246639 NR Description: Asparagine synthetase B
  misc_feature (16)..(572): Homolog of NCBI NO: 13925886 NR Description: glutamine-dependent asparagine synthetase 1
  misc_feature (16)..(585): Homolog of NCBI NO: 3821280 NR Description: asparagine synthetase type II [Phaseolus vulgaris]
  misc_feature (16)..(579): Homolog of NCBI NO: 22208544 NR Description: asparagine synthetase 2 [Striga hermonthica]
  misc_feature (16)..(573): Homolog of NCBI NO: 39939080 NR Description: asparagine synthase [Onion yellows phytoplasma]
  misc_feature (16)..(572): Homolog of NCBI NO: 13925886 NR Description: glutamine-dependent asparagine synthetase 1
  misc_feature (16)..(579): Homolog of NCBI NO: 22208544 NR Description: asparagine synthetase 2 [Striga hermonthica]
  misc_feature (16)..(573): Homolog of NCBI NO: 30698086 NR Description: asparagine synthetase (gb|AAC72837.1)
  misc_feature (16)..(573): Homolog of NCBI NO: 3859536 NR Description: asparagine synthetase [Arabidopsis thaliana]
  misc_feature (16)..(573): Homolog of NCBI NO: 30698088 NR Description: asparagine synthetase (gb|AAC72837.1)
  misc_feature (16)..(577): Homolog of NCBI NO: 3182921 NR Description: Asparagine synthetase
  misc_feature (16)..(573): Homolog of NCBI NO: 6049843 NR Description: asparagine synthetase [Helianthus annuus]
  misc_feature (16)..(585): Homolog of NCBI NO: 3821280 NR Description: asparagine synthetase type II [Phaseolus vulgaris]
  misc_feature (16)..(569): Homolog of NCBI NO: 26246639 NR Description: Asparagine synthetase B
  misc_feature (16)..(573): Homolog of NCBI NO: 6049843 NR Description: asparagine synthetase [Helianthus annuus]
  misc_feature (16)..(577): Homolog of NCBI NO: 3182921 NR Description: Asparagine synthetase
  misc_feature (16)..(573): Homolog of NCBI NO: 30698088 NR Description: asparagine synthetase (gb|AAC72837.1)
  misc_feature (16)..(573): Homolog of NCBI NO: 3859536 NR Description: asparagine synthetase [Arabidopsis thaliana]
  misc_feature (16)..(573): Homolog of NCBI NO: 30698086 NR Description: asparagine synthetase (gb|AAC72837.1)
ISLKPLCSLIAATTTMCGILAVLGCVDNSQAKRSRIIELSRRLRHRGPDWSGLHCYEDCYLAHERLAIVDPTSGDQPLYNEDKTIAVTVNGEIYNHKALRENLKSHQFRTGSDCEVIAHLYEEHGEEFVDMLDGMFAFVLLDTRDKSFIAARDAIGITPLYIGWGLDGSVWFASEMKALSDDCEQFMCFPPGHIYSSKQGGLRRWYNPPWFSEVVPSTPYDPLVVRNTFEKAVIKRLMTDVPFGVLLSGGLDSSLVASVALRHLEKSEAACQWGSKLHTFCIGLKGSPDLKAGREVADYLGTRHHELHFTVQDGIDAIEEVIYHVETYDVTTIRASTPMFLMSRKIKSLGVKMVLSGEGSDEIFGGYLYFHKAPNKKEFHEETCRKIKALHQYDCLRANKSTSAWGVEARVPFLDKEFINVAMSIDPEWKMIRPDLGRIEKWVLRNAFDDEKNPYLPKHILYRQKEQFSDGVGYSWIDGLKDHANKHVSETMLMNASFVFPDNTPLTKEAYYYRTIFEKFFPKSAARATVPGGPSVACSTAKAVEWDAAWSQNLDPSGRAALGVHVSAYGEDKTEDSRPEKLQKLAEKTPAIV

SEQ ID NO: 46726 - protein, 578 aa, Arabidopsis thaliana
  peptide (1)..(578): Ceres Seq. ID no. 13591954
  misc_feature (193)..(516): Pfam Name: Asparagine synthase Pfam Description: Asparagine synthase
  misc_feature (193)..(516): Pfam Name: Asparagine synthase Pfam Description: Asparagine synthase
  misc_feature (1)..(558): Homolog of NCBI NO: 39939080 NR Description: asparagine synthase [Onion yellows phytoplasma]
  misc_feature (1)..(554): Homolog of NCBI NO: 26246639 NR Description: Asparagine synthetase B
  misc_feature (1)..(557): Homolog of NCBI NO: 13925886 NR Description: glutamine-dependent asparagine synthetase 1
  misc_feature (1)..(570): Homolog of NCBI NO: 3821280 NR Description: asparagine synthetase type II [Phaseolus vulgaris]
  misc_feature (1)..(564): Homolog of NCBI NO: 22208544 NR Description: asparagine synthetase 2 [Striga hermonthica]
  misc_feature (1)..(558): Homolog of NCBI NO: 39939080 NR Description: asparagine synthase [Onion yellows phytoplasma]
  misc_feature (1)..(557): Homolog of NCBI NO: 13925886 NR Description: glutamine-dependent asparagine synthetase 1
  misc_feature (1)..(564): Homolog of NCBI NO: 22208544 NR Description: asparagine synthetase 2 [Striga hermonthica]
  misc_feature (1)..(558): Homolog of NCBI NO: 30698086 NR Description: asparagine synthetase (gb|AAC72837.1)
  misc_feature (1)..(558): Homolog of NCBI NO: 3859536 NR Description: asparagine synthetase [Arabidopsis thaliana]
  misc_feature (1)..(558): Homolog of NCBI NO: 30698088 NR Description: asparagine synthetase (gb|AAC72837.1)
  misc_feature (1)..(562): Homolog of NCBI NO: 3182921 NR Description: Asparagine synthetase
  misc_feature (1)..(558): Homolog of NCBI NO: 6049843 NR Description: asparagine synthetase [Helianthus annuus]
  misc_feature (1)..(570): Homolog of NCBI NO: 3821280 NR Description: asparagine synthetase type II [Phaseolus vulgaris]
  misc_feature (1)..(554): Homolog of NCBI NO: 26246639 NR Description: Asparagine synthetase B
  misc_feature (1)..(558): Homolog of NCBI NO: 6049843 NR Description: asparagine synthetase [Helianthus annuus]
  misc_feature (1)..(562): Homolog of NCBI NO: 3182921 NR Description: Asparagine synthetase
  misc_feature (1)..(558): Homolog of NCBI NO: 30698088 NR Description: asparagine synthetase (gb|AAC72837.1)
  misc_feature (1)..(558): Homolog of NCBI NO: 3859536 NR Description: asparagine synthetase [Arabidopsis thaliana]
  misc_feature (1)..(558): Homolog of NCBI NO: 30698086 NR Description: asparagine synthetase (gb|AAC72837.1)
MCGILAVLGCVDNSQAKRSRIIELSRRLRHRGPDWSGLHCYEDCYLAHERLAIVDPTSGDQPLYNEDKTIAVTVNGEIYNHKALRENLKSHQFRTGSDCEVIAHLYEEHGEEFVDMLDGMFAFVLLDTRDKSFIAARDAIGITPLYIGWGLDGSVWFASEMKALSDDCEQFMCFPPGHIYSSKQGGLRRWYNPPWFSEVVPSTPYDPLVVRNTFEKAVIKRLMTDVPFGVLLSGGLDSSLVASVALRHLEKSEAACQWGSKLHTFCIGLKGSPDLKAGREVADYLGTRHHELHFTVQDGIDAIEEVIYHVETYDVTTIRASTPMFLMSRKIKSLGVKMVLSGEGSDEIFGGYLYFHKAPNKKEFHEETCRKIKALHQYDCLRANKSTSAWGVEARVPFLDKEFINVAMSIDPEWKMIRPDLGRIEKWVLRNAFDDEKNPYLPKHILYRQKEQFSDGVGYSWIDGLKDHANKHVSETMLMNASFVFPDNTPLTKEAYYYRTIFEKFFPKSAARATVPGGPSVACSTAKAVEWDAAWSQNLDPSGRAALGVHVSAYGEDKTEDSRPEKLQKLAEKTPAIV

SEQ ID NO: 46727 - protein, 463 aa, Arabidopsis thaliana
  peptide (1)..(463): Ceres Seq. ID no. 13591955
  misc_feature (78)..(401): Pfam Name: Asparagine synthase Pfam Description: Asparagine synthase
  misc_feature (78)..(401): Pfam Name: Asparagine synthase Pfam Description: Asparagine synthase
  misc_feature (1)..(443): Homolog of NCBI NO: 39939080 NR Description: asparagine synthase [Onion yellows phytoplasma]
  misc_feature (1)..(439): Homolog of NCBI NO: 26246639 NR Description: Asparagine synthetase B
  misc_feature (1)..(442): Homolog of NCBI NO: 13925886 NR Description: glutamine-dependent asparagine synthetase 1
  misc_feature (1)..(455): Homolog of NCBI NO: 3821280 NR Description: asparagine synthetase type II [Phaseolus vulgaris]
  misc_feature (1)..(449): Homolog of NCBI NO: 22208544 NR Description: asparagine synthetase 2 [Striga hermonthica]
  misc_feature (1)..(443): Homolog of NCBI NO: 39939080 NR Description: asparagine synthase [Onion yellows phytoplasma]
  misc_feature (1)..(442): Homolog of NCBI NO: 13925886 NR Description: glutamine-dependent asparagine synthetase 1
  misc_feature (1)..(449): Homolog of NCBI NO: 22208544 NR Description: asparagine synthetase 2 [Striga hermonthica]
  misc_feature (1)..(443): Homolog of NCBI NO: 30698086 NR Description: asparagine synthetase (gb|AAC72837.1)
  misc_feature (1)..(443): Homolog of NCBI NO: 3859536 NR Description: asparagine synthetase [Arabidopsis thaliana]
  misc_feature (1)..(443): Homolog of NCBI NO: 30698088 NR Description: asparagine synthetase (gb|AAC72837.1)
  misc_feature (1)..(447): Homolog of NCBI NO: 3182921 NR Description: Asparagine synthetase
  misc_feature (1)..(443): Homolog of NCBI NO: 6049843 NR Description: asparagine synthetase [Helianthus annuus]
  misc_feature (1)..(455): Homolog of NCBI NO: 3821280 NR Description: asparagine synthetase type II [Phaseolus vulgaris]
  misc_feature (1)..(439): Homolog of NCBI NO: 26246639 NR Description: Asparagine synthetase B
  misc_feature (1)..(443): Homolog of NCBI NO: 6049843 NR Description: asparagine synthetase [Helianthus annuus]
  misc_feature (1)..(447): Homolog of NCBI NO: 3182921 NR Description: Asparagine synthetase
  misc_feature (1)..(443): Homolog of NCBI NO: 30698088 NR Description: asparagine synthetase (gb|AAC72837.1)
  misc_feature (1)..(443): Homolog of NCBI NO: 3859536 NR Description: asparagine synthetase [Arabidopsis thaliana]
  misc_feature (1)..(443): Homolog of NCBI NO: 30698086 NR Description: asparagine synthetase (gb|AAC72837.1)
MLDGMFAFVLLDTRDKSFIAARDAIGITPLYIGWGLDGSVWFASEMKALSDDCEQFMCFPPGHIYSSKQGGLRRWYNPPWFSEVVPSTPYDPLVVRNTFEKAVIKRLMTDVPFGVLLSGGLDSSLVASVALRHLEKSEAACQWGSKLHTFCIGLKGSPDLKAGREVADYLGTRHHELHFTVQDGIDAIEEVIYHVETYDVTTIRASTPMFLMSRKIKSLGVKMVLSGEGSDEIFGGYLYFHKAPNKKEFHEETCRKIKALHQYDCLRANKSTSAWGVEARVPFLDKEFINVAMSIDPEWKMIRPDLGRIEKWVLRNAFDDEKNPYLPKHILYRQKEQFSDGVGYSWIDGLKDHANKHVSETMLMNASFVFPDNTPLTKEAYYYRTIFEKFFPKSAARATVPGGPSVACSTAKAVEWDAAWSQNLDPSGRAALGVHVSAYGEDKTEDSRPEKLQKLAEKTPAIV

SEQ ID NO: 46728 - DNA, 1094 bp, Arabidopsis thaliana
  misc_feature (1)..(1094): Ceres Seq. ID no. 13578657
  misc_feature: MA Experiment ID: 20000314 Result: Up-regulated in Transcription
  misc_feature: MA Experiment 20000314 PARAMETER Experiment Name: At_14day_Shoots-Roots_Sub_P Parameter: Age (day) Value: 14
  misc_feature: MA Experiment 20000314 PARAMETER Experiment Name: At_14day_Shoots-Roots_Sub_P Parameter: Organism Value: A. thaliana
  misc_feature: MA Experiment 20000314 PARAMETER Experiment Name: At_14day_Shoots-Roots_Sub_P Parameter: Plant Line Value: WS
  misc_feature: MA Experiment 20000314 PARAMETER Experiment Name: At_14day_Shoots-Roots_Sub_P Parameter: Tissue Value: Roots vs. Whole Plant
  misc_feature: MA Experiment ID: 20000315 Result: Up-regulated in Transcription
  misc_feature: MA Experiment 20000315 PARAMETER Experiment Name: At_14day_Shoots-Roots_Sub_P Parameter: Age (day) Value: 14
  misc_feature: MA Experiment 20000315 PARAMETER Experiment Name: At_14day_Shoots-Roots_Sub_P Parameter: Organism Value: A. thaliana
  misc_feature: MA Experiment 20000315 PARAMETER Experiment Name: At_14day_Shoots-Roots_Sub_P Parameter: Plant Line Value: WS
  misc_feature: MA Experiment 20000315 PARAMETER Experiment Name: At_14day_Shoots-Roots_Sub_P Parameter: Tissue Value: Shoots vs. Whole Plant
  misc_feature: MA Experiment ID: 20000328 Result: Up-regulated in Transcription
  misc_feature: MA Experiment 20000328 PARAMETER Experiment Name: At_42deg_Heat_Sub_P Parameter: Age (day) Value: 14
  misc_feature: MA Experiment 20000328 PARAMETER Experiment Name: At_42deg_Heat_Sub_P Parameter: Organism Value: A. thaliana
  misc_feature: MA Experiment 20000328 PARAMETER Experiment Name: At_42deg_Heat_Sub_P Parameter: Plant Line Value: WS
  misc_feature: MA Experiment 20000328 PARAMETER Experiment Name: At_42deg_Heat_Sub_P Parameter: Temperature (deg C) Value: 42 vs. 22
  misc_feature: MA Experiment 20000328 PARAMETER Experiment Name: At_42deg_Heat_Sub_P Parameter: Timepoint (hr) Value: 6
  misc_feature: MA Experiment 20000328 PARAMETER Experiment Name: At_42deg_Heat_Sub_P Parameter: Tissue Value: Aerial
  misc_feature: MA Experiment ID: 20000347 Result: Up-regulated in Transcription
  misc_feature: MA Experiment 20000347 PARAMETER Experiment Name: At_2mM_SA_Sub_P Parameter: Age (day) Value: 14
  misc_feature: MA Experiment 20000347 PARAMETER Experiment Name: At_2mM_SA_Sub_P Parameter: Organism Value: A. thaliana
  misc_feature: MA Experiment 20000347 PARAMETER Experiment Name: At_2mM_SA_Sub_P Parameter: Plant Line Value: WS
  misc_feature: MA Experiment 20000347 PARAMETER Experiment Name: At_2mM_SA_Sub_P Parameter: Timepoint (hr) Value: 6
  misc_feature: MA Experiment 20000347 PARAMETER Experiment Name: At_2mM_SA_Sub_P Parameter: Tissue Value: Aerial
  misc_feature: MA Experiment 20000347 PARAMETER Experiment Name: At_2mM_SA_Sub_P Parameter: Treatment Value: 2mM SA vs. No Treatment
gggatatcgtcgtcatttctctatcttgaataaagtaccgataatgacctcaaccaatccggtggtcgccgaagtaataccggcggaaacttctacagatgctacagagacgacgattgcaacgacggaagctggtgaagcaccggagaagaaggtgaggaaagcttacacaatcaccaagtctagagagagttggactgaaggagaacacgacaagtttctggaagctcttcaattgtttgatcgtgactggaaaaagatagaagattttgttggttcaaagacagttattcagatcaggagccatgcccaaaaatactttctaaaggtccaaaaaaatgggactttagcacatgttccaccccctaggcctaagcgcaaagctgctcatccatatcctcaaaaggcatcgaaaaatgctcaaatgtcgcttcacgtttccatgtcctttcctactcaaataaataacctgcctggatatactccatgggatgatgatacatctgcattgttaaacattgctgtaagtggggttattccaccagaagatgaacttgatactctttgtggagcagaagttgatgttggatcaaatgacatgataagtgaaactagtccttcagcatctggtatcggaagctcaagcagaacactatcagattctaagggtttgagactggcgaaacaagctccctcaatgcatggtcttcctgattttgctgaggtttataacttcattgggagtgtgttcgatcctgacagcaaaggccgcatgaaaaagctcaaggaaatggatcctataaatttcgaaactgttttgctgttgatgagaaacctcacagtgaacttgtcaaaccctgactttgaacctacttctgaatatgttgatgctgcagaggaaggtcatgaacacttaagctcttagctgtttgtgcactcaacaagttatatatcttcttgacgacttcttgctcgcaacaactctctaccagctatcaaatgcattctacggttgttgtctgaggagaacataactgagtcgtcgtcacaaacaagaggaacatatgcagtttcggtcagaaccagtcgtgtga

SEQ ID NO: 46729 - protein, 307 aa, Arabidopsis thaliana
  peptide (1)..(307): Ceres Seq. ID no. 13578658
  misc_feature (62)..(107): Pfam Name: Myb-like DNA-binding domain Pfam Description: Myb-like DNA-binding domain
  misc_feature (15)..(138): Homolog of NCBI NO: 2505876 NR Description: MYB-related protein [Arabidopsis thaliana]
  misc_feature (17)..(139): Homolog of NCBI NO: 6682239 NR Description: putative MYB-related protein [Arabidopsis
  misc_feature (31)..(288): Homolog of NCBI NO: 15234118 NR Description: myb family transcription factor [Arabidopsis
  misc_feature (28)..(289): Homolog of NCBI NO: 8953721 NR Description: contains similarity to MYB-related DNA-binding
  misc_feature (28)..(303): Homolog of NCBI NO: 30696225 NR Description: myb family transcription factor [Arabidopsis
  misc_feature (28)..(303): Homolog of NCBI NO: 30696221 NR Description: myb family transcription factor [Arabidopsis
  misc_feature (17)..(291): Homolog of NCBI NO: 30680926 NR Description: myb family transcription factor [Arabidopsis
  misc_feature (15)..(307): Homolog of NCBI NO: 11357907 NR Description: hypothetical protein F9G14.150 - Arabidopsis
  misc_feature (15)..(307): Homolog of NCBI NO: 14596213 NR Description: putative protein [Arabidopsis thaliana]
  misc_feature (15)..(307): Homolog of NCBI NO: 18414039 NR Description: myb family transcription factor [Arabidopsis
GYRRHFSILNKVPIMTSTNPVVAEVIPAETSTDATETTIATTEAGEAPEKKVRKAYTITKSRESWTEGEHDKFLEALQLFDRDWKKIEDFVGSKTVIQIRSHAQKYFLKVQKNGTLAHVPPPRPKRKAAHPYPQKASKNAQMSLHVSMSFPTQINNLPGYTPWDDDTSALLNIAVSGVIPPEDELDTLCGAEVDVGSNDMISETSPSASGIGSSSRTLSDSKGLRLAKQAPSMHGLPDFAEVYNFIGSVFDPDSKGRMKKLKEMDPINFETVLLLMRNLTVNLSNPDFEPTSEYVDAAEEGHEHLSS

SEQ ID NO: 46730 - protein, 293 aa, Arabidopsis thaliana
  peptide (1)..(293): Ceres Seq. ID no. 13578659
  misc_feature (48)..(93): Pfam Name: Myb-like DNA-binding domain Pfam Description: Myb-like DNA-binding domain
  misc_feature (1)..(124): Homolog of NCBI NO: 2505876 NR Description: MYB-related protein [Arabidopsis thaliana]
  misc_feature (3)..(125): Homolog of NCBI NO: 6682239 NR Description: putative MYB-related protein [Arabidopsis
  misc_feature (17)..(274): Homolog of NCBI NO: 15234118 NR Description: myb family transcription factor [Arabidopsis
  misc_feature (14)..(275): Homolog of NCBI NO: 8953721 NR Description: contains similarity to MYB-related DNA-binding
  misc_feature (14)..(289): Homolog of NCBI NO: 30696225 NR Description: myb family transcription factor [Arabidopsis
  misc_feature (14)..(289): Homolog of NCBI NO: 30696221 NR Description: myb family transcription factor [Arabidopsis
  misc_feature (3)..(277): Homolog of NCBI NO: 30680926 NR Description: myb family transcription factor [Arabidopsis
  misc_feature (1)..(293): Homolog of NCBI NO: 11357907 NR Description: hypothetical protein F9G14.150 - Arabidopsis
  misc_feature (1)..(293): Homolog of NCBI NO: 14596213 NR Description: putative protein [Arabidopsis thaliana]
  misc_feature (1)..(293): Homolog of NCBI NO: 18414039 NR Description: myb family transcription factor [Arabidopsis
MTSTNPVVAEVIPAETSTDATETTIATTEAGEAPEKKVRKAYTITKSRESWTEGEHDKFLEALQLFDRDWKKIEDFVGSKTVIQIRSHAQKYFLKVQKNGTLAHVPPPRPKRKAAHPYPQKASKNAQMSLHVSMSFPTQINNLPGYTPWDDDTSALLNIAVSGVIPPEDELDTLCGAEVDVGSNDMISETSPSASGIGSSSRTLSDSKGLRLAKQAPSMHGLPDFAEVYNFIGSVFDPDSKGRMKKLKEMDPINFETVLLLMRNLTVNLSNPDFEPTSEYVDAAEEGHEHLSS

SEQ ID NO: 46731 - protein, 166 aa, Arabidopsis thaliana; identical to SEQ ID NO: 22744
  peptide (1)..(166): Ceres Seq. ID no. 13578660
  misc_feature (1)..(51): Homolog of NCBI NO: 38346813 NR Description: OSJNBa0088A01.20 [Oryza sativa (japonica
  misc_feature (1)..(16): Homolog of NCBI NO: 37805865 NR Description: putative LHY protein [Oryza sativa (japonica
  misc_feature (1)..(147): Homolog of NCBI NO: 15234118 NR Description: myb family transcription factor [Arabidopsis
  misc_feature (1)..(148): Homolog of NCBI NO: 8953721 NR Description: contains similarity to MYB-related DNA-binding
  misc_feature (1)..(162): Homolog of NCBI NO: 30696225 NR Description: myb family transcription factor [Arabidopsis
  misc_feature (1)..(162): Homolog of NCBI NO: 30696221 NR Description: myb family transcription factor [Arabidopsis
  misc_feature (1)..(150): Homolog of NCBI NO: 30680926 NR Description: myb family transcription factor [Arabidopsis
  misc_feature (1)..(166): Homolog of NCBI NO: 11357907 NR Description: hypothetical protein F9G14.150 - Arabidopsis
  misc_feature (1)..(166): Homolog of NCBI NO: 14596213 NR Description: putative protein [Arabidopsis thaliana]
  misc_feature (1)..(166): Homolog of NCBI NO: 18414039 NR Description: myb family transcription factor [Arabidopsis

SEQ ID NO: 46732 - DNA, 2299 bp, Arabidopsis thaliana
  misc_feature (1)..(2299): Ceres Seq. ID no. 15168693
  misc_feature: MA Experiment ID: 20000171 Result: Down-regulated in Transcription
  misc_feature: MA Experiment 20000171 PARAMETER Experiment Name: At_42deg_Heat_P Parameter: Age (day) Value: 14
  misc_feature: MA Experiment 20000171 PARAMETER Experiment Name: At_42deg_Heat_P Parameter: Organism Value: A. thaliana
  misc_feature: MA Experiment 20000171 PARAMETER Experiment Name: At_42deg_Heat_P Parameter: Plant Line Value: WS
  misc_feature: MA Experiment 20000171 PARAMETER Experiment Name: At_42deg_Heat_P Parameter: Temperature (deg C) Value: 42 vs. 22
  misc_feature: MA Experiment 20000171 PARAMETER Experiment Name: At_42deg_Heat_P Parameter: Timepoint (hr) Value: 1
  misc_feature: MA Experiment 20000171 PARAMETER Experiment Name: At_42deg_Heat_P Parameter: Tissue Value: Aerial
  misc_feature: MA Experiment ID: 20000173 Result: Down-regulated in Transcription
  misc_feature: MA Experiment 20000173 PARAMETER Experiment Name: At_42deg_Heat_P Parameter: Age (day) Value: 14
  misc_feature: MA Experiment 20000173 PARAMETER Experiment Name: At_42deg_Heat_P Parameter: Organism Value: A. thaliana
  misc_feature: MA Experiment 20000173 PARAMETER Experiment Name: At_42deg_Heat_P Parameter: Plant Line Value: WS
  misc_feature: MA Experiment 20000173 PARAMETER Experiment Name: At_42deg_Heat_P Parameter: Temperature (deg C) Value: 42 vs. 22
  misc_feature: MA Experiment 20000173 PARAMETER Experiment Name: At_42deg_Heat_P Parameter: Timepoint (hr) Value: 6
  misc_feature: MA Experiment 20000173 PARAMETER Experiment Name: At_42deg_Heat_P Parameter: Tissue Value: Aerial
  misc_feature: MA Experiment ID: 20000184 Result: Down-regulated in Transcription
  misc_feature: MA Experiment 20000184 PARAMETER Experiment Name: At_Shoots__P Parameter: Age (day) Value: 7
  misc_feature: MA Experiment 20000184 PARAMETER Experiment Name: At_Shoots__P Parameter: Tissue Value: Shoots vs. Whole Plant
  misc_feature: MA Experiment ID: 20000214 Result: Down-regulated in Transcription
  misc_feature: MA Experiment 20000214 PARAMETER Experiment Name: At_4deg_Cold_P Parameter: Timepoint (hr) Value: 6
  misc_feature: MA Experiment ID: 20000234 Result: Down-regulated in Transcription
  misc_feature: MA Experiment 20000234 PARAMETER Experiment Name: At_Siliques_P Parameter: Age (day) Value: 21
  misc_feature: MA Experiment 20000234 PARAMETER Experiment Name: At_Siliques_P Parameter: Organism Value: A. thaliana
  misc_feature: MA Experiment 20000234 PARAMETER Experiment Name: At_Siliques_P Parameter: Plant Line Value: WS
  misc_feature: MA Experiment 20000234 PARAMETER Experiment Name: At_Siliques_P Parameter: Tissue Value: Less Than 5mm Siliques vs. Whole Plant
  misc_feature: MA Experiment ID: 20000265 Result: Down-regulated in Transcription
  misc_feature: MA Experiment 20000265 PARAMETER Experiment Name: At_Open_Flower_P Parameter: Age (day) Value: 21
  misc_feature: MA Experiment 20000265 PARAMETER Experiment Name: At_Open_Flower_P Parameter: Plant Line Value: WS
  misc_feature: MA Experiment 20000265 PARAMETER Experiment Name: At_Open_Flower_P Parameter: Tissue Value: Closed Flower vs. Whole Plant
  misc_feature: MA Experiment ID: 20000438 Result: Down-regulated in Transcription
  misc_feature: MA Experiment 20000438 PARAMETER Experiment Name: At_Shoots__P Parameter: Age (day) Value: 14
  misc_feature: MA Experiment 20000438 PARAMETER Experiment Name: At_Shoots__P Parameter: Tissue Value: Shoots vs. Whole Plant
  misc_feature: MA Experiment ID: 20000460 Result: Up-regulated in Transcription
  misc_feature: MA Experiment 20000460 PARAMETER Experiment Name: At_10percent_PEG_P Parameter: Age (day) Value: 12
  misc_feature: MA Experiment 20000460 PARAMETER Experiment Name: At_10percent_PEG_P Parameter: Organism Value: A. thaliana
  misc_feature: MA Experiment 20000460 PARAMETER Experiment Name: At_10percent_PEG_P Parameter: Plant Line Value: WS
  misc_feature: MA Experiment 20000460 PARAMETER Experiment Name: At_10percent_PEG_P Parameter: Timepoint (day) Value: 12
  misc_feature: MA Experiment 20000460 PARAMETER Experiment Name: At_10percent_PEG_P Parameter: Tissue Value: Whole Plant
  misc_feature: MA Experiment 20000460 PARAMETER Experiment Name: At_10percent_PEG_P Parameter: Treatment Value: 10percent PEG vs. No Treatment
  misc_feature: MA Experiment ID: 20000495 Result: Down-regulated in Transcription
  misc_feature: MA Experiment 20000495 PARAMETER Experiment Name: At_Guard_Cells_P Parameter: Harvest Date Value: 8/2/2002
  misc_feature: MA Experiment 20000495 PARAMETER Experiment Name: At_Guard_Cells_P Parameter: Organism Value: A. thaliana
  misc_feature: MA Experiment 20000495 PARAMETER Experiment Name: At_Guard_Cells_P Parameter: Tissue Value: Guard Cells vs. Leaves
  misc_feature: MA Experiment ID: 20000606 Result: Up-regulated in Transcription
  misc_feature: MA Experiment 20000606 PARAMETER Experiment Name: At_CS8548_Mutant_P Parameter: Age (day) Value: 14
  misc_feature: MA Experiment 20000606 PARAMETER Experiment Name: At_CS8548_Mutant_P Parameter: Plant Line Value: CS8548 vs. wt
  misc_feature: MA Experiment 20000606 PARAMETER Experiment Name: At_CS8548_Mutant_P Parameter: Tissue Value: Whole Plant
  misc_feature: MA Experiment ID: 20001247 Result: Up-regulated in Transcription
  misc_feature: MA Experiment 20001247 PARAMETER Experiment Name: At_Far-red-induction_P Parameter: Age (day) Value: 7
  misc_feature: MA Experiment 20001247 PARAMETER Experiment Name: At_Far-red-induction_P Parameter: Light Value: Far-red vs. White
  misc_feature: MA Experiment 20001247 PARAMETER Experiment Name: At_Far-red-induction_P Parameter: Organism Value: A. thaliana
  misc_feature: MA Experiment 20001247 PARAMETER Experiment Name: At_Far-red-induction_P Parameter: Plant Line Value: Columbia
  misc_feature: MA Experiment 20001247 PARAMETER Experiment Name: At_Far-red-induction_P Parameter: Timepoint (hr) Value: 1
  misc_feature: MA Experiment 20001247 PARAMETER Experiment Name: At_Far-red-induction_P Parameter: Tissue Value: Whole Plant
  misc_feature: MA Experiment ID: 20001248 Result: Up-regulated in Transcription
  misc_feature: MA Experiment 20001248 PARAMETER Experiment Name: At_Far-red-induction_P Parameter: Age (day) Value: 7
  misc_feature: MA Experiment 20001248 PARAMETER Experiment Name: At_Far-red-induction_P Parameter: Light Value: Far-red vs. White
  misc_feature: MA Experiment 20001248 PARAMETER Experiment Name: At_Far-red-induction_P Parameter: Organism Value: A. thaliana
  misc_feature: MA Experiment 20001248 PARAMETER Experiment Name: At_Far-red-induction_P Parameter: Plant Line Value: Columbia
  misc_feature: MA Experiment 20001248 PARAMETER Experiment Name: At_Far-red-induction_P Parameter: Timepoint (hr) Value: 4
  misc_feature: MA Experiment 20001248 PARAMETER Experiment Name: At_Far-red-induction_P Parameter: Tissue Value: Whole Plant
  misc_feature: MA Experiment ID: 20001450 Result: Up-regulated in Transcription
  misc_feature: MA Experiment 20001450 PARAMETER Experiment Name: At_Far-red-induction_P Parameter: Age (day) Value: 7
  misc_feature: MA Experiment 20001450 PARAMETER Experiment Name: At_Far-red-induction_P Parameter: Light Value: Far-red vs. White
  misc_feature: MA Experiment 20001450 PARAMETER Experiment Name: At_Far-red-induction_P Parameter: Organism Value: A. thaliana
  misc_feature: MA Experiment 20001450 PARAMETER Experiment Name: At_Far-red-induction_P Parameter: Plant Line Value: Columbia
  misc_feature: MA Experiment 20001450 PARAMETER Experiment Name: At_Far-red-induction_P Parameter: Timepoint (hr) Value: 8
  misc_feature: MA Experiment 20001450 PARAMETER Experiment Name: At_Far-red-induction_P Parameter: Tissue Value: Whole Plant
  misc_feature: MA Experiment ID: 20001555 Result: Down-regulated in Transcription
  misc_feature: MA Experiment 20001555 PARAMETER Experiment Name: At_Drought_Soil_Dry_P Parameter: Age (day) Value: 24
  misc_feature: MA Experiment 20001555 PARAMETER Experiment Name: At_Drought_Soil_Dry_P Parameter: Organism Value: A. thaliana
  misc_feature: MA Experiment 20001555 PARAMETER Experiment Name: At_Drought_Soil_Dry_P Parameter: Plant Line Value: WS
  misc_feature: MA Experiment 20001555 PARAMETER Experiment Name: At_Drought_Soil_Dry_P Parameter: Post Timepoint (hr) Value: None
  misc_feature: MA Experiment 20001555 PARAMETER Experiment Name: At_Drought_Soil_Dry_P Parameter: Post-Treatment Value: None
  misc_feature: MA Experiment 20001555 PARAMETER Experiment Name: At_Drought_Soil_Dry_P Parameter: Timepoint (day) Value: 10
  misc_feature: MA Experiment 20001555 PARAMETER Experiment Name: At_Drought_Soil_Dry_P Parameter: Treatment Value: Drought vs. No Drought
  misc_feature: MA Experiment ID: 20001556 Result: Down-regulated in Transcription
  misc_feature: MA Experiment 20001556 PARAMETER Experiment Name: At_Drought_Soil_Dry_P Parameter: Age (day) Value: 26
  misc_feature: MA Experiment 20001556 PARAMETER Experiment Name: At_Drought_Soil_Dry_P Parameter: Organism Value: A. thaliana
  misc_feature: MA Experiment 20001556 PARAMETER Experiment Name: At_Drought_Soil_Dry_P Parameter: Plant Line Value: WS
  misc_feature: MA Experiment 20001556 PARAMETER Experiment Name: At_Drought_Soil_Dry_P Parameter: Post Timepoint (hr) Value: None
  misc_feature: MA Experiment 20001556 PARAMETER Experiment Name: At_Drought_Soil_Dry_P Parameter: Post-Treatment Value: None
  misc_feature: MA Experiment 20001556 PARAMETER Experiment Name: At_Drought_Soil_Dry_P Parameter: Timepoint (day) Value: 12
  misc_feature: MA Experiment 20001556 PARAMETER Experiment Name: At_Drought_Soil_Dry_P Parameter: Treatment Value: Drought vs. No Drought
  misc_feature: MA Experiment ID: 20001911 Result: Down-regulated in Transcription
  misc_feature: MA Experiment 20001911 PARAMETER Experiment Name: At_Drought_Reproduction_P Parameter: Age (day) Value: 40
  misc_feature: MA Experiment 20001911 PARAMETER Experiment Name: At_Drought_Reproduction_P Parameter: Organism Value: A. thaliana
  misc_feature: MA Experiment 20001911 PARAMETER Experiment Name: At_Drought_Reproduction_P Parameter: Plant Line Value: WS
  misc_feature: MA Experiment 20001911 PARAMETER Experiment Name: At_Drought_Reproduction_P Parameter: Timepoint (day) Value: 10
  misc_feature: MA Experiment 20001911 PARAMETER Experiment Name: At_Drought_Reproduction_P Parameter: Tissue Value: Flowers
  misc_feature: MA Experiment 20001911 PARAMETER Experiment Name: At_Drought_Reproduction_P Parameter: Treatment Value: Drought vs. No Drought
gtttctctctcccttcctttaagaacgcgtttgcagactttgatcagacttcgcgttcccgccgcccatctccctctctctctctttttctctctcacacgtttcttttttgtctctctccctgattcatcgccgtagctgtgtgaccgaacattgctgcgagttcctcaaaacccaaatctttcttcctcaaagactctgttttttctttcttcctttcttcaatggcgttatcgaaaaacagtaacagtaacagctttaacaagaagaaagtttcgtatatctcagtcccttctcagatcataaactctttatcatcttcctcattacaatctcttcttgtttctcccaagaaatcatcaagaagcaccaacagattcagcttctcttataggaaccctagaatctggttctttactctcttcctcgtctcactctttggaatgttgaaactcggattcaacgttgacccaatctctctccctttctcacgttacccttgttcaacgacccaacaaccactaagcttcgacggagaacaaaacgctgcatcccatcttggtttggctcaagagccgattttgtctactgggtcatcgaattcgaatgcgattatacaattaaacggtggaaagaacgagactttgttaacggaaggtgatttctggaagcaacctgatgggttagggtttaagccctgtttgggatttacaagtcaatatagaaaagatagcaattcgattttgaagaacagatggaagtatttgcttgttgttgtctctggtgggatgaatcagcaaaggaatcagattgttgatgctgttgtgatcgctaggatccttggagcttctttagttgttcctgttttgcaggttaatgtcatttggggagacgaaagtgaatttgcggatatattcgatttggagcatttcaaggatgttttagcagatgatgttcatatagtttcgtctttaccttctacacatgtaatgacgagacctgtcgaagagaagaggactccacttcatgcttctcctcaatggattcgtgctcattatcttaagcgaataaacagagaaagagttttacttctccgtggactcgattcaagactctccaaggaccttccctctgatcttcagaaactccgatgcaaggttgctttccaagcgctgagattttctccgaggattcttgaactcggtaataaactagcttcaagaatgcgtaaccaaggacagtatctctcacttcatctaagaatggagaaagatgtttgggttagaactggttgtctccctggtttaactcccgagtatgatgaaatagtcaacagcgaaagagaacgacaccctgagcttcttaccggtagatcaaacatgacttatcacgagagaaaacttgccggtttatgccctttaactgctctagaagtcacaaggctgcttaaagcattagaagctccaaaggatgcgagaatctattgggcaggaggagagcctctaggaggaaaagaggttttggagccactaactaaagaattccctcagttctacaacaagcatgatcttgcattaccgggagaactcgaaccatttgccaacaaagcttcggttatggctgctatagactacattgtctgcgaaaagagcgatgttttcataccgtctcatggaggaaatatgggacacgcgttaagggcaaagagcttacgctggtcacaagaaatacatcactcctaataagagacagatgcttccttatttcatgaacacgtcgcttcctgaatcggattttaacagaattgtgaaagatcttcatcgagaatcgctaggacagccggagttgagaatgagcaaagctggtaaagatgttacaaaacatcctgttccagagtgtatgtgctcggatagacaacaacaagaacaacagtccgatgcttaagccttgaaggacattttggacattatttggtgcgcggaaaatgaagaagacgccgattttttcccgatcacccggaagattgattgaggaagacgattcatggtggttcgtgcgatattcttttagttcgggttttaatctgatcattttttcaaaatcttttggagtaaatatatattcgtttcaactgaggttatttttttcttacatgtttttacgatatacgtgagaagtagaatagtgaggttataagatatgattctttgattcgatttatttgggctgtaattatatattacagagtttgtatacggttctagttgtacttgtactataaataaagcaacagttaatc

SEQ ID NO: 46733 - protein, 505 aa, Arabidopsis thaliana
  peptide (1)..(505): Ceres Seq. ID no. 15168694
  misc_feature (182)..(494): Pfam Name: Plant protein family Pfam Description: Plant protein family
  misc_feature (146)..(494): Homolog of NCBI NO: 38345930 NR Description: OSJNBb0078D11.5 [Oryza sativa (japonica
  misc_feature (143)..(494): Homolog of NCBI NO: 25406439 NR Description: hypothetical protein F15M4.23 [imported] -
  misc_feature (132)..(494): Homolog of NCBI NO: 8886957 NR Description: F2D10.3 [Arabidopsis thaliana]
  misc_feature (119)..(494): Homolog of NCBI NO: 8778600 NR Description: F5M15.13 [Arabidopsis thaliana]
  misc_feature (135)..(492): Homolog of NCBI NO: 22327354 NR Description: axi 1 (auxin-independent growth promoter)-related
  misc_feature (256)..(492): Homolog of NCBI NO: 16226527 NR Description: AT3g07900/F17A17_24 [Arabidopsis thaliana]
  misc_feature (334)..(494): Homolog of NCBI NO: 15215711 NR Description: At2g44500/F4I1.31 [Arabidopsis thaliana]
  misc_feature (35)..(492): Homolog of NCBI NO: 15242752 NR Description: auxin-independent growth promoter-related protein
  misc_feature (1)..(492): Homolog of NCBI NO: 15231892 NR Description: auxin-independent growth promoter -related
  misc_feature (1)..(494): Homolog of NCBI NO: 15224887 NR Description: axi 1 protein from Nicotiana tabacum -related
MALSKNSNSNSFNKKKVSYISVPSQIINSLSSSSLQSLLVSPKKSSRSTNRFSFSYRNPRIWFFTLFLVSLFGMLKLGFNVDPISLPFSRYPCSTTQQPLSFDGEQNAASHLGLAQEPILSTGSSNSNAIIQLNGGKNETLLTEGDFWKQPDGLGFKPCLGFTSQYRKDSNSILKNRWKYLLVVVSGGMNQQRNQIVDAVVIARILGASLVVPVLQVNVIWGDESEFADIFDLEHFKDVLADDVHIVSSLPSTHVMTRPVEEKRTPLHASPQWIRAHYLKRINRERVLLLRGLDSRLSKDLPSDLQKLRCKVAFQALRFSPRILELGNKLASRMRNQGQYLSLHLRMEKDVWVRTGCLPGLTPEYDEIVNSERERHPELLTGRSNMTYHERKLAGLCPLTALEVTRLLKALEAPKDARIYWAGGEPLGGKEVLEPLTKEFPQFYNKHDLALPGELEPFANKASVMAAIDYIVCEKSDVFIPSHGGNMGHALRAKSLRWSQEIHHS

SEQ ID NO: 46734 - protein, 432 aa, Arabidopsis thaliana
  peptide (1)..(432): Ceres Seq. ID no. 15168695
  misc_feature (109)..(421): Pfam Name: Plant protein family Pfam Description: Plant protein family
  misc_feature (73)..(421): Homolog of NCBI NO: 38345930 NR Description: OSJNBb0078D11.5 [Oryza sativa (japonica
  misc_feature (70)..(421): Homolog of NCBI NO: 25406439 NR Description: hypothetical protein F15M4.23 [imported] -
  misc_feature (59)..(421): Homolog of NCBI NO: 8886957 NR Description: F2D10.3 [Arabidopsis thaliana]
  misc_feature (46)..(421): Homolog of NCBI NO: 8778600 NR Description: F5M15.13 [Arabidopsis thaliana]
  misc_feature (62)..(419): Homolog of NCBI NO: 22327354 NR Description: axi 1 (auxin-independent growth promoter)-related
  misc_feature (183)..(419): Homolog of NCBI NO: 16226527 NR Description: AT3g07900/F17A17_24 [Arabidopsis thaliana]
  misc_feature (261)..(421): Homolog of NCBI NO: 15215711 NR Description: At2g44500/F4I1.31 [Arabidopsis thaliana]
  misc_feature (1)..(419): Homolog of NCBI NO: 15242752 NR Description: auxin-independent growth promoter-related protein
  misc_feature (1)..(419): Homolog of NCBI NO: 15231892 NR Description: auxin-independent growth promoter -related
  misc_feature (1)..(421): Homolog of NCBI NO: 15224887 NR Description: axi 1 protein from Nicotiana tabacum -related
MLKLGFNVDPISLPFSRYPCSTTQQPLSFDGEQNAASHLGLAQEPILSTGSSNSNAIIQLNGGKNETLLTEGDFWKQPDGLGFKPCLGFTSQYRKDSNSILKNRWKYLLVVVSGGMNQQRNQIVDAVVIARILGASLVVPVLQVNVIWGDESEFADIFDLEHFKDVLADDVHIVSSLPSTHVMTRPVEEKRTPLHASPQWIRAHYLKRINRERVLLLRGLDSRLSKDLPSDLQKLRCKVAFQALRFSPRILELGNKLASRMRNQGQYLSLHLRMEKDVWVRTGCLPGLTPEYDEIVNSERERHPELLTGRSNMTYHERKLAGLCPLTALEVTRLLKALEAPKDARIYWAGGEPLGGKEVLEPLTKEFPQFYNKHDLALPGELEPFANKASVMAAIDYIVCEKSDVFIPSHGGNMGHALRAKSLRWSQEIHHS

SEQ ID NO: 46735 - protein, 317 aa, Arabidopsis thaliana
  peptide (1)..(317): Ceres Seq. ID no. 15168696
  misc_feature (1)..(306): Pfam Name: Plant protein family Pfam Description: Plant protein family
  misc_feature (1)..(306): Homolog of NCBI NO: 38345930 NR Description: OSJNBb0078D11.5 [Oryza sativa (japonica
  misc_feature (1)..(306): Homolog of NCBI NO: 25406439 NR Description: hypothetical protein F15M4.23 [imported] -
  misc_feature (1)..(306): Homolog of NCBI NO: 8886957 NR Description: F2D10.3 [Arabidopsis thaliana]
  misc_feature (1)..(306): Homolog of NCBI NO: 8778600 NR Description: F5M15.13 [Arabidopsis thaliana]
  misc_feature (1)..(304): Homolog of NCBI NO: 22327354 NR Description: axi 1 (auxin-independent growth promoter)-related
  misc_feature (68)..(304): Homolog of NCBI NO: 16226527 NR Description: AT3g07900/F17A17_24 [Arabidopsis thaliana]
  misc_feature (146)..(306): Homolog of NCBI NO: 15215711 NR Description: At2g44500/F4I1.31 [Arabidopsis thaliana]
  misc_feature (1)..(304): Homolog of NCBI NO: 15242752 NR Description: auxin-independent growth promoter-related protein
  misc_feature (1)..(304): Homolog of NCBI NO: 15231892 NR Description: auxin-independent growth promoter -related
  misc_feature (1)..(306): Homolog of NCBI NO: 15224887 NR Description: axi 1 protein from Nicotiana tabacum -related
MNQQRNQIVDAVVIARILGASLVVPVLQVNVIWGDESEFADIFDLEHFKDVLADDVHIVSSLPSTHVMTRPVEEKRTPLHASPQWIRAHYLKRINRERVLLLRGLDSRLSKDLPSDLQKLRCKVAFQALRFSPRILELGNKLASRMRNQGQYLSLHLRMEKDVWVRTGCLPGLTPEYDEIVNSERERHPELLTGRSNMTYHERKLAGLCPLTALEVTRLLKALEAPKDARIYWAGGEPLGGKEVLEPLTKEFPQFYNKHDLALPGELEPFANKASVMAAIDYIVCEKSDVFIPSHGGNMGHALRAKSLRWSQEIHHS

SEQ ID NO: 46736 - DNA, 1736 bp, Arabidopsis thaliana; identical to SEQ ID NO: 24002
  misc_feature (1)..(1736): Ceres Seq. ID no. 12601746
  misc_feature: MA Experiment ID: 108434 Result: Down-regulated in Transcription
  misc_feature: MA Experiment 108434 PARAMETER Experiment Name: At_Root_Tips_cDNA_P Parameter: Tissue Value: Root Tips
  misc_feature: MA Experiment ID: 108435 Result: Down-regulated in Transcription
  misc_feature: MA Experiment 108435 PARAMETER Experiment Name: At_stm_Mutants_cDNA_P Parameter: Plant Line Value: wt Landsburg vs stm
  misc_feature: MA Experiment 108435 PARAMETER Experiment Name: At_stm_Mutants_cDNA_P Parameter: Tissue Value: Shoot Apical Meristem Region
  misc_feature: MA Experiment ID: 108573 Result: Up-regulated in Transcription
  misc_feature: MA Experiment 108573 PARAMETER Experiment Name: At_Drought_cDNA_P Parameter: Timepoint (hr) Value: 6
  misc_feature: MA Experiment 108573 PARAMETER Experiment Name: At_Drought_cDNA_P Parameter: Tissue Value: Aerial
  misc_feature: MA Experiment 108573 PARAMETER Experiment Name: At_Drought_cDNA_P Parameter: Treatment Value: Drought vs. No Drought
  misc_feature: MA Experiment ID: 108595 Result: Down-regulated in Transcription
  misc_feature: MA Experiment 108595 PARAMETER Experiment Name: At_Ler-pi_Ovule_cDNA_P Parameter: Plant Line Value: null
  misc_feature: MA Experiment ID: 20000088 Result: Up-regulated in Transcription
  misc_feature: MA Experiment 20000088 PARAMETER Experiment Name: At_100uM_ABA_Mutants_cDNA_P Parameter: Plant Line Value: Landsberg
  misc_feature: MA Experiment 20000088 PARAMETER Experiment Name: At_100uM_ABA_Mutants_cDNA_P Parameter: Timepoint (hr) Value: 6
  misc_feature: MA Experiment 20000088 PARAMETER Experiment Name: At_100uM_ABA_Mutants_cDNA_P Parameter: Tissue Value: Aerial
  misc_feature: MA Experiment 20000088 PARAMETER Experiment Name: At_100uM_ABA_Mutants_cDNA_P Parameter: Treatment Value: 100uM ABA vs. No Treatment
  misc_feature: MA Experiment ID: 20000090 Result: Up-regulated in Transcription
  misc_feature: MA Experiment ID: 20000227 Result: Down-regulated in Transcription
  misc_feature: MA Experiment 20000227 PARAMETER Experiment Name: At_Root-Tips-vs-Tops_P Parameter: Tissue Value: Root Tips vs. Root Tops
  misc_feature: MA Experiment ID: 20000439 Result: Down-regulated in Transcription
  misc_feature: MA Experiment 20000439 PARAMETER Experiment Name: At_Roots__P Parameter: Age (day) Value: 14 vs. 21
  misc_feature: MA Experiment 20000439 PARAMETER Experiment Name: At_Roots__P Parameter: Organism Value: A. thaliana
  misc_feature: MA Experiment 20000439 PARAMETER Experiment Name: At_Roots__P Parameter: Tissue Value: Roots vs. Whole Plant
  misc_feature: MA Experiment ID: 20000496 Result: Up-regulated in Transcription
  misc_feature: MA Experiment 20000496 PARAMETER Experiment Name: At_Guard_Cells_P Parameter: Harvest Date Value: 7/19/2002
  misc_feature: MA Experiment 20000496 PARAMETER Experiment Name: At_Guard_Cells_P Parameter: Organism Value: Canola
  misc_feature: MA Experiment 20000496 PARAMETER Experiment Name: At_Guard_Cells_P Parameter: Tissue Value: Guard Cells vs. Leaves

SEQ ID NO: 46737 - protein, 523 aa, Arabidopsis thaliana; identical to SEQ ID NO: 24003
  peptide (1)..(523): Ceres Seq. ID no. 12601747
  misc_feature (67)..(504): Pfam Name: Class-II DAHP synthetase family Pfam Description: Class-II DAHP synthetase family
  misc_feature (67)..(504): Pfam Name: Class-II DAHP synthetase family Pfam Description: Class-II DAHP synthetase family
  misc_feature (11)..(519): Homolog of NCBI NO: 7488957 NR Description: probable 2-dehydro-3-deoxy-phosphoheptonate
  misc_feature (40)..(514): Homolog of NCBI NO: 24745903 NR Description: 3-deoxy-D-arabino-heptulosonate 7-phosphate
  misc_feature (40)..(514): Homolog of NCBI NO: 584777 NR Description: Phospho-2-dehydro-3-deoxyheptonate aldolase 1, precursor (Phospho-2-keto-3-deoxyheptonate aldolase 1) (DAHP
  misc_feature (40)..(514): Homolog of NCBI NO: 2546988 NR Description: 2-dehydro-3-deoxyphosphoheptonate aldolase
  misc_feature (40)..(514): Homolog of NCBI NO: 584778 NR Description: Phospho-2-dehydro-3-deoxyheptonate aldolase 2, precursor (Phospho-2-keto-3-deoxyheptonate aldolase 2) (DAHP
  misc_feature (11)..(519): Homolog of NCBI NO: 7488957 NR Description: probable 2-dehydro-3-deoxy-phosphoheptonate
  misc_feature (40)..(514): Homolog of NCBI NO: 584777 NR Description: Phospho-2-dehydro-3-deoxyheptonate aldolase 1, precursor (Phospho-2-keto-3-deoxyheptonate aldolase 1) (DAHP
  misc_feature (40)..(514): Homolog of NCBI NO: 584778 NR Description: Phospho-2-dehydro-3-deoxyheptonate aldolase 2, precursor (Phospho-2-keto-3-deoxyheptonate aldolase 2) (DAHP
  misc_feature (17)..(523): Homolog of NCBI NO: 15234217 NR Description: 2-dehydro-3-deoxyphosphoheptonate aldolase
  misc_feature (17)..(523): Homolog of NCBI NO: 166690 NR Description: 3-deoxy-D-arabino-heptulosonate 7-phosphate
  misc_feature (17)..(523): Homolog of NCBI NO: 21593248 NR Description: 2-dehydro-3-deoxyphosphoheptonate aldolase
  misc_feature (21)..(511): Homolog of NCBI NO: 2398681 NR Description: 3-deoxy-D-arabino-heptulosonate 7-phosphate
  misc_feature (3)..(514): Homolog of NCBI NO: 2398679 NR Description: 3-deoxy-D-arabino-heptulosonate 7-phosphate
  misc_feature (40)..(514): Homolog of NCBI NO: 2546988 NR Description: 2-dehydro-3-deoxyphosphoheptonate aldolase
  misc_feature (40)..(514): Homolog of NCBI NO: 24745903 NR Description: 3-deoxy-D-arabino-heptulosonate 7-phosphate
  misc_feature (3)..(514): Homolog of NCBI NO: 2398679 NR Description: 3-deoxy-D-arabino-heptulosonate 7-phosphate
  misc_feature (21)..(511): Homolog of NCBI NO: 2398681 NR Description: 3-deoxy-D-arabino-heptulosonate 7-phosphate
  misc_feature (17)..(523): Homolog of NCBI NO: 21593248 NR Description: 2-dehydro-3-deoxyphosphoheptonate aldolase
  misc_feature (17)..(523): Homolog of NCBI NO: 166690 NR Description: 3-deoxy-D-arabino-heptulosonate 7-phosphate
  misc_feature (17)..(523): Homolog of NCBI NO: 15234217 NR Description: 2-dehydro-3-deoxyphosphoheptonate aldolase

SEQ ID NO: 46738 - protein, 507 aa, Arabidopsis thaliana; identical to SEQ ID NO: 24004
  peptide (1)..(507): Ceres Seq. ID no. 12601748
  misc_feature (51)..(488): Pfam Name: Class-II DAHP synthetase family Pfam Description: Class-II DAHP synthetase family
  misc_feature (51)..(488): Pfam Name: Class-II DAHP synthetase family Pfam Description: Class-II DAHP synthetase family
  misc_feature (1)..(503): Homolog of NCBI NO: 7488957 NR Description: probable 2-dehydro-3-deoxy-phosphoheptonate
  misc_feature (24)..(498): Homolog of NCBI NO: 24745903 NR Description: 3-deoxy-D-arabino-heptulosonate 7-phosphate
  misc_feature (24)..(498): Homolog of NCBI NO: 584777 NR Description: Phospho-2-dehydro-3-deoxyheptonate aldolase 1, precursor (Phospho-2-keto-3-deoxyheptonate aldolase 1) (DAHP
  misc_feature (24)..(498): Homolog of NCBI NO: 2546988 NR Description: 2-dehydro-3-deoxyphosphoheptonate aldolase
  misc_feature (24)..(498): Homolog of NCBI NO: 584778 NR Description: Phospho-2-dehydro-3-deoxyheptonate aldolase 2, precursor (Phospho-2-keto-3-deoxyheptonate aldolase 2) (DAHP
  misc_feature (24)..(498): Homolog of NCBI NO: 24745903 NR Description: 3-deoxy-D-arabino-heptulosonate 7-phosphate
  misc_feature (24)..(498): Homolog of NCBI NO: 2546988 NR Description: 2-dehydro-3-deoxyphosphoheptonate aldolase
  misc_feature (1)..(498): Homolog of NCBI NO: 2398679 NR Description: 3-deoxy-D-arabino-heptulosonate 7-phosphate
  misc_feature (1)..(503): Homolog of NCBI NO: 7488957 NR Description: probable 2-dehydro-3-deoxy-phosphoheptonate
  misc_feature (1)..(507): Homolog of NCBI NO: 15234217 NR Description: 2-dehydro-3-deoxyphosphoheptonate aldolase
  misc_feature (1)..(507): Homolog of NCBI NO: 166690 NR Description: 3-deoxy-D-arabino-heptulosonate 7-phosphate
  misc_feature (1)..(507): Homolog of NCBI NO: 21593248 NR Description: 2-dehydro-3-deoxyphosphoheptonate aldolase
  misc_feature (5)..(495): Homolog of NCBI NO: 2398681 NR Description: 3-deoxy-D-arabino-heptulosonate 7-phosphate
  misc_feature (24)..(498): Homolog of NCBI NO: 584778 NR Description: Phospho-2-dehydro-3-deoxyheptonate aldolase 2, precursor (Phospho-2-keto-3-deoxyheptonate aldolase 2) (DAHP
  misc_feature (24)..(498): Homolog of NCBI NO: 584777 NR Description: Phospho-2-dehydro-3-deoxyheptonate aldolase 1, precursor (Phospho-2-keto-3-deoxyheptonate aldolase 1) (DAHP
  misc_feature (1)..(498): Homolog of NCBI NO: 2398679 NR Description: 3-deoxy-D-arabino-heptulosonate 7-phosphate
  misc_feature (5)..(495): Homolog of NCBI NO: 2398681 NR Description: 3-deoxy-D-arabino-heptulosonate 7-phosphate
  misc_feature (1)..(507): Homolog of NCBI NO: 21593248 NR Description: 2-dehydro-3-deoxyphosphoheptonate aldolase
  misc_feature (1)..(507): Homolog of NCBI NO: 166690 NR Description: 3-deoxy-D-arabino-heptulosonate 7-phosphate
  misc_feature (1)..(507): Homolog of NCBI NO: 15234217 NR Description: 2-dehydro-3-deoxyphosphoheptonate aldolase

SEQ ID NO: 46739 - protein, 403 aa, Arabidopsis thaliana; identical to SEQ ID NO: 24005
  peptide (1)..(403): Ceres Seq. ID no. 12601749
  misc_feature (1)..(384): Pfam Name: Class-II DAHP synthetase family Pfam Description: Class-II DAHP synthetase family
  misc_feature (1)..(384): Pfam Name: Class-II DAHP synthetase family Pfam Description: Class-II DAHP synthetase family
  misc_feature (1)..(399): Homolog of NCBI NO: 7488957 NR Description: probable 2-dehydro-3-deoxy-phosphoheptonate
  misc_feature (1)..(394): Homolog of NCBI NO: 24745903 NR Description: 3-deoxy-D-arabino-heptulosonate 7-phosphate
  misc_feature (1)..(394): Homolog of NCBI NO: 584777 NR Description: Phospho-2-dehydro-3-deoxyheptonate aldolase 1, precursor (Phospho-2-keto-3-deoxyheptonate aldolase 1) (DAHP
  misc_feature (1)..(394): Homolog of NCBI NO: 2546988 NR Description: 2-dehydro-3-deoxyphosphoheptonate aldolase
  misc_feature (1)..(394): Homolog of NCBI NO: 584778 NR Description: Phospho-2-dehydro-3-deoxyheptonate aldolase 2, precursor (Phospho-2-keto-3-deoxyheptonate aldolase 2) (DAHP
  misc_feature (1)..(399): Homolog of NCBI NO: 7488957 NR Description: probable 2-dehydro-3-deoxy-phosphoheptonate
  misc_feature (1)..(394): Homolog of NCBI NO: 584777 NR Description: Phospho-2-dehydro-3-deoxyheptonate aldolase 1, precursor (Phospho-2-keto-3-deoxyheptonate aldolase 1) (DAHP
  misc_feature (1)..(394): Homolog of NCBI NO: 584778 NR Description: Phospho-2-dehydro-3-deoxyheptonate aldolase 2, precursor (Phospho-2-keto-3-deoxyheptonate aldolase 2) (DAHP
  misc_feature (1)..(403): Homolog of NCBI NO: 15234217 NR Description: 2-dehydro-3-deoxyphosphoheptonate aldolase
  misc_feature (1)..(403): Homolog of NCBI NO: 166690 NR Description: 3-deoxy-D-arabino-heptulosonate 7-phosphate
  misc_feature (1)..(403): Homolog of NCBI NO: 21593248 NR Description: 2-dehydro-3-deoxyphosphoheptonate aldolase
  misc_feature (1)..(391): Homolog of NCBI NO: 2398681 NR Description: 3-deoxy-D-arabino-heptulosonate 7-phosphate
  misc_feature (1)..(394): Homolog of NCBI NO: 2398679 NR Description: 3-deoxy-D-arabino-heptulosonate 7-phosphate
  misc_feature (1)..(394): Homolog of NCBI NO: 2546988 NR Description: 2-dehydro-3-deoxyphosphoheptonate aldolase
  misc_feature (1)..(394): Homolog of NCBI NO: 24745903 NR Description: 3-deoxy-D-arabino-heptulosonate 7-phosphate
  misc_feature (1)..(394): Homolog of NCBI NO: 2398679 NR Description: 3-deoxy-D-arabino-heptulosonate 7-phosphate
  misc_feature (1)..(391): Homolog of NCBI NO: 2398681 NR Description: 3-deoxy-D-arabino-heptulosonate 7-phosphate
  misc_feature (1)..(403): Homolog of NCBI NO: 21593248 NR Description: 2-dehydro-3-deoxyphosphoheptonate aldolase
  misc_feature (1)..(403): Homolog of NCBI NO: 166690 NR Description: 3-deoxy-D-arabino-heptulosonate 7-phosphate
  misc_feature (1)..(403): Homolog of NCBI NO: 15234217 NR Description: 2-dehydro-3-deoxyphosphoheptonate aldolase

SEQ ID NO: 46740 - DNA, 2354 bp, Arabidopsis thaliana
  misc_feature (1)..(2354): Ceres Seq. ID no. 12600824
  misc_feature: MA Experiment ID: 20000234 Result: Up-regulated in Transcription
  misc_feature: MA Experiment 20000234 PARAMETER Experiment Name: At_Siliques_P Parameter: Age (day) Value: 21
  misc_feature: MA Experiment 20000234 PARAMETER Experiment Name: At_Siliques_P Parameter: Organism Value: A. thaliana
  misc_feature: MA Experiment 20000234 PARAMETER Experiment Name: At_Siliques_P Parameter: Plant Line Value: WS
  misc_feature: MA Experiment 20000234 PARAMETER Experiment Name: At_Siliques_P Parameter: Tissue Value: Less Than 5mm Siliques vs. Whole Plant
aaaaaaaaaccctagtcacactcagataacataaacctttgacaacaaattttgatgctccttcgtcttacggctcgctctattcgtcgtttcacaacttcttcttcgtctctaccattgctctcatcgtcttcgttttgtactgttccaacaatggcagctaatcatcctaaggatgaagcgtatctctccgccgtcatccccaaacgtatcaagcttttcgagcagatccaagcgaatcaactcgagaatcttaagtctcttccacacgatccgatcaaggttacgttaccagatggaaatgtgaaagaaggaaagaagtgggagacaactccgatggatatcgctgctcagatttctaagggtttggctaattctgcgttgatttcggctgttgatgatgttctttgggatatgaataggccattggaaggtgattgtaagcttgagcttttcaaatttgatagcgataaaggtcgtgatactctttggcattctagtgcgcacattcttggtcaggctctcgagcaggagtatgggtgtcagctgtgcattggaccatgcacaacgagaggagagggtttctactatgatggattttatggtgaattgggcctgagtgacaaccactttcctagcatcgaagcaggtgctgcaaaagctgctaaggaagcacaaccatttgaaaggattgaagtgacgaaggatcaggcactcgagatgttttctgagaataattttaaggttgaactcatcaatggtttgcctgcagacatgaccattactgtctacagatgtggccctttggtggatttgtgtcgtggaccgcacataccaaatacttcctttgtgaaagcgttcaagtgtttgagggcctcatcagcttactggaagggtgacaaagaccgtgagagcttgcagagagtttatgggatatcttatcctgatcagaagcagctgaagaaatatctccaatttctagaagaagccaaaaagtatgaccacagactattgggccaaaagcaggaactcttctttagtcatcaactcagccctgggagttatttcttccttccactcggcactcgtgtatataacaggttgatggacttcattaagaaccaatactggcacaggggttacacagaggttattacaccaaatatgtacaacatggagttgtggcaaacatccggacatgctgacaattacaaggataatatgtttacgtttaatattgagaagcaagagttcgggctcaaacctatgaattgtcctggtcactgcttgatattccagcatagggttcgctcatatagagagttacctatgagactggccgactttggagtgttacaccgcaatgaggcaagtggagcacttagtggattgactcgtgtccgacggttccagcaggatgatgcacacatattctgtacaacggaacaggttaagggagaagtgcagggtgtgttggagttcattgactacgtgtacaaagttttcgggtttacctatgagctaaaactttcaacgaggccagagaagtaccttggagatttggaaacatgggataaagctgaagcggatctcaaagaagctatagaagcttttggaaagccattagtgttgaacgaaggagatggtgcattttatggtccaaagatagacatcacagtttctgatgcaatgaataggaaattccagtgtgctactttacagcttgattttcaacttccgattcgcttcaacttggaatacgcagctgaggatgaagcgaaaaagagtagacctgtaatgatacatagagccgtgttgggatctgtggaacgtatgtttgccatattgttggagcattacaaaggaaaatggcccttctggattagtccgcgacaggccatagtttgtcctatatcagagaaatctcagcaatatgcagaaaaggttcaaaagcaaattaaagatgctgggttctatgttgatgctgacttaacagacagaaagatagataaaaaggtgcgagaagctcagcttgctcagtacaactacattctggtcgtgggtgaaacagaagctgctacaggacaggtgagtgttcgtgtgagagacaatgcagcccactccgtgaagagcattgaggatttgctggaagaattcaaggccaagactgccgaatttgtatgagatccgactcatgaaattcaagttctgatatgatgttttttttttttttttcaaattagggtcgacccagatttaagtgttcatctgtttcattaaaccatattaggcctcaactatattaaagtttcgattacattctgcgaaaactctatgtttggtccccttttagt

SEQ ID NO: 46741 - protein, 709 aa, Arabidopsis thaliana
  peptide (1)..(709): Ceres Seq. ID no. 12600825
  misc_feature (335)..(488): Pfam Name: tRNA synthetase class II core domain (G, H, P, S and T) Pfam Description: tRNA synthetase class II core domain (G, H, P,
  misc_feature (49)..(702): Homolog of NCBI NO: 38570111 NR Description: FLJ25005 protein [Homo sapiens]
  misc_feature (1)..(702): Homolog of NCBI NO: 26334063 NR Description: unnamed protein product [Mus musculus]
  misc_feature (32)..(709): Homolog of NCBI NO: 21428938 NR Description: GH20022p [Drosophila melanogaster]
  misc_feature (32)..(709): Homolog of NCBI NO: 24583839 NR Description: Threonyl-tRNA synthetase CG5353-PA
  misc_feature (49)..(702): Homolog of NCBI NO: 27229277 NR Description: hypothetical protein D15Wsu59e [Mus musculus]
  misc_feature (74)..(707): Homolog of NCBI NO: 20178337 NR Description: Threonyl-tRNA synthetase, cytoplasmic
  misc_feature (39)..(709): Homolog of NCBI NO: 17532457 NR Description: Threonyl tRNA Synthetase TRS-1 (84.4 kD) (trs-1)
  misc_feature (39)..(709): Homolog of NCBI NO: 39597482 NR Description: Hypothetical protein CBG03144 [Caenorhabditis
  misc_feature (185)..(708): Homolog of NCBI NO: 20429011 NR Description: threonyl-tRNA synthetase [Oryza sativa (japonica
  misc_feature (35)..(708): Homolog of NCBI NO: 38175524 NR Description: putative threonyl-tRNA synthetase
MLLRLTARSIRRFTTSSSSLPLLSSSSFCTVPTMAANHPKDEAYLSAVIPKRIKLFEQIQANQLENLKSLPHDPIKVTLPDGNVKEGKKWETTPMDIAAQISKGLANSALISAVDDVLWDMNRPLEGDCKLELFKFDSDKGRDTLWHSSAHILGQALEQEYGCQLCIGPCTTRGEGFYYDGFYGELGLSDNHFPSIEAGAAKAAKEAQPFERIEVTKDQALEMFSENNFKVELINGLPADMTITVYRCGPLVDLCRGPHIPNTSFVKAFKCLRASSAYWKGDKDRESLQRVYGISYPDQKQLKKYLQFLEEAKKYDHRLLGQKQELFFSHQLSPGSYFFLPLGTRVYNRLMDFIKNQYWHRGYTEVITPNMYNMELWQTSGHADNYKDNMFTFNIEKQEFGLKPMNCPGHCLIFQHRVRSYRELPMRLADFGVLHRNEASGALSGLTRVRRFQQDDAHIFCTTEQVKGEVQGVLEFIDYVYKVFGFTYELKLSTRPEKYLGDLETWDKAEADLKEAIEAFGKPLVLNEGDGAFYGPKIDITVSDAMNRKFQCATLQLDFQLPIRFNLEYAAEDEAKKSRPVMIHRAVLGSVERMFAILLEHYKGKWPFWISPRQAIVCPISEKSQQYAEKVQKQIKDAGFYVDADLTDRKIDKKVREAQLAQYNYILVVGETEAATGQVSVRVRDNAAHSVKSIEDLLEEFKAKTAEFV

SEQ ID NO: 46742 - protein, 676 aa, Arabidopsis thaliana
  peptide (1)..(676): Ceres Seq. ID no. 12600826
  misc_feature (302)..(455): Pfam Name: tRNA synthetase class II core domain (G, H, P, S and T) Pfam Description: tRNA synthetase class II core domain (G, H, P,
  misc_feature (16)..(669): Homolog of NCBI NO: 38570111 NR Description: FLJ25005 protein [Homo sapiens]
  misc_feature (1)..(669): Homolog of NCBI NO: 26334063 NR Description: unnamed protein product [Mus musculus]
  misc_feature (1)..(676): Homolog of NCBI NO: 21428938 NR Description: GH20022p [Drosophila melanogaster]
  misc_feature (1)..(676): Homolog of NCBI NO: 24583839 NR Description: Threonyl-tRNA synthetase CG5353-PA
  misc_feature (16)..(669): Homolog of NCBI NO: 27229277 NR Description: hypothetical protein D15Wsu59e [Mus musculus]
  misc_feature (41)..(674): Homolog of NCBI NO: 20178337 NR Description: Threonyl-tRNA synthetase, cytoplasmic
  misc_feature (6)..(676): Homolog of NCBI NO: 17532457 NR Description: Threonyl tRNA Synthetase TRS-1 (84.4 kD) (trs-1)
  misc_feature (6)..(676): Homolog of NCBI NO: 39597482 NR Description: Hypothetical protein CBG03144 [Caenorhabditis
  misc_feature (152)..(675): Homolog of NCBI NO: 20429011 NR Description: threonyl-tRNA synthetase [Oryza sativa (japonica
  misc_feature (2)..(675): Homolog of NCBI NO: 38175524 NR Description: putative threonyl-tRNA synthetase
MAANHPKDEAYLSAVIPKRIKLFEQIQANQLENLKSLPHDPIKVTLPDGNVKEGKKWETTPMDIAAQISKGLANSALISAVDDVLWDMNRPLEGDCKLELFKFDSDKGRDTLWHSSAHILGQALEQEYGCQLCIGPCTTRGEGFYYDGFYGELGLSDNHFPSIEAGAAKAAKEAQPFERIEVTKDQALEMFSENNFKVELINGLPADMTITVYRCGPLVDLCRGPHIPNTSFVKAFKCLRASSAYWKGDKDRESLQRVYGISYPDQKQLKKYLQFLEEAKKYDHRLLGQKQELFFSHQLSPGSYFFLPLGTRVYNRLMDFIKNQYWHRGYTEVITPNMYNMELWQTSGHADNYKDNMFTFNIEKQEFGLKPMNCPGHCLIFQHRVRSYRELPMRLADFGVLHRNEASGALSGLTRVRRFQQDDAHIFCTTEQVKGEVQGVLEFIDYVYKVFGFTYELKLSTRPEKYLGDLETWDKAEADLKEAIEAFGKPLVLNEGDGAFYGPKIDITVSDAMNRKFQCATLQLDFQLPIRFNLEYAAEDEAKKSRPVMIHRAVLGSVERMFAILLEHYKGKWPFWISPRQAIVCPISEKSQQYAEKVQKQIKDAGFYVDADLTDRKIDKKVREAQLAQYNYILVVGETEAATGQVSVRVRDNAAHSVKSIEDLLEEFKAKTAEFV

SEQ ID NO: 46743 - protein, 615 aa, Arabidopsis thaliana
  peptide (1)..(615): Ceres Seq. ID no. 12600827
  misc_feature (241)..(394): Pfam Name: tRNA synthetase class II core domain (G, H, P, S and T) Pfam Description: tRNA synthetase class II core domain (G, H, P,
  misc_feature (1)..(608): Homolog of NCBI NO: 38570111 NR Description: FLJ25005 protein [Homo sapiens]
  misc_feature (1)..(608): Homolog of NCBI NO: 26334063 NR Description: unnamed protein product [Mus musculus]
  misc_feature (1)..(615): Homolog of NCBI NO: 21428938 NR Description: GH20022p [Drosophila melanogaster]
  misc_feature (1)..(615): Homolog of NCBI NO: 24583839 NR Description: Threonyl-tRNA synthetase CG5353-PA
  misc_feature (1)..(608): Homolog of NCBI NO: 27229277 NR Description: hypothetical protein D15Wsu59e [Mus musculus]
  misc_feature (1)..(613): Homolog of NCBI NO: 20178337 NR Description: Threonyl-tRNA synthetase, cytoplasmic
  misc_feature (1)..(615): Homolog of NCBI NO: 17532457 NR Description: Threonyl tRNA Synthetase TRS-1 (84.4 kD) (trs-1)
  misc_feature (1)..(615): Homolog of NCBI NO: 39597482 NR Description: Hypothetical protein CBG03144 [Caenorhabditis
  misc_feature (91)..(614): Homolog of NCBI NO: 20429011 NR Description: threonyl-tRNA synthetase [Oryza sativa (japonica
  misc_feature (1)..(614): Homolog of NCBI NO: 38175524 NR Description: putative threonyl-tRNA synthetase
MDIAAQISKGLANSALISAVDDVLWDMNRPLEGDCKLELFKFDSDKGRDTLWHSSAHILGQALEQEYGCQLCIGPCTTRGEGFYYDGFYGELGLSDNHFPSIEAGAAKAAKEAQPFERIEVTKDQALEMFSENNFKVELINGLPADMTITVYRCGPLVDLCRGPHIPNTSFVKAFKCLRASSAYWKGDKDRESLQRVYGISYPDQKQLKKYLQFLEEAKKYDHRLLGQKQELFFSHQLSPGSYFFLPLGTRVYNRLMDFIKNQYWHRGYTEVITPNMYNMELWQTSGHADNYKDNMFTFNIEKQEFGLKPMNCPGHCLIFQHRVRSYRELPMRLADFGVLHRNEASGALSGLTRVRRFQQDDAHIFCTTEQVKGEVQGVLEFIDYVYKVFGFTYELKLSTRPEKYLGDLETWDKAEADLKEAIEAFGKPLVLNEGDGAFYGPKIDITVSDAMNRKFQCATLQLDFQLPIRFNLEYAAEDEAKKSRPVMIHRAVLGSVERMFAILLEHYKGKWPFWISPRQAIVCPISEKSQQYAEKVQKQIKDAGFYVDADLTDRKIDKKVREAQLAQYNYILVVGETEAATGQVSVRVRDNAAHSVKSIEDLLEEFKAKTAEFV

SEQ ID NO: 46744 - DNA, 860 bp, Arabidopsis thaliana; identical to SEQ ID NO: 31045
  misc_feature (1)..(860): Ceres Seq. ID no. 13591956
  misc_feature: MA Experiment ID: 108561 Result: Down-regulated in Transcription
  misc_feature: MA Experiment 108561 PARAMETER Experiment Name: At_100uM_ABA_cDNA_P Parameter: Timepoint (hr) Value: 6
  misc_feature: MA Experiment 108561 PARAMETER Experiment Name: At_100uM_ABA_cDNA_P Parameter: Tissue Value: Aerial
  misc_feature: MA Experiment 108561 PARAMETER Experiment Name: At_100uM_ABA_cDNA_P Parameter: Treatment Value: 100uM ABA vs. No Treatment
  misc_feature: MA Experiment ID: 108572 Result: Down-regulated in Transcription
  misc_feature: MA Experiment 108572 PARAMETER Experiment Name: At_Drought_cDNA_P Parameter: Timepoint (hr) Value: 1
  misc_feature: MA Experiment 108572 PARAMETER Experiment Name: At_Drought_cDNA_P Parameter: Tissue Value: Aerial
  misc_feature: MA Experiment 108572 PARAMETER Experiment Name: At_Drought_cDNA_P Parameter: Treatment Value: Drought vs. No Drought
  misc_feature: MA Experiment ID: 108573 Result: Down-regulated in Transcription
  misc_feature: MA Experiment 108573 PARAMETER Experiment Name: At_Drought_cDNA_P Parameter: Timepoint (hr) Value: 6
  misc_feature: MA Experiment 108573 PARAMETER Experiment Name: At_Drought_cDNA_P Parameter: Tissue Value: Aerial
  misc_feature: MA Experiment 108573 PARAMETER Experiment Name: At_Drought_cDNA_P Parameter: Treatment Value: Drought vs. No Drought
  misc_feature: MA Experiment ID: 108577 Result: Down-regulated in Transcription
  misc_feature: MA Experiment 108577 PARAMETER Experiment Name: At_42deg_Heat_cDNA_P Parameter: Temperature (deg C) Value: 42 vs. 22
  misc_feature: MA Experiment 108577 PARAMETER Experiment Name: At_42deg_Heat_cDNA_P Parameter: Timepoint (hr) Value: 6
  misc_feature: MA Experiment 108577 PARAMETER Experiment Name: At_42deg_Heat_cDNA_P Parameter: Tissue Value: Aerial
  misc_feature: MA Experiment ID: 108595 Result: Down-regulated in Transcription
  misc_feature: MA Experiment 108595 PARAMETER Experiment Name: At_Ler-pi_Ovule_cDNA_P Parameter: Plant Line Value: null
  misc_feature: MA Experiment ID: 20000173 Result: Down-regulated in Transcription
  misc_feature: MA Experiment 20000173 PARAMETER Experiment Name: At_42deg_Heat_P Parameter: Age (day) Value: 14
  misc_feature: MA Experiment 20000173 PARAMETER Experiment Name: At_42deg_Heat_P Parameter: Organism Value: A. thaliana
  misc_feature: MA Experiment 20000173 PARAMETER Experiment Name: At_42deg_Heat_P Parameter: Plant Line Value: WS
  misc_feature: MA Experiment 20000173 PARAMETER Experiment Name: At_42deg_Heat_P Parameter: Temperature (deg C) Value: 42 vs. 22
  misc_feature: MA Experiment 20000173 PARAMETER Experiment Name: At_42deg_Heat_P Parameter: Timepoint (hr) Value: 6
  misc_feature: MA Experiment 20000173 PARAMETER Experiment Name: At_42deg_Heat_P Parameter: Tissue Value: Aerial
  misc_feature: MA Experiment ID: 20000179 Result: Down-regulated in Transcription
  misc_feature: MA Experiment 20000179 PARAMETER Experiment Name: At_Germinating_Seeds_P Parameter: Age (hr) Value: 6 vs. 0
  misc_feature: MA Experiment 20000179 PARAMETER Experiment Name: At_Germinating_Seeds_P Parameter: Tissue Value: Germinating Seeds
  misc_feature: MA Experiment ID: 20000185 Result: Down-regulated in Transcription
  misc_feature: MA Experiment 20000185 PARAMETER Experiment Name: At_Roots__P Parameter: Age (day) Value: 7 vs. 21
  misc_feature: MA Experiment 20000185 PARAMETER Experiment Name: At_Roots__P Parameter: Organism Value: A. thaliana
  misc_feature: MA Experiment 20000185 PARAMETER Experiment Name: At_Roots__P Parameter: Tissue Value: Roots vs. Whole Plant
  misc_feature: MA Experiment ID: 20000264 Result: Down-regulated in Transcription
  misc_feature: MA Experiment 20000264 PARAMETER Experiment Name: At_Open_Flower_P Parameter: Age (day) Value: 21
  misc_feature: MA Experiment 20000264 PARAMETER Experiment Name: At_Open_Flower_P Parameter: Plant Line Value: WS
  misc_feature: MA Experiment 20000264 PARAMETER Experiment Name: At_Open_Flower_P Parameter: Tissue Value: Open Flower vs. Whole Plant
  misc_feature: MA Experiment ID: 20000268 Result: Down-regulated in Transcription
  misc_feature: MA Experiment 20000268 PARAMETER Experiment Name: At_100mM_NaCl__P Parameter: Age (day) Value: 14
  misc_feature: MA Experiment 20000268 PARAMETER Experiment Name: At_100mM_NaCl__P Parameter: Organism Value: A. thaliana
  misc_feature: MA Experiment 20000268 PARAMETER Experiment Name: At_100mM_NaCl__P Parameter: Plant Line Value: WS
  misc_feature: MA Experiment 20000268 PARAMETER Experiment Name: At_100mM_NaCl__P Parameter: Timepoint (hr) Value: 6
  misc_feature: MA Experiment 20000268 PARAMETER Experiment Name: At_100mM_NaCl__P Parameter: Tissue Value: Whole Plant
  misc_feature: MA Experiment 20000268 PARAMETER Experiment Name: At_100mM_NaCl__P Parameter: Treatment Value: 100mM NaCl vs. No Treatment
  misc_feature: MA Experiment ID: 20000286 Result: Down-regulated in Transcription
  misc_feature: MA Experiment 20000286 PARAMETER Experiment Name: At_Open_Flower_P Parameter: Age (day) Value: 21
  misc_feature: MA Experiment 20000286 PARAMETER Experiment Name: At_Open_Flower_P Parameter: Plant Line Value: WS
  misc_feature: MA Experiment 20000286 PARAMETER Experiment Name: At_Open_Flower_P Parameter: Tissue Value: Half Open vs. Whole Plant
  misc_feature: MA Experiment ID: 20000436 Result: Down-regulated in Transcription
  misc_feature: MA Experiment 20000436 PARAMETER Experiment Name: At_Drought_P Parameter: Age (day) Value: 7
  misc_feature: MA Experiment 20000436 PARAMETER Experiment Name: At_Drought_P Parameter: Organism Value: A. thaliana
  misc_feature: MA Experiment 20000436 PARAMETER Experiment Name: At_Drought_P Parameter: Plant Line Value: WS
  misc_feature: MA Experiment 20000436 PARAMETER Experiment Name: At_Drought_P Parameter: Timepoint (hr) Value: 12
  misc_feature: MA Experiment 20000436 PARAMETER Experiment Name: At_Drought_P Parameter: Tissue Value: Whole Plant
  misc_feature: MA Experiment 20000436 PARAMETER Experiment Name: At_Drought_P Parameter: Treatment Value: Drought vs. No Drought
  misc_feature: MA Experiment ID: 20000437 Result: Down-regulated in Transcription
  misc_feature: MA Experiment 20000437 PARAMETER Experiment Name: At_Drought_P Parameter: Age (day) Value: 8
  misc_feature: MA Experiment 20000437 PARAMETER Experiment Name: At_Drought_P Parameter: Organism Value: A. thaliana
  misc_feature: MA Experiment 20000437 PARAMETER Experiment Name: At_Drought_P Parameter: Plant Line Value: WS
  misc_feature: MA Experiment 20000437 PARAMETER Experiment Name: At_Drought_P Parameter: Timepoint (hr) Value: 24
  misc_feature: MA Experiment 20000437 PARAMETER Experiment Name: At_Drought_P Parameter: Tissue Value: Whole Plant
  misc_feature: MA Experiment 20000437 PARAMETER Experiment Name: At_Drought_P Parameter: Treatment Value: Drought vs. No Drought
  misc_feature: MA Experiment ID: 20000439 Result: Down-regulated in Transcription
  misc_feature: MA Experiment 20000439 PARAMETER Experiment Name: At_Roots__P Parameter: Age (day) Value: 14 vs. 21
  misc_feature: MA Experiment 20000439 PARAMETER Experiment Name: At_Roots__P Parameter: Organism Value: A. thaliana
  misc_feature: MA Experiment 20000439 PARAMETER Experiment Name: At_Roots__P Parameter: Tissue Value: Roots vs. Whole Plant
  misc_feature: MA Experiment ID: 20000794 Result: Down-regulated in Transcription
  misc_feature: MA Experiment 20000794 PARAMETER Experiment Name: At_Petals_P Parameter: Age (day) Value: 23-25 days
  misc_feature: MA Experiment 20000794 PARAMETER Experiment Name: At_Petals_P Parameter: Plant Line Value: WS
  misc_feature: MA Experiment 20000794 PARAMETER Experiment Name: At_Petals_P Parameter: Tissue Value: Petals vs. Whole plant
  misc_feature: MA Experiment ID: 20001554 Result: Down-regulated in Transcription
  misc_feature: MA Experiment 20001554 PARAMETER Experiment Name: At_Drought_Soil_Dry_P Parameter: Age (day) Value: 21
  misc_feature: MA Experiment 20001554 PARAMETER Experiment Name: At_Drought_Soil_Dry_P Parameter: Organism Value: A. thaliana
  misc_feature: MA Experiment 20001554 PARAMETER Experiment Name: At_Drought_Soil_Dry_P Parameter: Plant Line Value: WS
  misc_feature: MA Experiment 20001554 PARAMETER Experiment Name: At_Drought_Soil_Dry_P Parameter: Post Timepoint (hr) Value: None
  misc_feature: MA Experiment 20001554 PARAMETER Experiment Name: At_Drought_Soil_Dry_P Parameter: Post-Treatment Value: None
  misc_feature: MA Experiment 20001554 PARAMETER Experiment Name: At_Drought_Soil_Dry_P Parameter: Timepoint (day) Value: 7
  misc_feature: MA Experiment 20001554 PARAMETER Experiment Name: At_Drought_Soil_Dry_P Parameter: Treatment Value: Drought vs. No Drought
  misc_feature: MA Experiment ID: 20001555 Result: Down-regulated in Transcription
  misc_feature: MA Experiment 20001555 PARAMETER Experiment Name: At_Drought_Soil_Dry_P Parameter: Age (day) Value: 24
  misc_feature: MA Experiment 20001555 PARAMETER Experiment Name: At_Drought_Soil_Dry_P Parameter: Organism Value: A. thaliana
  misc_feature: MA Experiment 20001555 PARAMETER Experiment Name: At_Drought_Soil_Dry_P Parameter: Plant Line Value: WS
  misc_feature: MA Experiment 20001555 PARAMETER Experiment Name: At_Drought_Soil_Dry_P Parameter: Post Timepoint (hr) Value: None
  misc_feature: MA Experiment 20001555 PARAMETER Experiment Name: At_Drought_Soil_Dry_P Parameter: Post-Treatment Value: None
  misc_feature: MA Experiment 20001555 PARAMETER Experiment Name: At_Drought_Soil_Dry_P Parameter: Timepoint (day) Value: 10
  misc_feature: MA Experiment 20001555 PARAMETER Experiment Name: At_Drought_Soil_Dry_P Parameter: Treatment Value: Drought vs. No Drought
  misc_feature: MA Experiment ID: 20001556 Result: Down-regulated in Transcription
  misc_feature: MA Experiment 20001556 PARAMETER Experiment Name: At_Drought_Soil_Dry_P Parameter: Age (day) Value: 26
  misc_feature: MA Experiment 20001556 PARAMETER Experiment Name: At_Drought_Soil_Dry_P Parameter: Organism Value: A. thaliana
  misc_feature: MA Experiment 20001556 PARAMETER Experiment Name: At_Drought_Soil_Dry_P Parameter: Plant Line Value: WS
  misc_feature: MA Experiment 20001556 PARAMETER Experiment Name: At_Drought_Soil_Dry_P Parameter: Post Timepoint (hr) Value: None
  misc_feature: MA Experiment 20001556 PARAMETER Experiment Name: At_Drought_Soil_Dry_P Parameter: Post-Treatment Value: None
  misc_feature: MA Experiment 20001556 PARAMETER Experiment Name: At_Drought_Soil_Dry_P Parameter: Timepoint (day) Value: 12
  misc_feature: MA Experiment 20001556 PARAMETER Experiment Name: At_Drought_Soil_Dry_P Parameter: Treatment Value: Drought vs. No Drought
  misc_feature: MA Experiment ID: 20001557 Result: Up-regulated in Transcription
  misc_feature: MA Experiment 20001557 PARAMETER Experiment Name: At_Drought_Soil_Dry_P Parameter: Age (day) Value: 27
  misc_feature: MA Experiment 20001557 PARAMETER Experiment Name: At_Drought_Soil_Dry_P Parameter: Organism Value: A. thaliana
  misc_feature: MA Experiment 20001557 PARAMETER Experiment Name: At_Drought_Soil_Dry_P Parameter: Plant Line Value: WS
  misc_feature: MA Experiment 20001557 PARAMETER Experiment Name: At_Drought_Soil_Dry_P Parameter: Post Timepoint (hr) Value: 3
  misc_feature: MA Experiment 20001557 PARAMETER Experiment Name: At_Drought_Soil_Dry_P Parameter: Post-Treatment Value: Re-Water vs. No Drought
  misc_feature: MA Experiment 20001557 PARAMETER Experiment Name: At_Drought_Soil_Dry_P Parameter: Timepoint (day) Value: 13
  misc_feature: MA Experiment 20001557 PARAMETER Experiment Name: At_Drought_Soil_Dry_P Parameter: Treatment Value: Drought vs. No Drought
  misc_feature: MA Experiment ID: 20001756 Result: Up-regulated in Transcription
  misc_feature: MA Experiment 20001756 PARAMETER Experiment Name: At_50mM_NH4NO3_L-to-H_P Parameter: Timepoint (hr) Value: 4
  misc_feature: MA Experiment 20001756 PARAMETER Experiment Name: At_50mM_NH4NO3_L-to-H_P Parameter: Tissue Value: Leaf
  misc_feature: MA Experiment 20001756 PARAMETER Experiment Name: At_50mM_NH4NO3_L-to-H_P Parameter: Treatment Value: 50mM NH4NO3 vs 100mM Mannitol
  misc_feature: MA Experiment ID: 20001757 Result: Up-regulated in Transcription
  misc_feature: MA Experiment 20001757 PARAMETER Experiment Name: At_50mM_NH4NO3_L-to-H_P Parameter: Timepoint (hr) Value: 6
  misc_feature: MA Experiment 20001757 PARAMETER Experiment Name: At_50mM_NH4NO3_L-to-H_P Parameter: Tissue Value: Leaf
  misc_feature: MA Experiment 20001757 PARAMETER Experiment Name: At_50mM_NH4NO3_L-to-H_P Parameter: Treatment Value: 50mM NH4NO3 vs 100mM Mannitol
  misc_feature: MA Experiment ID: 20001904 Result: Down-regulated in Transcription
  misc_feature: MA Experiment 20001904 PARAMETER Experiment Name: At_Drought_Reproduction_P Parameter: Age (day) Value: 37
  misc_feature: MA Experiment 20001904 PARAMETER Experiment Name: At_Drought_Reproduction_P Parameter: Organism Value: A. thaliana
  misc_feature: MA Experiment 20001904 PARAMETER Experiment Name: At_Drought_Reproduction_P Parameter: Plant Line Value: WS
  misc_feature: MA Experiment 20001904 PARAMETER Experiment Name: At_Drought_Reproduction_P Parameter: Timepoint (day) Value: 7
  misc_feature: MA Experiment 20001904 PARAMETER Experiment Name: At_Drought_Reproduction_P Parameter: Tissue Value: Rosettes
  misc_feature: MA Experiment 20001904 PARAMETER Experiment Name: At_Drought_Reproduction_P Parameter: Treatment Value: Drought vs. No Drought
  misc_feature: MA Experiment ID: 20001906 Result: Down-regulated in Transcription
  misc_feature: MA Experiment 20001906 PARAMETER Experiment Name: At_Drought_Reproduction_P Parameter: Age (day) Value: 35
  misc_feature: MA Experiment 20001906 PARAMETER Experiment Name: At_Drought_Reproduction_P Parameter: Organism Value: A. thaliana
  misc_feature: MA Experiment 20001906 PARAMETER Experiment Name: At_Drought_Reproduction_P Parameter: Plant Line Value: WS
  misc_feature: MA Experiment 20001906 PARAMETER Experiment Name: At_Drought_Reproduction_P Parameter: Timepoint (day) Value: 5
  misc_feature: MA Experiment 20001906 PARAMETER Experiment Name: At_Drought_Reproduction_P Parameter: Tissue Value: Siliques
  misc_feature: MA Experiment 20001906 PARAMETER Experiment Name: At_Drought_Reproduction_P Parameter: Treatment Value: Drought vs. No Drought

SEQ ID NO: 46745 - protein, 208 aa, Arabidopsis thaliana; identical to SEQ ID NO: 23207
  peptide (1)..(208): Ceres Seq. ID no. 13591957
  misc_feature (52)..(198): Pfam Name: Cupin Pfam Description: Cupin
  misc_feature (52)..(198): Pfam Name: Cupin Pfam Description: Cupin
  misc_feature (52)..(198): Pfam Name: Cupin Pfam Description: Cupin
  misc_feature (52)..(198): Pfam Name: Cupin Pfam Description: Cupin
  misc_feature (6)..(207): Homolog of NCBI NO: 18201941 NR Description: Auxin-binding protein ABP19b precursor
  misc_feature (1)..(207): Homolog of NCBI NO: 15242028 NR Description: germin-like protein (AtGER3) [Arabidopsis
  misc_feature (6)..(207): Homolog of NCBI NO: 18203684 NR Description: Auxin-binding protein ABP19a precursor
  misc_feature (5)..(207): Homolog of NCBI NO: 18201940 NR Description: Auxin-binding protein ABP20 precursor
  misc_feature (1)..(208): Homolog of NCBI NO: 13277342 NR Description: Germin-like protein [Pisum sativum]
  misc_feature (6)..(207): Homolog of NCBI NO: 18201941 NR Description: Auxin-binding protein ABP19b precursor
  misc_feature (6)..(207): Homolog of NCBI NO: 18203684 NR Description: Auxin-binding protein ABP19a precursor
  misc_feature (1)..(208): Homolog of NCBI NO: 13277342 NR Description: Germin-like protein [Pisum sativum]
  misc_feature (5)..(207): Homolog of NCBI NO: 18201940 NR Description: Auxin-binding protein ABP20 precursor
  misc_feature (6)..(207): Homolog of NCBI NO: 18203684 NR Description: Auxin-binding protein ABP19a precursor
  misc_feature (1)..(207): Homolog of NCBI NO: 15242028 NR Description: germin-like protein (AtGER3) [Arabidopsis
  misc_feature (6)..(207): Homolog of NCBI NO: 18201941 NR Description: Auxin-binding protein ABP19b precursor
  misc_feature (1)..(208): Homolog of NCBI NO: 15218535 NR Description: germin-like protein (AtGER1) [Arabidopsis
  misc_feature (1)..(208): Homolog of NCBI NO: 17473703 NR Description: germin-like protein [Arabidopsis thaliana]
  misc_feature (1)..(208): Homolog of NCBI NO: 1592672 NR Description: germin1 [Arabidopsis thaliana]
  misc_feature (5)..(208): Homolog of NCBI NO: 1934726 NR Description: germin-like protein [Arabidopsis thaliana]
  misc_feature (1)..(208): Homolog of NCBI NO: 1169941 NR Description: Germin-like protein 1 precursor
  misc_feature (1)..(208): Homolog of NCBI NO: 15218535 NR Description: germin-like protein (AtGER1) [Arabidopsis
  misc_feature (1)..(208): Homolog of NCBI NO: 17473703 NR Description: germin-like protein [Arabidopsis thaliana]
  misc_feature (1)..(208): Homolog of NCBI NO: 1592672 NR Description: germin1 [Arabidopsis thaliana]
  misc_feature (5)..(208): Homolog of NCBI NO: 1934726 NR Description: germin-like protein [Arabidopsis thaliana]
  misc_feature (1)..(208): Homolog of NCBI NO: 1169941 NR Description: Germin-like protein 1 precursor
  misc_feature (1)..(208): Homolog of NCBI NO: 13277342 NR Description: Germin-like protein [Pisum sativum]
  misc_feature (5)..(207): Homolog of NCBI NO: 18201940 NR Description: Auxin-binding protein ABP20 precursor
  misc_feature (6)..(207): Homolog of NCBI NO: 18203684 NR Description: Auxin-binding protein ABP19a precursor
  misc_feature (1)..(207): Homolog of NCBI NO: 15242028 NR Description: germin-like protein (AtGER3) [Arabidopsis
  misc_feature (6)..(207): Homolog of NCBI NO: 18201941 NR Description: Auxin-binding protein ABP19b precursor
  misc_feature (1)..(208): Homolog of NCBI NO: 15218535 NR Description: germin-like protein (AtGER1) [Arabidopsis
  misc_feature (1)..(208): Homolog of NCBI NO: 17473703 NR Description: germin-like protein [Arabidopsis thaliana]
  misc_feature (1)..(208): Homolog of NCBI NO: 1592672 NR Description: germin1 [Arabidopsis thaliana]
  misc_feature (5)..(208): Homolog of NCBI NO: 1934726 NR Description: germin-like protein [Arabidopsis thaliana]
  misc_feature (1)..(208): Homolog of NCBI NO: 1169941 NR Description: Germin-like protein 1 precursor
  misc_feature (1)..(208): Homolog of NCBI NO: 13277342 NR Description: Germin-like protein [Pisum sativum]
  misc_feature (5)..(207): Homolog of NCBI NO: 18201940 NR Description: Auxin-binding protein ABP20 precursor
  misc_feature (1)..(207): Homolog of NCBI NO: 15242028 NR Description: germin-like protein (AtGER3) [Arabidopsis
  misc_feature (1)..(208): Homolog of NCBI NO: 1169941 NR Description: Germin-like protein 1 precursor
  misc_feature (5)..(208): Homolog of NCBI NO: 1934726 NR Description: germin-like protein [Arabidopsis thaliana]
  misc_feature (1)..(208): Homolog of NCBI NO: 1592672 NR Description: germin1 [Arabidopsis thaliana]
  misc_feature (1)..(208): Homolog of NCBI NO: 17473703 NR Description: germin-like protein [Arabidopsis thaliana]
  misc_feature (1)..(208): Homolog of NCBI NO: 15218535 NR Description: germin-like protein (AtGER1) [Arabidopsis

SEQ ID NO: 46746 - protein, 110 aa, Arabidopsis thaliana; identical to SEQ ID NO: 31047
  peptide (1)..(110): Ceres Seq. ID no. 13591958
  misc_feature (1)..(100): Pfam Name: Cupin Pfam Description: Cupin
  misc_feature (1)..(100): Pfam Name: Cupin Pfam Description: Cupin
  misc_feature (1)..(100): Pfam Name: Cupin Pfam Description: Cupin
  misc_feature (1)..(100): Pfam Name: Cupin Pfam Description: Cupin
  misc_feature (1)..(109): Homolog of NCBI NO: 18201941 NR Description: Auxin-binding protein ABP19b precursor
  misc_feature (1)..(109): Homolog of NCBI NO: 15242028 NR Description: germin-like protein (AtGER3) [Arabidopsis
  misc_feature (1)..(109): Homolog of NCBI NO: 18203684 NR Description: Auxin-binding protein ABP19a precursor
  misc_feature (1)..(109): Homolog of NCBI NO: 18201940 NR Description: Auxin-binding protein ABP20 precursor
  misc_feature (1)..(110): Homolog of NCBI NO: 13277342 NR Description: Germin-like protein [Pisum sativum]
  misc_feature (1)..(109): Homolog of NCBI NO: 18201941 NR Description: Auxin-binding protein ABP19b precursor
  misc_feature (1)..(109): Homolog of NCBI NO: 18203684 NR Description: Auxin-binding protein ABP19a precursor
  misc_feature (1)..(110): Homolog of NCBI NO: 13277342 NR Description: Germin-like protein [Pisum sativum]
  misc_feature (1)..(109): Homolog of NCBI NO: 18201940 NR Description: Auxin-binding protein ABP20 precursor
  misc_feature (1)..(109): Homolog of NCBI NO: 18203684 NR Description: Auxin-binding protein ABP19a precursor
  misc_feature (1)..(109): Homolog of NCBI NO: 15242028 NR Description: germin-like protein (AtGER3) [Arabidopsis
  misc_feature (1)..(109): Homolog of NCBI NO: 18201941 NR Description: Auxin-binding protein ABP19b precursor
  misc_feature (1)..(110): Homolog of NCBI NO: 15218535 NR Description: germin-like protein (AtGER1) [Arabidopsis
  misc_feature (1)..(110): Homolog of NCBI NO: 17473703 NR Description: germin-like protein [Arabidopsis thaliana]
  misc_feature (1)..(110): Homolog of NCBI NO: 1592672 NR Description: germin1 [Arabidopsis thaliana]
  misc_feature (1)..(110): Homolog of NCBI NO: 1934726 NR Description: germin-like protein [Arabidopsis thaliana]
  misc_feature (1)..(110): Homolog of NCBI NO: 1169941 NR Description: Germin-like protein 1 precursor
  misc_feature (1)..(110): Homolog of NCBI NO: 15218535 NR Description: germin-like protein (AtGER1) [Arabidopsis
  misc_feature (1)..(110): Homolog of NCBI NO: 17473703 NR Description: germin-like protein [Arabidopsis thaliana]
  misc_feature (1)..(110): Homolog of NCBI NO: 1592672 NR Description: germin1 [Arabidopsis thaliana]
  misc_feature (1)..(110): Homolog of NCBI NO: 1934726 NR Description: germin-like protein [Arabidopsis thaliana]
  misc_feature (1)..(110): Homolog of NCBI NO: 1169941 NR Description: Germin-like protein 1 precursor
  misc_feature (1)..(110): Homolog of NCBI NO: 13277342 NR Description: Germin-like protein [Pisum sativum]
  misc_feature (1)..(109): Homolog of NCBI NO: 18201940 NR Description: Auxin-binding protein ABP20 precursor
  misc_feature (1)..(109): Homolog of NCBI NO: 18203684 NR Description: Auxin-binding protein ABP19a precursor
  misc_feature (1)..(109): Homolog of NCBI NO: 15242028 NR Description: germin-like protein (AtGER3) [Arabidopsis
  misc_feature (1)..(109): Homolog of NCBI NO: 18201941 NR Description: Auxin-binding protein ABP19b precursor
  misc_feature (1)..(110): Homolog of NCBI NO: 15218535 NR Description: germin-like protein (AtGER1) [Arabidopsis
  misc_feature (1)..(110): Homolog of NCBI NO: 17473703 NR Description: germin-like protein [Arabidopsis thaliana]
  misc_feature (1)..(110): Homolog of NCBI NO: 1592672 NR Description: germin1 [Arabidopsis thaliana]
  misc_feature (1)..(110): Homolog of NCBI NO: 1934726 NR Description: germin-like protein [Arabidopsis thaliana]
  misc_feature (1)..(110): Homolog of NCBI NO: 1169941 NR Description: Germin-like protein 1 precursor
  misc_feature (1)..(110): Homolog of NCBI NO: 13277342 NR Description: Germin-like protein [Pisum sativum]
  misc_feature (1)..(109): Homolog of NCBI NO: 18201940 NR Description: Auxin-binding protein ABP20 precursor
  misc_feature (1)..(109): Homolog of NCBI NO: 15242028 NR Description: germin-like protein (AtGER3) [Arabidopsis
  misc_feature (1)..(110): Homolog of NCBI NO: 1169941 NR Description: Germin-like protein 1 precursor
  misc_feature (1)..(110): Homolog of NCBI NO: 1934726 NR Description: germin-like protein [Arabidopsis thaliana]
  misc_feature (1)..(110): Homolog of NCBI NO: 1592672 NR Description: germin1 [Arabidopsis thaliana]
  misc_feature (1)..(110): Homolog of NCBI NO: 17473703 NR Description: germin-like protein [Arabidopsis thaliana]
  misc_feature (1)..(110): Homolog of NCBI NO: 15218535 NR Description: germin-like protein (AtGER1) [Arabidopsis

SEQ ID NO: 46747 - DNA, 2131 bp, Arabidopsis thaliana; identical to SEQ ID NO: 45958
  misc_feature (1)..(2131): Ceres Seq. ID no. 12600445
  misc_feature: MA Experiment ID: 20000179 Result: Up-regulated in Transcription
  misc_feature: MA Experiment 20000179 PARAMETER Experiment Name: At_Germinating_Seeds_P Parameter: Age (hr) Value: 6 vs. 0
  misc_feature: MA Experiment 20000179 PARAMETER Experiment Name: At_Germinating_Seeds_P Parameter: Tissue Value: Germinating Seeds
  misc_feature: MA Experiment ID: 20000234 Result: Up-regulated in Transcription
  misc_feature: MA Experiment 20000234 PARAMETER Experiment Name: At_Siliques_P Parameter: Age (day) Value: 21
  misc_feature: MA Experiment 20000234 PARAMETER Experiment Name: At_Siliques_P Parameter: Organism Value: A. thaliana
  misc_feature: MA Experiment 20000234 PARAMETER Experiment Name: At_Siliques_P Parameter: Plant Line Value: WS
  misc_feature: MA Experiment 20000234 PARAMETER Experiment Name: At_Siliques_P Parameter: Tissue Value: Less Than 5mm Siliques vs. Whole Plant
  misc_feature: MA Experiment ID: 20000286 Result: Up-regulated in Transcription
  misc_feature: MA Experiment 20000286 PARAMETER Experiment Name: At_Open_Flower_P Parameter: Age (day) Value: 21
  misc_feature: MA Experiment 20000286 PARAMETER Experiment Name: At_Open_Flower_P Parameter: Plant Line Value: WS
  misc_feature: MA Experiment 20000286 PARAMETER Experiment Name: At_Open_Flower_P Parameter: Tissue Value: Half Open vs. Whole Plant
  misc_feature: MA Experiment ID: 20000439 Result: Up-regulated in Transcription
  misc_feature: MA Experiment 20000439 PARAMETER Experiment Name: At_Roots__P Parameter: Age (day) Value: 14 vs. 21
  misc_feature: MA Experiment 20000439 PARAMETER Experiment Name: At_Roots__P Parameter: Organism Value: A. thaliana
  misc_feature: MA Experiment 20000439 PARAMETER Experiment Name: At_Roots__P Parameter: Tissue Value: Roots vs. Whole Plant

SEQ ID NO: 46748 - protein, 646 aa, Arabidopsis thaliana; identical to SEQ ID NO: 45959
  peptide (1)..(646): Ceres Seq. ID no. 12600446
  misc_feature (362)..(615): Pfam Name: Malic enzyme, NAD binding domain Pfam Description: Malic enzyme, NAD binding domain
  misc_feature (362)..(615): Pfam Name: Malic enzyme, NAD binding domain Pfam Description: Malic enzyme, NAD binding domain
  misc_feature (90)..(646): Homolog of NCBI NO: 126737 NR Description: NADP-DEPENDENT MALIC ENZYME, CHLOROPLAST
  misc_feature (78)..(646): Homolog of NCBI NO: 7431235 NR Description: probable malate dehydrogenase
  misc_feature (55)..(646): Homolog of NCBI NO: 7431234 NR Description: malate dehydrogenase
  misc_feature (68)..(646): Homolog of NCBI NO: 282848 NR Description: malate dehydrogenase (NADP+) (EC 1.1.1.40) (clone 064) - western balsam poplar x
  misc_feature (68)..(646): Homolog of NCBI NO: 228412 NR Description: malic enzyme
  misc_feature (90)..(646): Homolog of NCBI NO: 126737 NR Description: NADP-DEPENDENT MALIC ENZYME, CHLOROPLAST
  misc_feature (55)..(646): Homolog of NCBI NO: 7431234 NR Description: malate dehydrogenase
  misc_feature (68)..(646): Homolog of NCBI NO: 228412 NR Description: malic enzyme
  misc_feature (1)..(646): Homolog of NCBI NO: 8118507 NR Description: NADP-dependent malic protein [Ricinus communis]
  misc_feature (1)..(646): Homolog of NCBI NO: 7431231 NR Description: malate dehydrogenase
  misc_feature (1)..(646): Homolog of NCBI NO: 1561774 NR Description: malate dehydrogenase [Vitis vinifera]
  misc_feature (19)..(646): Homolog of NCBI NO: 547886 NR Description: NADP-DEPENDENT MALIC ENZYME, CHLOROPLAST
  misc_feature (68)..(646): Homolog of NCBI NO: 1346485 NR Description: NADP-DEPENDENT MALIC ENZYME (NADP-ME)
  misc_feature (68)..(646): Homolog of NCBI NO: 282848 NR Description: malate dehydrogenase (NADP+) (EC 1.1.1.40) (clone 064) - western balsam poplar x
  misc_feature (78)..(646): Homolog of NCBI NO: 7431235 NR Description: probable malate dehydrogenase
  misc_feature (68)..(646): Homolog of NCBI NO: 1346485 NR Description: NADP-DEPENDENT MALIC ENZYME (NADP-ME)
  misc_feature (19)..(646): Homolog of NCBI NO: 547886 NR Description: NADP-DEPENDENT MALIC ENZYME, CHLOROPLAST
  misc_feature (1)..(646): Homolog of NCBI NO: 1561774 NR Description: malate dehydrogenase [Vitis vinifera]
  misc_feature (1)..(646): Homolog of NCBI NO: 7431231 NR Description: malate dehydrogenase
  misc_feature (1)..(646): Homolog of NCBI NO: 8118507 NR Description: NADP-dependent malic protein [Ricinus communis]

SEQ ID NO: 46749 - protein, 552 aa, Arabidopsis thaliana; identical to SEQ ID NO: 45960
  peptide (1)..(552): Ceres Seq. ID no. 12600447
  misc_feature (268)..(521): Pfam Name: Malic enzyme, NAD binding domain Pfam Description: Malic enzyme, NAD binding domain
  misc_feature (268)..(521): Pfam Name: Malic enzyme, NAD binding domain Pfam Description: Malic enzyme, NAD binding domain
  misc_feature (1)..(552): Homolog of NCBI NO: 126737 NR Description: NADP-DEPENDENT MALIC ENZYME, CHLOROPLAST
  misc_feature (1)..(552): Homolog of NCBI NO: 7431235 NR Description: probable malate dehydrogenase
  misc_feature (1)..(552): Homolog of NCBI NO: 7431234 NR Description: malate dehydrogenase
  misc_feature (1)..(552): Homolog of NCBI NO: 282848 NR Description: malate dehydrogenase (NADP+) (EC 1.1.1.40) (clone 064) - western balsam poplar x
  misc_feature (1)..(552): Homolog of NCBI NO: 228412 NR Description: malic enzyme
  misc_feature (1)..(552): Homolog of NCBI NO: 126737 NR Description: NADP-DEPENDENT MALIC ENZYME, CHLOROPLAST
  misc_feature (1)..(552): Homolog of NCBI NO: 7431234 NR Description: malate dehydrogenase
  misc_feature (1)..(552): Homolog of NCBI NO: 228412 NR Description: malic enzyme
  misc_feature (1)..(552): Homolog of NCBI NO: 8118507 NR Description: NADP-dependent malic protein [Ricinus communis]
  misc_feature (1)..(552): Homolog of NCBI NO: 7431231 NR Description: malate dehydrogenase
  misc_feature (1)..(552): Homolog of NCBI NO: 1561774 NR Description: malate dehydrogenase [Vitis vinifera]
  misc_feature (1)..(552): Homolog of NCBI NO: 547886 NR Description: NADP-DEPENDENT MALIC ENZYME, CHLOROPLAST
  misc_feature (1)..(552): Homolog of NCBI NO: 1346485 NR Description: NADP-DEPENDENT MALIC ENZYME (NADP-ME)
  misc_feature (1)..(552): Homolog of NCBI NO: 282848 NR Description: malate dehydrogenase (NADP+) (EC 1.1.1.40) (clone 064) - western balsam poplar x
  misc_feature (1)..(552): Homolog of NCBI NO: 7431235 NR Description: probable malate dehydrogenase
  misc_feature (1)..(552): Homolog of NCBI NO: 1346485 NR Description: NADP-DEPENDENT MALIC ENZYME (NADP-ME)
  misc_feature (1)..(552): Homolog of NCBI NO: 547886 NR Description: NADP-DEPENDENT MALIC ENZYME, CHLOROPLAST
  misc_feature (1)..(552): Homolog of NCBI NO: 1561774 NR Description: malate dehydrogenase [Vitis vinifera]
  misc_feature (1)..(552): Homolog of NCBI NO: 7431231 NR Description: malate dehydrogenase
  misc_feature (1)..(552): Homolog of NCBI NO: 8118507 NR Description: NADP-dependent malic protein [Ricinus communis]

SEQ ID NO: 46750 - protein, 496 aa, Arabidopsis thaliana; identical to SEQ ID NO: 45961
  peptide (1)..(496): Ceres Seq. ID no. 12600448
  misc_feature (212)..(465): Pfam Name: Malic enzyme, NAD binding domain Pfam Description: Malic enzyme, NAD binding domain
  misc_feature (212)..(465): Pfam Name: Malic enzyme, NAD binding domain Pfam Description: Malic enzyme, NAD binding domain
  misc_feature (1)..(496): Homolog of NCBI NO: 126737 NR Description: NADP-DEPENDENT MALIC ENZYME, CHLOROPLAST
  misc_feature (1)..(496): Homolog of NCBI NO: 7431235 NR Description: probable malate dehydrogenase
  misc_feature (1)..(496): Homolog of NCBI NO: 7431234 NR Description: malate dehydrogenase
  misc_feature (1)..(496): Homolog of NCBI NO: 282848 NR Description: malate dehydrogenase (NADP+) (EC 1.1.1.40) (clone 064) - western balsam poplar x
  misc_feature (1)..(496): Homolog of NCBI NO: 228412 NR Description: malic enzyme
  misc_feature (1)..(496): Homolog of NCBI NO: 126737 NR Description: NADP-DEPENDENT MALIC ENZYME, CHLOROPLAST
  misc_feature (1)..(496): Homolog of NCBI NO: 7431234 NR Description: malate dehydrogenase
  misc_feature (1)..(496): Homolog of NCBI NO: 228412 NR Description: malic enzyme
  misc_feature (1)..(496): Homolog of NCBI NO: 8118507 NR Description: NADP-dependent malic protein [Ricinus communis]
  misc_feature (1)..(496): Homolog of NCBI NO: 7431231 NR Description: malate dehydrogenase
  misc_feature (1)..(496): Homolog of NCBI NO: 1561774 NR Description: malate dehydrogenase [Vitis vinifera]
  misc_feature (1)..(496): Homolog of NCBI NO: 547886 NR Description: NADP-DEPENDENT MALIC ENZYME, CHLOROPLAST
  misc_feature (1)..(496): Homolog of NCBI NO: 1346485 NR Description: NADP-DEPENDENT MALIC ENZYME (NADP-ME)
  misc_feature (1)..(496): Homolog of NCBI NO: 282848 NR Description: malate dehydrogenase (NADP+) (EC 1.1.1.40) (clone 064) - western balsam poplar x
  misc_feature (1)..(496): Homolog of NCBI NO: 7431235 NR Description: probable malate dehydrogenase
  misc_feature (1)..(496): Homolog of NCBI NO: 1346485 NR Description: NADP-DEPENDENT MALIC ENZYME (NADP-ME)
  misc_feature (1)..(496): Homolog of NCBI NO: 547886 NR Description: NADP-DEPENDENT MALIC ENZYME, CHLOROPLAST
  misc_feature (1)..(496): Homolog of NCBI NO: 1561774 NR Description: malate dehydrogenase [Vitis vinifera]
  misc_feature (1)..(496): Homolog of NCBI NO: 7431231 NR Description: malate dehydrogenase
  misc_feature (1)..(496): Homolog of NCBI NO: 8118507 NR Description: NADP-dependent malic protein [Ricinus communis]

SEQ ID NO: 46751 - DNA, 1689 bp, Arabidopsis thaliana; identical to SEQ ID NO: 38295
  misc_feature (1)..(1689): Ceres Seq. ID no. 12669827
  misc_feature: MA Experiment ID: 20000184 Result: Up-regulated in Transcription
  misc_feature: MA Experiment 20000184 PARAMETER Experiment Name: At_Shoots__P Parameter: Age (day) Value: 7
  misc_feature: MA Experiment 20000184 PARAMETER Experiment Name: At_Shoots__P Parameter: Tissue Value: Shoots vs. Whole Plant
  misc_feature: MA Experiment ID: 20000185 Result: Down-regulated in Transcription
  misc_feature: MA Experiment 20000185 PARAMETER Experiment Name: At_Roots__P Parameter: Age (day) Value: 7 vs. 21
  misc_feature: MA Experiment 20000185 PARAMETER Experiment Name: At_Roots__P Parameter: Organism Value: A. thaliana
  misc_feature: MA Experiment 20000185 PARAMETER Experiment Name: At_Roots__P Parameter: Tissue Value: Roots vs. Whole Plant
  misc_feature: MA Experiment ID: 20000437 Result: Down-regulated in Transcription
  misc_feature: MA Experiment 20000437 PARAMETER Experiment Name: At_Drought_P Parameter: Age (day) Value: 8
  misc_feature: MA Experiment 20000437 PARAMETER Experiment Name: At_Drought_P Parameter: Organism Value: A. thaliana
  misc_feature: MA Experiment 20000437 PARAMETER Experiment Name: At_Drought_P Parameter: Plant Line Value: WS
  misc_feature: MA Experiment 20000437 PARAMETER Experiment Name: At_Drought_P Parameter: Timepoint (hr) Value: 24
  misc_feature: MA Experiment 20000437 PARAMETER Experiment Name: At_Drought_P Parameter: Tissue Value: Whole Plant
  misc_feature: MA Experiment 20000437 PARAMETER Experiment Name: At_Drought_P Parameter: Treatment Value: Drought vs. No Drought
  misc_feature: MA Experiment ID: 20000438 Result: Up-regulated in Transcription
  misc_feature: MA Experiment 20000438 PARAMETER Experiment Name: At_Shoots__P Parameter: Age (day) Value: 14
  misc_feature: MA Experiment 20000438 PARAMETER Experiment Name: At_Shoots__P Parameter: Tissue Value: Shoots vs. Whole Plant
  misc_feature: MA Experiment ID: 20000439 Result: Down-regulated in Transcription
  misc_feature: MA Experiment 20000439 PARAMETER Experiment Name: At_Roots__P Parameter: Age (day) Value: 14 vs. 21
  misc_feature: MA Experiment 20000439 PARAMETER Experiment Name: At_Roots__P Parameter: Organism Value: A. thaliana
  misc_feature: MA Experiment 20000439 PARAMETER Experiment Name: At_Roots__P Parameter: Tissue Value: Roots vs. Whole Plant

SEQ ID NO: 46752 - protein, 504 aa, Arabidopsis thaliana; identical to SEQ ID NO: 38296
  peptide (1)..(504): Ceres Seq. ID no. 12669828
  misc_feature (105)..(309): Pfam Name: Elongation factor Tu GTP binding domain Pfam Description: Elongation factor Tu GTP binding domain
  misc_feature (105)..(309): Pfam Name: Elongation factor Tu GTP binding domain Pfam Description: Elongation factor Tu GTP binding domain
  misc_feature (29)..(504): Homolog of NCBI NO: 23397095 NR Description: putative chloroplast translation elongation
  misc_feature (29)..(504): Homolog of NCBI NO: 23397095 NR Description: putative chloroplast translation elongation
  misc_feature (29)..(504): Homolog of NCBI NO: 15237059 NR Description: elongation factor Tu, chloroplast precursor
  misc_feature (29)..(504): Homolog of NCBI NO: 15237059 NR Description: elongation factor Tu, chloroplast precursor

SEQ ID NO: 46753 - protein, 476 aa, Arabidopsis thaliana; identical to SEQ ID NO: 38297
  peptide (1)..(476): Ceres Seq. ID no. 12669829
  misc_feature (77)..(281): Pfam Name: Elongation factor Tu GTP binding domain Pfam Description: Elongation factor Tu GTP binding domain
  misc_feature (77)..(281): Pfam Name: Elongation factor Tu GTP binding domain Pfam Description: Elongation factor Tu GTP binding domain
  misc_feature (1)..(476): Homolog of NCBI NO: 23397095 NR Description: putative chloroplast translation elongation
  misc_feature (1)..(476): Homolog of NCBI NO: 23397095 NR Description: putative chloroplast translation elongation
  misc_feature (1)..(476): Homolog of NCBI NO: 15237059 NR Description: elongation factor Tu, chloroplast precursor
  misc_feature (1)..(476): Homolog of NCBI NO: 15237059 NR Description: elongation factor Tu, chloroplast precursor

SEQ ID NO: 46754 - protein, 376 aa, Arabidopsis thaliana; identical to SEQ ID NO: 38298
  peptide (1)..(376): Ceres Seq. ID no. 12669830
  misc_feature (1)..(181): Pfam Name: Elongation factor Tu GTP binding domain Pfam Description: Elongation factor Tu GTP binding domain
  misc_feature (1)..(181): Pfam Name: Elongation factor Tu GTP binding domain Pfam Description: Elongation factor Tu GTP binding domain
  misc_feature (1)..(376): Homolog of NCBI NO: 23397095 NR Description: putative chloroplast translation elongation
  misc_feature (1)..(376): Homolog of NCBI NO: 23397095 NR Description: putative chloroplast translation elongation
  misc_feature (1)..(376): Homolog of NCBI NO: 15237059 NR Description: elongation factor Tu, chloroplast precursor
  misc_feature (1)..(376): Homolog of NCBI NO: 15237059 NR Description: elongation factor Tu, chloroplast precursor

SEQ ID NO: 46755 - DNA, 2378 bp, Arabidopsis thaliana
  misc_feature (1)..(2378): Ceres Seq. ID no. 12600828
  misc_feature: MA Experiment ID: 20000327 Result: Down-regulated in Transcription
  misc_feature: MA Experiment 20000327 PARAMETER Experiment Name: At_42deg_Heat_Sub_P Parameter: Age (day) Value: 14
  misc_feature: MA Experiment 20000327 PARAMETER Experiment Name: At_42deg_Heat_Sub_P Parameter: Organism Value: A. thaliana
  misc_feature: MA Experiment 20000327 PARAMETER Experiment Name: At_42deg_Heat_Sub_P Parameter: Plant Line Value: WS
  misc_feature: MA Experiment 20000327 PARAMETER Experiment Name: At_42deg_Heat_Sub_P Parameter: Temperature (deg C) Value: 42 vs. 22
  misc_feature: MA Experiment 20000327 PARAMETER Experiment Name: At_42deg_Heat_Sub_P Parameter: Timepoint (hr) Value: 1
  misc_feature: MA Experiment 20000327 PARAMETER Experiment Name: At_42deg_Heat_Sub_P Parameter: Tissue Value: Aerial
  misc_feature: MA Experiment ID: 20000328 Result: Down-regulated in Transcription
  misc_feature: MA Experiment 20000328 PARAMETER Experiment Name: At_42deg_Heat_Sub_P Parameter: Age (day) Value: 14
  misc_feature: MA Experiment 20000328 PARAMETER Experiment Name: At_42deg_Heat_Sub_P Parameter: Organism Value: A. thaliana
  misc_feature: MA Experiment 20000328 PARAMETER Experiment Name: At_42deg_Heat_Sub_P Parameter: Plant Line Value: WS
  misc_feature: MA Experiment 20000328 PARAMETER Experiment Name: At_42deg_Heat_Sub_P Parameter: Temperature (deg C) Value: 42 vs. 22
  misc_feature: MA Experiment 20000328 PARAMETER Experiment Name: At_42deg_Heat_Sub_P Parameter: Timepoint (hr) Value: 6
  misc_feature: MA Experiment 20000328 PARAMETER Experiment Name: At_42deg_Heat_Sub_P Parameter: Tissue Value: Aerial
  misc_feature: MA Experiment ID: 20000355 Result: Down-regulated in Transcription
  misc_feature: MA Experiment 20000355 PARAMETER Experiment Name: At_Siliques_Sub_P Parameter: Age (day) Value: 21
  misc_feature: MA Experiment 20000355 PARAMETER Experiment Name: At_Siliques_Sub_P Parameter: Organism Value: A. thaliana
  misc_feature: MA Experiment 20000355 PARAMETER Experiment Name: At_Siliques_Sub_P Parameter: Plant Line Value: WS
  misc_feature: MA Experiment 20000355 PARAMETER Experiment Name: At_Siliques_Sub_P Parameter: Tissue Value: Less Than 5mm Siliques vs. Whole Plant
agaagaaagagaatagagagagagagagagttttgttcttcttctttctggttcctttgctttgctttggttgcgtgatctcctctctcatcaatcttcttcatcatcattctcatcatcattagcttcttgatttttttttccttctttttttcgtttcaagaaactaaacaaagtttctatttatggttttctgattcttcttctacagatctattatttgattctccttcgatcattgtcaacgttttcttcttttgtaatcatcacagttttttttgagaatttgttcatttttttttctcatatattgattcgagttctttcttcttgaatcttgttcttcatagatctagtttttgttttttactctctagatctatagatctgttgaattcacttctttaatccatctctgtgttcttgagttcctatggtctaagtcaaactcaagttcaagatctgttgaatttggaatcttgctggtgaagttagagatgaattatttcccagatgaagtaatagagcatgtattcgactttgtaacatctcacaaagacaggaatgctatatctcttgtatgcaaatcatggtacaagattgaaagatacagtaggcaaaaggttttcattggaaactgttatgccattaatccagagaggttgcttcggagattcccatgtctaaagtctttgactttgaaaggaaaacctcattttgcggatttcaatttggttcctcatgaatggggaggttttgtgctaccttggattgaggctttggctagaagccgtgtaggacttgaagagcttaggttgaagaggatggttgttactgatgagagtcttgagctgctttctcgttcttttgtcaattttaagtctttggtccttgttagctgtgaaggttttaccactgatggtcttgcctctattgccgctaattgcaggcatcttcgggatcttgatttgcaagagaatgaaatcgatgatcatagaggtcaatggttaagttgtttcccagacacttgcacgactcttgtcacgctaaactttgcgtgcctcgaaggagaaactaatctggttgctctagagaggcttgttgctaggtctccaaacctaaagagtctgaagctaaatcgtgcagtaccgttagatgcactcgcaaggttaatggcgtgtgcgccgcagatagttgacttaggagtagggtcttatgagaatgacccagattccgagtcttacttgaaactcatggctgtcataaagaaatgcacctcgttgaggagtttgtcgggttttctagaggctgctcctcactgtctctcagctttccacccaatatgtcataacctcacctccttgaatcttagttacgcagctgagattcatggtagccaccttattaagcttattcagcattgcaagaaacttcagcggttatggattttggatagtataggtgacaaagggcttgaagttgtagcttctacatgtaaagagttacaagagcttagggtttttccatctgatttactcggtggaggcaacacagctgtgaccgaagaaggtctagttgccatctcggcaggctgccctaagctccactctatactctacttctgccaacaaatgacaaacgcagctctcgtaaccgttgccaagaactgtccaaatttcatccgtttccgactctgcatcctcgagccaaacaaacccgatcacgtcacatctcaacctctagacgaaggctttggagcaatcgtcaaagcctgcaagagcctgagaaggctttctctctcaggtctccttacagaccaagtcttcctctacatcggaatgtacgcgaatcagctcgagatgctctccatagcctttgcaggagatacagacaaaggcatgctatatgtgttgaatggttgcaaaaagatgaagaaactagagataagggatagtccgtttggggacacggcgcttcttgctgatgtgagcaagtatgaaacaatgcgatccctttggatgtcttcatgtgaagtcacactcagtggatgcaaaaggctcgcagagaaagcgccatggctcaatgtagagatcataaacgagaatgataataaccggatggaagaaaacggacacgaggggaggcagaaagtggataagttgtatctgtaccggactgtggttgggacaagaatggatgcgccgccatttgtgtggattctctaagtccttttcagaccaaactggttctgattggtcgtcttccgttagtgtgtctttcccgaattaggtgtactttttgttttctttaaattaagacaagaactgattcttctgtgaaagccattctgtttttgtttttgactttcctccgttgat

SEQ ID NO: 46756 - protein, 575 aa, Arabidopsis thaliana
  peptide (1)..(575): Ceres Seq. ID no. 12600829
  misc_feature (1)..(47): Pfam Name: F-box domain Pfam Description: F-box domain
  misc_feature (4)..(575): Homolog of NCBI NO: 18423092 NR Description: transport inhibitor response 1 (TIR1), putative
  misc_feature (4)..(575): Homolog of NCBI NO: 13249030 NR Description: F-box containing protein TIR1
  misc_feature (5)..(575): Homolog of NCBI NO: 12083523 NR Description: similar to Arabidopsis thaliana transport
  misc_feature (4)..(575): Homolog of NCBI NO: 15027885 NR Description: putative F-box protein GRR1 protein 1, AtFBL18
  misc_feature (4)..(575): Homolog of NCBI NO: 12658970 NR Description: GRR1-like protein 1 [Arabidopsis thaliana]
  misc_feature (4)..(575): Homolog of NCBI NO: 18412177 NR Description: F-box protein GRR1-like protein 1, AtFBL18
  misc_feature (4)..(573): Homolog of NCBI NO: 18412567 NR Description: transport inhibitor response 1 (TIR1), AtFBL1
  misc_feature (1)..(575): Homolog of NCBI NO: 21740736 NR Description: OSJNBa0072K14.1 [Oryza sativa (japonica
  misc_feature (1)..(575): Homolog of NCBI NO: 18391439 NR Description: transport inhibitor response 1 (TIR1), putative
  misc_feature (1)..(575): Homolog of NCBI NO: 18405102 NR Description: transport inhibitor response 1 (TIR1), putative
MNYFPDEVIEHVFDFVTSHKDRNAISLVCKSWYKIERYSRQKVFIGNCYAINPERLLRRFPCLKSLTLKGKPHFADFNLVPHEWGGFVLPWIEALARSRVGLEELRLKRMVVTDESLELLSRSFVNFKSLVLVSCEGFTTDGLASIAANCRHLRDLDLQENEIDDHRGQWLSCFPDTCTTLVTLNFACLEGETNLVALERLVARSPNLKSLKLNRAVPLDALARLMACAPQIVDLGVGSYENDPDSESYLKLMAVIKKCTSLRSLSGFLEAAPHCLSAFHPICHNLTSLNLSYAAEIHGSHLIKLIQHCKKLQRLWILDSIGDKGLEVVASTCKELQELRVFPSDLLGGGNTAVTEEGLVAISAGCPKLHSILYFCQQMTNAALVTVAKNCPNFIRFRLCILEPNKPDHVTSQPLDEGFGAIVKACKSLRRLSLSGLLTDQVFLYIGMYANQLEMLSIAFAGDTDKGMLYVLNGCKKMKKLEIRDSPFGDTALLADVSKYETMRSLWMSSCEVTLSGCKRLAEKAPWLNVEIINENDNNRMEENGHEGRQKVDKLYLYRTVVGTRMDAPPFVWIL

SEQ ID NO: 46757 - protein, 466 aa, Arabidopsis thaliana
  peptide (1)..(466): Ceres Seq. ID no. 12600830
  misc_feature (1)..(466): Homolog of NCBI NO: 18423092 NR Description: transport inhibitor response 1 (TIR1), putative
  misc_feature (1)..(466): Homolog of NCBI NO: 13249030 NR Description: F-box containing protein TIR1
  misc_feature (1)..(466): Homolog of NCBI NO: 12083523 NR Description: similar to Arabidopsis thaliana transport
  misc_feature (1)..(466): Homolog of NCBI NO: 15027885 NR Description: putative F-box protein GRR1 protein 1, AtFBL18
  misc_feature (1)..(466): Homolog of NCBI NO: 12658970 NR Description: GRR1-like protein 1 [Arabidopsis thaliana]
  misc_feature (1)..(466): Homolog of NCBI NO: 18412177 NR Description: F-box protein GRR1-like protein 1, AtFBL18
  misc_feature (1)..(464): Homolog of NCBI NO: 18412567 NR Description: transport inhibitor response 1 (TIR1), AtFBL1
  misc_feature (1)..(466): Homolog of NCBI NO: 21740736 NR Description: OSJNBa0072K14.1 [Oryza sativa (japonica
  misc_feature (1)..(466): Homolog of NCBI NO: 18391439 NR Description: transport inhibitor response 1 (TIR1), putative
  misc_feature (1)..(466): Homolog of NCBI NO: 18405102 NR Description: transport inhibitor response 1 (TIR1), putative
MVVTDESLELLSRSFVNFKSLVLVSCEGFTTDGLASIAANCRHLRDLDLQENEIDDHRGQWLSCFPDTCTTLVTLNFACLEGETNLVALERLVARSPNLKSLKLNRAVPLDALARLMACAPQIVDLGVGSYENDPDSESYLKLMAVIKKCTSLRSLSGFLEAAPHCLSAFHPICHNLTSLNLSYAAEIHGSHLIKLIQHCKKLQRLWILDSIGDKGLEVVASTCKELQELRVFPSDLLGGGNTAVTEEGLVAISAGCPKLHSILYFCQQMTNAALVTVAKNCPNFIRFRLCILEPNKPDHVTSQPLDEGFGAIVKACKSLRRLSLSGLLTDQVFLYIGMYANQLEMLSIAFAGDTDKGMLYVLNGCKKMKKLEIRDSPFGDTALLADVSKYETMRSLWMSSCEVTLSGCKRLAEKAPWLNVEIINENDNNRMEENGHEGRQKVDKLYLYRTVVGTRMDAPPFVWIL

SEQ ID NO: 46758 - protein, 350 aa, Arabidopsis thaliana
  peptide (1)..(350): Ceres Seq. ID no. 12600831
  misc_feature (1)..(350): Homolog of NCBI NO: 18423092 NR Description: transport inhibitor response 1 (TIR1), putative
  misc_feature (1)..(350): Homolog of NCBI NO: 13249030 NR Description: F-box containing protein TIR1
  misc_feature (1)..(350): Homolog of NCBI NO: 12083523 NR Description: similar to Arabidopsis thaliana transport
  misc_feature (1)..(350): Homolog of NCBI NO: 15027885 NR Description: putative F-box protein GRR1 protein 1, AtFBL18
  misc_feature (1)..(350): Homolog of NCBI NO: 12658970 NR Description: GRR1-like protein 1 [Arabidopsis thaliana]
  misc_feature (1)..(350): Homolog of NCBI NO: 18412177 NR Description: F-box protein GRR1-like protein 1, AtFBL18
  misc_feature (1)..(348): Homolog of NCBI NO: 18412567 NR Description: transport inhibitor response 1 (TIR1), AtFBL1
  misc_feature (1)..(350): Homolog of NCBI NO: 21740736 NR Description: OSJNBa0072K14.1 [Oryza sativa (japonica
  misc_feature (1)..(350): Homolog of NCBI NO: 18391439 NR Description: transport inhibitor response 1 (TIR1), putative
  misc_feature (1)..(350): Homolog of NCBI NO: 18405102 NR Description: transport inhibitor response 1 (TIR1), putative
MACAPQIVDLGVGSYENDPDSESYLKLMAVIKKCTSLRSLSGFLEAAPHCLSAFHPICHNLTSLNLSYAAEIHGSHLIKLIQHCKKLQRLWILDSIGDKGLEVVASTCKELQELRVFPSDLLGGGNTAVTEEGLVAISAGCPKLHSILYFCQQMTNAALVTVAKNCPNFIRFRLCILEPNKPDHVTSQPLDEGFGAIVKACKSLRRLSLSGLLTDQVFLYIGMYANQLEMLSIAFAGDTDKGMLYVLNGCKKMKKLEIRDSPFGDTALLADVSKYETMRSLWMSSCEVTLSGCKRLAEKAPWLNVEIINENDNNRMEENGHEGRQKVDKLYLYRTVVGTRMDAPPFVWIL

SEQ ID NO: 46759 - DNA, 2412 bp, Arabidopsis thaliana
  misc_feature (1)..(2412): Ceres Seq. ID no. 12574885
  misc_feature: MA Experiment ID: 20000171 Result: Up-regulated in Transcription
  misc_feature: MA Experiment 20000171 PARAMETER Experiment Name: At_42deg_Heat_P Parameter: Age (day) Value: 14
  misc_feature: MA Experiment 20000171 PARAMETER Experiment Name: At_42deg_Heat_P Parameter: Organism Value: A. thaliana
  misc_feature: MA Experiment 20000171 PARAMETER Experiment Name: At_42deg_Heat_P Parameter: Plant Line Value: WS
  misc_feature: MA Experiment 20000171 PARAMETER Experiment Name: At_42deg_Heat_P Parameter: Temperature (deg C) Value: 42 vs. 22
  misc_feature: MA Experiment 20000171 PARAMETER Experiment Name: At_42deg_Heat_P Parameter: Timepoint (hr) Value: 1
  misc_feature: MA Experiment 20000171 PARAMETER Experiment Name: At_42deg_Heat_P Parameter: Tissue Value: Aerial
  misc_feature: MA Experiment ID: 20000173 Result: Up-regulated in Transcription
  misc_feature: MA Experiment 20000173 PARAMETER Experiment Name: At_42deg_Heat_P Parameter: Age (day) Value: 14
  misc_feature: MA Experiment 20000173 PARAMETER Experiment Name: At_42deg_Heat_P Parameter: Organism Value: A. thaliana
  misc_feature: MA Experiment 20000173 PARAMETER Experiment Name: At_42deg_Heat_P Parameter: Plant Line Value: WS
  misc_feature: MA Experiment 20000173 PARAMETER Experiment Name: At_42deg_Heat_P Parameter: Temperature (deg C) Value: 42 vs. 22
  misc_feature: MA Experiment 20000173 PARAMETER Experiment Name: At_42deg_Heat_P Parameter: Timepoint (hr) Value: 6
  misc_feature: MA Experiment 20000173 PARAMETER Experiment Name: At_42deg_Heat_P Parameter: Tissue Value: Aerial
  misc_feature: MA Experiment ID: 20000180 Result: Down-regulated in Transcription
  misc_feature: MA Experiment 20000180 PARAMETER Experiment Name: At_Germinating_Seeds_P Parameter: Age (hr) Value: 24 vs. 0
  misc_feature: MA Experiment 20000180 PARAMETER Experiment Name: At_Germinating_Seeds_P Parameter: Tissue Value: Germinating Seeds
  misc_feature: MA Experiment ID: 20000227 Result: Up-regulated in Transcription
  misc_feature: MA Experiment 20000227 PARAMETER Experiment Name: At_Root-Tips-vs-Tops_P Parameter: Tissue Value: Root Tips vs. Root Tops
  misc_feature: MA Experiment ID: 20000286 Result: Up-regulated in Transcription
  misc_feature: MA Experiment 20000286 PARAMETER Experiment Name: At_Open_Flower_P Parameter: Age (day) Value: 21
  misc_feature: MA Experiment 20000286 PARAMETER Experiment Name: At_Open_Flower_P Parameter: Plant Line Value: WS
  misc_feature: MA Experiment 20000286 PARAMETER Experiment Name: At_Open_Flower_P Parameter: Tissue Value: Half Open vs. Whole Plant
  misc_feature: MA Experiment ID: 20000443 Result: Up-regulated in Transcription
  misc_feature: MA Experiment 20000443 PARAMETER Experiment Name: At_1uM_BR-BRZ__P Parameter: Tissue Value: Shoot Apices
  misc_feature: MA Experiment 20000443 PARAMETER Experiment Name: At_1uM_BR-BRZ__P Parameter: Treatment Value: 1uM BRZ vs. No Treatment
  misc_feature: MA Experiment ID: 20001247 Result: Down-regulated in Transcription
  misc_feature: MA Experiment 20001247 PARAMETER Experiment Name: At_Far-red-induction_P Parameter: Age (day) Value: 7
  misc_feature: MA Experiment 20001247 PARAMETER Experiment Name: At_Far-red-induction_P Parameter: Light Value: Far-red vs. White
  misc_feature: MA Experiment 20001247 PARAMETER Experiment Name: At_Far-red-induction_P Parameter: Organism Value: A. thaliana
  misc_feature: MA Experiment 20001247 PARAMETER Experiment Name: At_Far-red-induction_P Parameter: Plant Line Value: Columbia
  misc_feature: MA Experiment 20001247 PARAMETER Experiment Name: At_Far-red-induction_P Parameter: Timepoint (hr) Value: 1
  misc_feature: MA Experiment 20001247 PARAMETER Experiment Name: At_Far-red-induction_P Parameter: Tissue Value: Whole Plant
  misc_feature: MA Experiment ID: 20001248 Result: Down-regulated in Transcription
  misc_feature: MA Experiment 20001248 PARAMETER Experiment Name: At_Far-red-induction_P Parameter: Age (day) Value: 7
  misc_feature: MA Experiment 20001248 PARAMETER Experiment Name: At_Far-red-induction_P Parameter: Light Value: Far-red vs. White
  misc_feature: MA Experiment 20001248 PARAMETER Experiment Name: At_Far-red-induction_P Parameter: Organism Value: A. thaliana
  misc_feature: MA Experiment 20001248 PARAMETER Experiment Name: At_Far-red-induction_P Parameter: Plant Line Value: Columbia
  misc_feature: MA Experiment 20001248 PARAMETER Experiment Name: At_Far-red-induction_P Parameter: Timepoint (hr) Value: 4
  misc_feature: MA Experiment 20001248 PARAMETER Experiment Name: At_Far-red-induction_P Parameter: Tissue Value: Whole Plant
  misc_feature: MA Experiment ID: 20001450 Result: Down-regulated in Transcription
  misc_feature: MA Experiment 20001450 PARAMETER Experiment Name: At_Far-red-induction_P Parameter: Age (day) Value: 7
  misc_feature: MA Experiment 20001450 PARAMETER Experiment Name: At_Far-red-induction_P Parameter: Light Value: Far-red vs. White
  misc_feature: MA Experiment 20001450 PARAMETER Experiment Name: At_Far-red-induction_P Parameter: Organism Value: A. thaliana
  misc_feature: MA Experiment 20001450 PARAMETER Experiment Name: At_Far-red-induction_P Parameter: Plant Line Value: Columbia
  misc_feature: MA Experiment 20001450 PARAMETER Experiment Name: At_Far-red-induction_P Parameter: Timepoint (hr) Value: 8
  misc_feature: MA Experiment 20001450 PARAMETER Experiment Name: At_Far-red-induction_P Parameter: Tissue Value: Whole Plant
  misc_feature: MA Experiment ID: 20001451 Result: Down-regulated in Transcription
  misc_feature: MA Experiment 20001451 PARAMETER Experiment Name: At_Far-red-induction_P Parameter: Age (day) Value: 7
  misc_feature: MA Experiment 20001451 PARAMETER Experiment Name: At_Far-red-induction_P Parameter: Light Value: Far-red vs. White
  misc_feature: MA Experiment 20001451 PARAMETER Experiment Name: At_Far-red-induction_P Parameter: Organism Value: A. thaliana
  misc_feature: MA Experiment 20001451 PARAMETER Experiment Name: At_Far-red-induction_P Parameter: Plant Line Value: Columbia
  misc_feature: MA Experiment 20001451 PARAMETER Experiment Name: At_Far-red-induction_P Parameter: Timepoint (hr) Value: 24
  misc_feature: MA Experiment 20001451 PARAMETER Experiment Name: At_Far-red-induction_P Parameter: Tissue Value: Whole Plant
  misc_feature: MA Experiment ID: 20001558 Result: Up-regulated in Transcription
  misc_feature: MA Experiment 20001558 PARAMETER Experiment Name: At_Drought_Soil_Dry_P Parameter: Age (day) Value: 27
  misc_feature: MA Experiment 20001558 PARAMETER Experiment Name: At_Drought_Soil_Dry_P Parameter: Organism Value: A. thaliana
  misc_feature: MA Experiment 20001558 PARAMETER Experiment Name: At_Drought_Soil_Dry_P Parameter: Plant Line Value: WS
  misc_feature: MA Experiment 20001558 PARAMETER Experiment Name: At_Drought_Soil_Dry_P Parameter: Post Timepoint (hr) Value: 6
  misc_feature: MA Experiment 20001558 PARAMETER Experiment Name: At_Drought_Soil_Dry_P Parameter: Post-Treatment Value: Re-Water vs. No Drought
  misc_feature: MA Experiment 20001558 PARAMETER Experiment Name: At_Drought_Soil_Dry_P Parameter: Timepoint (day) Value: 13
  misc_feature: MA Experiment 20001558 PARAMETER Experiment Name: At_Drought_Soil_Dry_P Parameter: Treatment Value: Drought vs. No Drought
  misc_feature: MA Experiment ID: 20001757 Result: Up-regulated in Transcription
  misc_feature: MA Experiment 20001757 PARAMETER Experiment Name: At_50mM_NH4NO3_L-to-H_P Parameter: Timepoint (hr) Value: 6
  misc_feature: MA Experiment 20001757 PARAMETER Experiment Name: At_50mM_NH4NO3_L-to-H_P Parameter: Tissue Value: Leaf
  misc_feature: MA Experiment 20001757 PARAMETER Experiment Name: At_50mM_NH4NO3_L-to-H_P Parameter: Treatment Value: 50mM NH4NO3 vs 100mM Mannitol
atgatcaggctctctaagcgctccgtctctaccctcctacgctccggtaaccaaagcttccgtatcgccgccgcagcttccacctcccgttcttccccatctgccacggatgtcaagagaagtgacactgaatcgagatggtactcatctttaaccaatggacaatctaagaatagtgggtcatttgctcaattgaacatgaaaaccaattggtttatgggataccggaacgaatccagtgcagcagcatcagattcttcctcacaagctcctccaccggctgagaaattcgagtatcaagctgaagttagtcgcctcatggaccttattgtcaacagcttatacagcaataaggaggtgtttcttcgggagcttattagtaatgcaagtgatgcattggataagcttcgttatttgagcgttaccaaccctgagctctcaaaagatgctcctgatcttgatatacgtatctatgcagacaaggagaatggaatcataactctcactgattctggtattggtatgacacggcaagaattagttgactgtcttgggactattgctcaaagtggaaccgccaagttcatgaaagctctaaaggatagcaaggatgcaggtggtgacaacaatttaattggtcaatttggtgtagggttctattcagcatttttggttgcagatcgggtaattgtgtcaaccaagagccctaagtctgataaacaatatgtatgggaaggagaagcaaattcaagcagttttaccattcaggaagatactgacccacaatctctcattcctagaggaactcgtattactttgcatcttaagcaagaagccaaaaactttgcagatcctgagcggattcagaagctcgtgaaaaactattcccagtttgtttctttccctatttacacttggcaggaaaaaggatacacaaaagaggttgaggttgaagatgatccaactgaaacaaaaaaagatgaccaagatgaccaaactgagaaaaagaagaagaccaagaaggttgttgagagatactgggattgggagcttacaaatgagacacaaccgatttggctgcgtaaccctaaggaggtgacaacagcagaatacaatgagttttacagaaaagctttcaatgagtatttggacccattggcttcatcccatttcacgacagagggcgaagtcgagtttaggtctatcctatatgtgccacctgtttcaccatcggggaaggatgacatagtcaatcaaaagacaaagaacataaggctctatgttaaacgagttttcatttcagatgactttgatggggagctgtttcctcggtacttgagctttgttaaaggtgttgtggactcgcatgatctcccacttaatgtatcacgtgagattcttcaagaaagtcgcatagtgcggatcatgaagaaacgtctagtgaggaaggcttttgatatgattttgggtatatccttgagtgaaaacagagaagactatgagaagttttgggataattttggcaaacacttgaaattagggtgcatcgaagaccgtgaaaaccacaagcgtatagctccactgcttcgatttttctcctcccagagtgagaatgacatgatcagcttggatgagtatgttgagaacatgaaacctgaacagaaagccatatacttcattgcttctgacagcattacaagtgctaagaatgcacctttcctcgaaaagatgctggagaaaggacttgaagtactatatttggtagagcctattgatgaagttgccgtacagagtttaaaagcttataaggagaaggattttgtagatatcagcaaggaagacttggatctaggcaacatgtcaggagacaagaacgaggagaaagaggcagcagtgaaaaaagagtttggacagacttgtgactggataaagaaacgattgggtgacaaggttgccagtgttcaaatttccaaccgtcttagttcttccccctgtgttcttgtatctggtaaatttggttggtcagccaatatggagaggctaatgaaggcacaatcaactggtgacacaataagcctcgactacatgaaagggagaagagtgtttgagatcaatcccgaccactcaattatcaagaacataaatgctgcttacaatagtaacccaaatgacgaagatgcaatgagagccatagatcttatgtatgacgcagcactagtttctagtgggttcacgcccgataatccagcagagctgggtgggaagatatatgagatgatggatgtagctctttccgggaaatggtcaagccctgaggtgcagccgcagcaacagcagatggcacattctcacgatgcagagacgtttgaagctgaagtggttgaaccagtcgaagtggatgggaagaaatga

SEQ ID NO: 46760 - protein, 803 aa, Arabidopsis thaliana
  peptide (1)..(803): Ceres Seq. ID no. 12574886
  misc_feature (281)..(765): Pfam Name: Hsp90 protein Pfam Description: Hsp90 protein
  misc_feature (94)..(765): Homolog of NCBI NO: 1708314 NR Description: Heat shock protein 83
  misc_feature (94)..(765): Homolog of NCBI NO: 445126 NR Description: heat shock protein HSP81-1
  misc_feature (94)..(765): Homolog of NCBI NO: 217855 NR Description: 81kDa heat-shock protein [Arabidopsis thaliana]
  misc_feature (94)..(765): Homolog of NCBI NO: 26454635 NR Description: Heat shock protein 81-1 (HSP81-1) (Heat shock
  misc_feature (94)..(765): Homolog of NCBI NO: 15237214 NR Description: heat-shock protein
  misc_feature (76)..(799): Homolog of NCBI NO: 1906830 NR Description: heat shock protein [Arabidopsis thaliana]
  misc_feature (51)..(799): Homolog of NCBI NO: 1076758 NR Description: heat-shock protein, 82K, precursor - rye
  misc_feature (22)..(799): Homolog of NCBI NO: 30678090 NR Description: heat shock protein, putative [Arabidopsis
  misc_feature (22)..(799): Homolog of NCBI NO: 20453106 NR Description: At2g04030/F3C11.14 [Arabidopsis thaliana]
  misc_feature (22)..(799): Homolog of NCBI NO: 15228059 NR Description: putative heat shock protein
MIRLSKRSVSTLLRSGNQSFRIAAAASTSRSSPSATDVKRSDTESRWYSSLTNGQSKNSGSFAQLNMKTNWFMGYRNESSAAASDSSSQAPPPAEKFEYQAEVSRLMDLIVNSLYSNKEVFLRELISNASDALDKLRYLSVTNPELSKDAPDLDIRIYADKENGIITLTDSGIGMTRQELVDCLGTIAQSGTAKFMKALKDSKDAGGDNNLIGQFGVGFYSAFLVADRVIVSTKSPKSDKQYVWEGEANSSSFTIQEDTDPQSLIPRGTRITLHLKQEAKNFADPERIQKLVKNYSQFVSFPIYTWQEKGYTKEVEVEDDPTETKKDDQDDQTEKKKKTKKVVERYWDWELTNETQPIWLRNPKEVTTAEYNEFYRKAFNEYLDPLASSHFTTEGEVEFRSILYVPPVSPSGKDDIVNQKTKNIRLYVKRVFISDDFDGELFPRYLSFVKGVVDSHDLPLNVSREILQESRIVRIMKKRLVRKAFDMILGISLSENREDYEKFWDNFGKHLKLGCIEDRENHKRIAPLLRFFSSQSENDMISLDEYVENMKPEQKAIYFIASDSITSAKNAPFLEKMLEKGLEVLYLVEPIDEVAVQSLKAYKEKDFVDISKEDLDLGNMSGDKNEEKEAAVKKEFGQTCDWIKKRLGDKVASVQISNRLSSSPCVLVSGKFGWSANMERLMKAQSTGDTISLDYMKGRRVFEINPDHSIIKNINAAYNSNPNDEDAMRAIDLMYDAALVSSGFTPDNPAELGGKIYEMMDVALSGKWSSPEVQPQQQQMAHSHDAETFEAEVVEPVEVDGKK

SEQ ID NO: 46761 - protein, 737 aa, Arabidopsis thaliana
  peptide (1)..(737): Ceres Seq. ID no. 12574887
  misc_feature (215)..(699): Pfam Name: Hsp90 protein Pfam Description: Hsp90 protein
  misc_feature (28)..(699): Homolog of NCBI NO: 1708314 NR Description: Heat shock protein 83
  misc_feature (28)..(699): Homolog of NCBI NO: 445126 NR Description: heat shock protein HSP81-1
  misc_feature (28)..(699): Homolog of NCBI NO: 217855 NR Description: 81kDa heat-shock protein [Arabidopsis thaliana]
  misc_feature (28)..(699): Homolog of NCBI NO: 26454635 NR Description: Heat shock protein 81-1 (HSP81-1) (Heat shock
  misc_feature (28)..(699): Homolog of NCBI NO: 15237214 NR Description: heat-shock protein
  misc_feature (10)..(733): Homolog of NCBI NO: 1906830 NR Description: heat shock protein [Arabidopsis thaliana]
  misc_feature (1)..(733): Homolog of NCBI NO: 1076758 NR Description: heat-shock protein, 82K, precursor - rye
  misc_feature (1)..(733): Homolog of NCBI NO: 30678090 NR Description: heat shock protein, putative [Arabidopsis
  misc_feature (1)..(733): Homolog of NCBI NO: 20453106 NR Description: At2g04030/F3C11.14 [Arabidopsis thaliana]
  misc_feature (1)..(733): Homolog of NCBI NO: 15228059 NR Description: putative heat shock protein
MKTNWFMGYRNESSAAASDSSSQAPPPAEKFEYQAEVSRLMDLIVNSLYSNKEVFLRELISNASDALDKLRYLSVTNPELSKDAPDLDIRIYADKENGIITLTDSGIGMTRQELVDCLGTIAQSGTAKFMKALKDSKDAGGDNNLIGQFGVGFYSAFLVADRVIVSTKSPKSDKQYVWEGEANSSSFTIQEDTDPQSLIPRGTRITLHLKQEAKNFADPERIQKLVKNYSQFVSFPIYTWQEKGYTKEVEVEDDPTETKKDDQDDQTEKKKKTKKVVERYWDWELTNETQPIWLRNPKEVTTAEYNEFYRKAFNEYLDPLASSHFTTEGEVEFRSILYVPPVSPSGKDDIVNQKTKNIRLYVKRVFISDDFDGELFPRYLSFVKGVVDSHDLPLNVSREILQESRIVRIMKKRLVRKAFDMILGISLSENREDYEKFWDNFGKHLKLGCIEDRENHKRIAPLLRFFSSQSENDMISLDEYVENMKPEQKAIYFIASDSITSAKNAPFLEKMLEKGLEVLYLVEPIDEVAVQSLKAYKEKDFVDISKEDLDLGNMSGDKNEEKEAAVKKEFGQTCDWIKKRLGDKVASVQISNRLSSSPCVLVSGKFGWSANMERLMKAQSTGDTISLDYMKGRRVFEINPDHSIIKNINAAYNSNPNDEDAMRAIDLMYDAALVSSGFTPDNPAELGGKIYEMMDVALSGKWSSPEVQPQQQQMAHSHDAETFEAEVVEPVEVDGKK

SEQ ID NO: 46762 - protein, 731 aa, Arabidopsis thaliana
  peptide (1)..(731): Ceres Seq. ID no. 12574888
  misc_feature (209)..(693): Pfam Name: Hsp90 protein Pfam Description: Hsp90 protein
  misc_feature (22)..(693): Homolog of NCBI NO: 1708314 NR Description: Heat shock protein 83
  misc_feature (22)..(693): Homolog of NCBI NO: 445126 NR Description: heat shock protein HSP81-1
  misc_feature (22)..(693): Homolog of NCBI NO: 217855 NR Description: 81kDa heat-shock protein [Arabidopsis thaliana]
  misc_feature (22)..(693): Homolog of NCBI NO: 26454635 NR Description: Heat shock protein 81-1 (HSP81-1) (Heat shock
  misc_feature (22)..(693): Homolog of NCBI NO: 15237214 NR Description: heat-shock protein
  misc_feature (4)..(727): Homolog of NCBI NO: 1906830 NR Description: heat shock protein [Arabidopsis thaliana]
  misc_feature (1)..(727): Homolog of NCBI NO: 1076758 NR Description: heat-shock protein, 82K, precursor - rye
  misc_feature (1)..(727): Homolog of NCBI NO: 30678090 NR Description: heat shock protein, putative [Arabidopsis
  misc_feature (1)..(727): Homolog of NCBI NO: 20453106 NR Description: At2g04030/F3C11.14 [Arabidopsis thaliana]
  misc_feature (1)..(727): Homolog of NCBI NO: 15228059 NR Description: putative heat shock protein
MGYRNESSAAASDSSSQAPPPAEKFEYQAEVSRLMDLIVNSLYSNKEVFLRELISNASDALDKLRYLSVTNPELSKDAPDLDIRIYADKENGIITLTDSGIGMTRQELVDCLGTIAQSGTAKFMKALKDSKDAGGDNNLIGQFGVGFYSAFLVADRVIVSTKSPKSDKQYVWEGEANSSSFTIQEDTDPQSLIPRGTRITLHLKQEAKNFADPERIQKLVKNYSQFVSFPIYTWQEKGYTKEVEVEDDPTETKKDDQDDQTEKKKKTKKVVERYWDWELTNETQPIWLRNPKEVTTAEYNEFYRKAFNEYLDPLASSHFTTEGEVEFRSILYVPPVSPSGKDDIVNQKTKNIRLYVKRVFISDDFDGELFPRYLSFVKGVVDSHDLPLNVSREILQESRIVRIMKKRLVRKAFDMILGISLSENREDYEKFWDNFGKHLKLGCIEDRENHKRIAPLLRFFSSQSENDMISLDEYVENMKPEQKAIYFIASDSITSAKNAPFLEKMLEKGLEVLYLVEPIDEVAVQSLKAYKEKDFVDISKEDLDLGNMSGDKNEEKEAAVKKEFGQTCDWIKKRLGDKVASVQISNRLSSSPCVLVSGKFGWSANMERLMKAQSTGDTISLDYMKGRRVFEINPDHSIIKNINAAYNSNPNDEDAMRAIDLMYDAALVSSGFTPDNPAELGGKIYEMMDVALSGKWSSPEVQPQQQQMAHSHDAETFEAEVVEPVEVDGKK

SEQ ID NO: 46763 - DNA, 1267 bp, Arabidopsis thaliana; identical to SEQ ID NO: 26325
  misc_feature (1)..(1267): Ceres Seq. ID no. 12488498
  misc_feature: MA Experiment ID: 20000179 Result: Up-regulated in Transcription
  misc_feature: MA Experiment 20000179 PARAMETER Experiment Name: At_Germinating_Seeds_P Parameter: Age (hr) Value: 6 vs. 0
  misc_feature: MA Experiment 20000179 PARAMETER Experiment Name: At_Germinating_Seeds_P Parameter: Tissue Value: Germinating Seeds
  misc_feature: MA Experiment ID: 20000180 Result: Up-regulated in Transcription
  misc_feature: MA Experiment 20000180 PARAMETER Experiment Name: At_Germinating_Seeds_P Parameter: Age (hr) Value: 24 vs. 0
  misc_feature: MA Experiment 20000180 PARAMETER Experiment Name: At_Germinating_Seeds_P Parameter: Tissue Value: Germinating Seeds
  misc_feature: MA Experiment ID: 20000185 Result: Down-regulated in Transcription
  misc_feature: MA Experiment 20000185 PARAMETER Experiment Name: At_Roots__P Parameter: Age (day) Value: 7 vs. 21
  misc_feature: MA Experiment 20000185 PARAMETER Experiment Name: At_Roots__P Parameter: Organism Value: A. thaliana
  misc_feature: MA Experiment 20000185 PARAMETER Experiment Name: At_Roots__P Parameter: Tissue Value: Roots vs. Whole Plant
  misc_feature: MA Experiment ID: 20000227 Result: Down-regulated in Transcription
  misc_feature: MA Experiment 20000227 PARAMETER Experiment Name: At_Root-Tips-vs-Tops_P Parameter: Tissue Value: Root Tips vs. Root Tops
  misc_feature: MA Experiment ID: 20000264 Result: Down-regulated in Transcription
  misc_feature: MA Experiment 20000264 PARAMETER Experiment Name: At_Open_Flower_P Parameter: Age (day) Value: 21
  misc_feature: MA Experiment 20000264 PARAMETER Experiment Name: At_Open_Flower_P Parameter: Plant Line Value: WS
  misc_feature: MA Experiment 20000264 PARAMETER Experiment Name: At_Open_Flower_P Parameter: Tissue Value: Open Flower vs. Whole Plant
  misc_feature: MA Experiment ID: 20000269 Result: Down-regulated in Transcription
  misc_feature: MA Experiment 20000269 PARAMETER Experiment Name: At_1mM_KNO3_L-vs-H_Roots_P Parameter: Age (day) Value: 7,10,12
  misc_feature: MA Experiment 20000269 PARAMETER Experiment Name: At_1mM_KNO3_L-vs-H_Roots_P Parameter: Organism Value: A. thaliana
  misc_feature: MA Experiment 20000269 PARAMETER Experiment Name: At_1mM_KNO3_L-vs-H_Roots_P Parameter: Plant Line Value: WS
  misc_feature: MA Experiment 20000269 PARAMETER Experiment Name: At_1mM_KNO3_L-vs-H_Roots_P Parameter: Timepoint (day) Value: 7,10,12
  misc_feature: MA Experiment 20000269 PARAMETER Experiment Name: At_1mM_KNO3_L-vs-H_Roots_P Parameter: Tissue Value: Roots
  misc_feature: MA Experiment 20000269 PARAMETER Experiment Name: At_1mM_KNO3_L-vs-H_Roots_P Parameter: Treatment Value: 1mM KNO3 vs. 50mM KNO3
  misc_feature: MA Experiment ID: 20000286 Result: Down-regulated in Transcription
  misc_feature: MA Experiment 20000286 PARAMETER Experiment Name: At_Open_Flower_P Parameter: Age (day) Value: 21
  misc_feature: MA Experiment 20000286 PARAMETER Experiment Name: At_Open_Flower_P Parameter: Plant Line Value: WS
  misc_feature: MA Experiment 20000286 PARAMETER Experiment Name: At_Open_Flower_P Parameter: Tissue Value: Half Open vs. Whole Plant
  misc_feature: MA Experiment ID: 20000439 Result: Down-regulated in Transcription
  misc_feature: MA Experiment 20000439 PARAMETER Experiment Name: At_Roots__P Parameter: Age (day) Value: 14 vs. 21
  misc_feature: MA Experiment 20000439 PARAMETER Experiment Name: At_Roots__P Parameter: Organism Value: A. thaliana
  misc_feature: MA Experiment 20000439 PARAMETER Experiment Name: At_Roots__P Parameter: Tissue Value: Roots vs. Whole Plant
  misc_feature: MA Experiment ID: 20000441 Result: Up-regulated in Transcription
  misc_feature: MA Experiment 20000441 PARAMETER Experiment Name: At_1uM_BR-BRZ__P Parameter: Tissue Value: Shoot Apices
  misc_feature: MA Experiment 20000441 PARAMETER Experiment Name: At_1uM_BR-BRZ__P Parameter: Treatment Value: 1uM BR vs. No Treatment
  misc_feature: MA Experiment ID: 20000578 Result: Down-regulated in Transcription
  misc_feature: MA Experiment 20000578 PARAMETER Experiment Name: At_CS3726__P Parameter: Organism Value: A. thaliana
  misc_feature: MA Experiment 20000578 PARAMETER Experiment Name: At_CS3726__P Parameter: Plant Line Value: CS3726
  misc_feature: MA Experiment 20000578 PARAMETER Experiment Name: At_CS3726__P Parameter: Tissue Value: Whole Plant
  misc_feature: MA Experiment ID: 20000794 Result: Down-regulated in Transcription
  misc_feature: MA Experiment 20000794 PARAMETER Experiment Name: At_Petals_P Parameter: Age (day) Value: 23-25 days
  misc_feature: MA Experiment 20000794 PARAMETER Experiment Name: At_Petals_P Parameter: Plant Line Value: WS
  misc_feature: MA Experiment 20000794 PARAMETER Experiment Name: At_Petals_P Parameter: Tissue Value: Petals vs. Whole plant
  misc_feature: MA Experiment ID: 20001557 Result: Down-regulated in Transcription
  misc_feature: MA Experiment 20001557 PARAMETER Experiment Name: At_Drought_Soil_Dry_P Parameter: Age (day) Value: 27
  misc_feature: MA Experiment 20001557 PARAMETER Experiment Name: At_Drought_Soil_Dry_P Parameter: Organism Value: A. thaliana
  misc_feature: MA Experiment 20001557 PARAMETER Experiment Name: At_Drought_Soil_Dry_P Parameter: Plant Line Value: WS
  misc_feature: MA Experiment 20001557 PARAMETER Experiment Name: At_Drought_Soil_Dry_P Parameter: Post Timepoint (hr) Value: 3
  misc_feature: MA Experiment 20001557 PARAMETER Experiment Name: At_Drought_Soil_Dry_P Parameter: Post-Treatment Value: Re-Water vs. No Drought
  misc_feature: MA Experiment 20001557 PARAMETER Experiment Name: At_Drought_Soil_Dry_P Parameter: Timepoint (day) Value: 13
  misc_feature: MA Experiment 20001557 PARAMETER Experiment Name: At_Drought_Soil_Dry_P Parameter: Treatment Value: Drought vs. No Drought
  misc_feature: MA Experiment ID: 20001906 Result: Down-regulated in Transcription
  misc_feature: MA Experiment 20001906 PARAMETER Experiment Name: At_Drought_Reproduction_P Parameter: Age (day) Value: 35
  misc_feature: MA Experiment 20001906 PARAMETER Experiment Name: At_Drought_Reproduction_P Parameter: Organism Value: A. thaliana
  misc_feature: MA Experiment 20001906 PARAMETER Experiment Name: At_Drought_Reproduction_P Parameter: Plant Line Value: WS
  misc_feature: MA Experiment 20001906 PARAMETER Experiment Name: At_Drought_Reproduction_P Parameter: Timepoint (day) Value: 5
  misc_feature: MA Experiment 20001906 PARAMETER Experiment Name: At_Drought_Reproduction_P Parameter: Tissue Value: Siliques
  misc_feature: MA Experiment 20001906 PARAMETER Experiment Name: At_Drought_Reproduction_P Parameter: Treatment Value: Drought vs. No Drought

SEQ ID NO: 46764 - protein, 251 aa, Arabidopsis thaliana; identical to SEQ ID NO: 26326
  peptide (1)..(251): Ceres Seq. ID no. 12488499
  misc_feature (62)..(224): Pfam Name: Chlorophyll A-B binding protein Pfam Description: Chlorophyll A-B binding protein
  misc_feature (62)..(224): Pfam Name: Chlorophyll A-B binding protein Pfam Description: Chlorophyll A-B binding protein
  misc_feature (62)..(224): Pfam Name: Chlorophyll A-B binding protein Pfam Description: Chlorophyll A-B binding protein
  misc_feature (18)..(251): Homolog of NCBI NO: 9624495 NR Description: chlorophyll a/b-binding protein precursor
  misc_feature (53)..(249): Homolog of NCBI NO: 1076630 NR Description: light-harvesting chlorophyll a - common tobacco
  misc_feature (1)..(249): Homolog of NCBI NO: 20218813 NR Description: putative chlorophyll a/b-binding protein type 4
  misc_feature (8)..(249): Homolog of NCBI NO: 322393 NR Description: chlorophyll a/b-binding protein type 4,
  misc_feature (1)..(249): Homolog of NCBI NO: 322392 NR Description: chlorophyll a/b-binding protein type 4,
  misc_feature (18)..(251): Homolog of NCBI NO: 9624495 NR Description: chlorophyll a/b-binding protein precursor
  misc_feature (1)..(249): Homolog of NCBI NO: 20218813 NR Description: putative chlorophyll a/b-binding protein type 4
  misc_feature (1)..(249): Homolog of NCBI NO: 322392 NR Description: chlorophyll a/b-binding protein type 4,
  misc_feature (8)..(249): Homolog of NCBI NO: 322393 NR Description: chlorophyll a/b-binding protein type 4,
  misc_feature (1)..(249): Homolog of NCBI NO: 20218813 NR Description: putative chlorophyll a/b-binding protein type 4
  misc_feature (53)..(249): Homolog of NCBI NO: 1076630 NR Description: light-harvesting chlorophyll a - common tobacco
  misc_feature (18)..(251): Homolog of NCBI NO: 9624495 NR Description: chlorophyll a/b-binding protein precursor
  misc_feature (1)..(251): Homolog of NCBI NO: 30692874 NR Description: light-harvesting chlorophyll a/b binding protein
  misc_feature (1)..(251): Homolog of NCBI NO: 100196 NR Description: chlorophyll a/b-binding protein (cab-11) - tomato
  misc_feature (1)..(249): Homolog of NCBI NO: 11277626 NR Description: chlorophyll a/b-binding protein [imported] -
  misc_feature (1)..(251): Homolog of NCBI NO: 100197 NR Description: chlorophyll a/b-binding protein (cab-12) - tomato
  misc_feature (1)..(250): Homolog of NCBI NO: 13385204 NR Description: cDNA sequence BC002118; hypothetical protein,
  misc_feature (1)..(251): Homolog of NCBI NO: 30692874 NR Description: light-harvesting chlorophyll a/b binding protein
  misc_feature (1)..(251): Homolog of NCBI NO: 100196 NR Description: chlorophyll a/b-binding protein (cab-11) - tomato
  misc_feature (1)..(249): Homolog of NCBI NO: 11277626 NR Description: chlorophyll a/b-binding protein [imported] -
  misc_feature (1)..(251): Homolog of NCBI NO: 100197 NR Description: chlorophyll a/b-binding protein (cab-12) - tomato
  misc_feature (1)..(250): Homolog of NCBI NO: 13385204 NR Description: cDNA sequence BC002118; hypothetical protein,
  misc_feature (1)..(249): Homolog of NCBI NO: 322392 NR Description: chlorophyll a/b-binding protein type 4,
  misc_feature (8)..(249): Homolog of NCBI NO: 322393 NR Description: chlorophyll a/b-binding protein type 4,
  misc_feature (53)..(249): Homolog of NCBI NO: 1076630 NR Description: light-harvesting chlorophyll a - common tobacco
  misc_feature (1)..(250): Homolog of NCBI NO: 13385204 NR Description: cDNA sequence BC002118; hypothetical protein,
  misc_feature (1)..(251): Homolog of NCBI NO: 100197 NR Description: chlorophyll a/b-binding protein (cab-12) - tomato
  misc_feature (1)..(249): Homolog of NCBI NO: 11277626 NR Description: chlorophyll a/b-binding protein [imported] -
  misc_feature (1)..(251): Homolog of NCBI NO: 100196 NR Description: chlorophyll a/b-binding protein (cab-11) - tomato
  misc_feature (1)..(251): Homolog of NCBI NO: 30692874 NR Description: light-harvesting chlorophyll a/b binding protein

SEQ ID NO: 46765 - protein, 148 aa, Arabidopsis thaliana; identical to SEQ ID NO: 26327
  peptide (1)..(148): Ceres Seq. ID no. 12488500
  misc_feature (1)..(121): Pfam Name: Chlorophyll A-B binding protein Pfam Description: Chlorophyll A-B binding protein
  misc_feature (1)..(121): Pfam Name: Chlorophyll A-B binding protein Pfam Description: Chlorophyll A-B binding protein
  misc_feature (1)..(121): Pfam Name: Chlorophyll A-B binding protein Pfam Description: Chlorophyll A-B binding protein
  misc_feature (1)..(148): Homolog of NCBI NO: 9624495 NR Description: chlorophyll a/b-binding protein precursor
  misc_feature (1)..(146): Homolog of NCBI NO: 1076630 NR Description: light-harvesting chlorophyll a - common tobacco
  misc_feature (1)..(146): Homolog of NCBI NO: 20218813 NR Description: putative chlorophyll a/b-binding protein type 4
  misc_feature (1)..(146): Homolog of NCBI NO: 322393 NR Description: chlorophyll a/b-binding protein type 4,
  misc_feature (1)..(146): Homolog of NCBI NO: 322392 NR Description: chlorophyll a/b-binding protein type 4,
  misc_feature (1)..(148): Homolog of NCBI NO: 9624495 NR Description: chlorophyll a/b-binding protein precursor
  misc_feature (1)..(146): Homolog of NCBI NO: 20218813 NR Description: putative chlorophyll a/b-binding protein type 4
  misc_feature (1)..(146): Homolog of NCBI NO: 322392 NR Description: chlorophyll a/b-binding protein type 4,
  misc_feature (1)..(146): Homolog of NCBI NO: 322393 NR Description: chlorophyll a/b-binding protein type 4,
  misc_feature (1)..(146): Homolog of NCBI NO: 20218813 NR Description: putative chlorophyll a/b-binding protein type 4
  misc_feature (1)..(146): Homolog of NCBI NO: 1076630 NR Description: light-harvesting chlorophyll a - common tobacco
  misc_feature (1)..(148): Homolog of NCBI NO: 9624495 NR Description: chlorophyll a/b-binding protein precursor
  misc_feature (1)..(148): Homolog of NCBI NO: 30692874 NR Description: light-harvesting chlorophyll a/b binding protein
  misc_feature (1)..(148): Homolog of NCBI NO: 100196 NR Description: chlorophyll a/b-binding protein (cab-11) - tomato
  misc_feature (1)..(146): Homolog of NCBI NO: 11277626 NR Description: chlorophyll a/b-binding protein [imported] -
  misc_feature (1)..(148): Homolog of NCBI NO: 100197 NR Description: chlorophyll a/b-binding protein (cab-12) - tomato
  misc_feature (1)..(147): Homolog of NCBI NO: 13385204 NR Description: cDNA sequence BC002118; hypothetical protein,
  misc_feature (1)..(148): Homolog of NCBI NO: 30692874 NR Description: light-harvesting chlorophyll a/b binding protein
  misc_feature (1)..(148): Homolog of NCBI NO: 100196 NR Description: chlorophyll a/b-binding protein (cab-11) - tomato
  misc_feature (1)..(146): Homolog of NCBI NO: 11277626 NR Description: chlorophyll a/b-binding protein [imported] -
  misc_feature (1)..(148): Homolog of NCBI NO: 100197 NR Description: chlorophyll a/b-binding protein (cab-12) - tomato
  misc_feature (1)..(147): Homolog of NCBI NO: 13385204 NR Description: cDNA sequence BC002118; hypothetical protein,
  misc_feature (1)..(146): Homolog of NCBI NO: 322392 NR Description: chlorophyll a/b-binding protein type 4,
  misc_feature (1)..(146): Homolog of NCBI NO: 322393 NR Description: chlorophyll a/b-binding protein type 4,
  misc_feature (1)..(146): Homolog of NCBI NO: 1076630 NR Description: light-harvesting chlorophyll a - common tobacco
  misc_feature (1)..(147): Homolog of NCBI NO: 13385204 NR Description: cDNA sequence BC002118; hypothetical protein,
  misc_feature (1)..(148): Homolog of NCBI NO: 100197 NR Description: chlorophyll a/b-binding protein (cab-12) - tomato
  misc_feature (1)..(146): Homolog of NCBI NO: 11277626 NR Description: chlorophyll a/b-binding protein [imported] -
  misc_feature (1)..(148): Homolog of NCBI NO: 100196 NR Description: chlorophyll a/b-binding protein (cab-11) - tomato
  misc_feature (1)..(148): Homolog of NCBI NO: 30692874 NR Description: light-harvesting chlorophyll a/b binding protein

SEQ ID NO: 46766 - protein, 142 aa, Arabidopsis thaliana; identical to SEQ ID NO: 26328
  peptide (1)..(142): Ceres Seq. ID no. 12488501
  misc_feature (1)..(115): Pfam Name: Chlorophyll A-B binding protein Pfam Description: Chlorophyll A-B binding protein
  misc_feature (1)..(115): Pfam Name: Chlorophyll A-B binding protein Pfam Description: Chlorophyll A-B binding protein
  misc_feature (1)..(115): Pfam Name: Chlorophyll A-B binding protein Pfam Description: Chlorophyll A-B binding protein
  misc_feature (1)..(142): Homolog of NCBI NO: 9624495 NR Description: chlorophyll a/b-binding protein precursor
  misc_feature (1)..(140): Homolog of NCBI NO: 1076630 NR Description: light-harvesting chlorophyll a - common tobacco
  misc_feature (1)..(140): Homolog of NCBI NO: 20218813 NR Description: putative chlorophyll a/b-binding protein type 4
  misc_feature (1)..(140): Homolog of NCBI NO: 322393 NR Description: chlorophyll a/b-binding protein type 4,
  misc_feature (1)..(140): Homolog of NCBI NO: 322392 NR Description: chlorophyll a/b-binding protein type 4,
  misc_feature (1)..(142): Homolog of NCBI NO: 9624495 NR Description: chlorophyll a/b-binding protein precursor
  misc_feature (1)..(140): Homolog of NCBI NO: 20218813 NR Description: putative chlorophyll a/b-binding protein type 4
  misc_feature (1)..(140): Homolog of NCBI NO: 322392 NR Description: chlorophyll a/b-binding protein type 4,
  misc_feature (1)..(140): Homolog of NCBI NO: 322393 NR Description: chlorophyll a/b-binding protein type 4,
  misc_feature (1)..(140): Homolog of NCBI NO: 20218813 NR Description: putative chlorophyll a/b-binding protein type 4
  misc_feature (1)..(140): Homolog of NCBI NO: 1076630 NR Description: light-harvesting chlorophyll a - common tobacco
  misc_feature (1)..(142): Homolog of NCBI NO: 9624495 NR Description: chlorophyll a/b-binding protein precursor
  misc_feature (1)..(142): Homolog of NCBI NO: 30692874 NR Description: light-harvesting chlorophyll a/b binding protein
  misc_feature (1)..(142): Homolog of NCBI NO: 100196 NR Description: chlorophyll a/b-binding protein (cab-11) - tomato
  misc_feature (1)..(140): Homolog of NCBI NO: 11277626 NR Description: chlorophyll a/b-binding protein [imported] -
  misc_feature (1)..(142): Homolog of NCBI NO: 100197 NR Description: chlorophyll a/b-binding protein (cab-12) - tomato
  misc_feature (1)..(141): Homolog of NCBI NO: 13385204 NR Description: cDNA sequence BC002118; hypothetical protein,
  misc_feature (1)..(142): Homolog of NCBI NO: 30692874 NR Description: light-harvesting chlorophyll a/b binding protein
  misc_feature (1)..(142): Homolog of NCBI NO: 100196 NR Description: chlorophyll a/b-binding protein (cab-11) - tomato
  misc_feature (1)..(140): Homolog of NCBI NO: 11277626 NR Description: chlorophyll a/b-binding protein [imported] -
  misc_feature (1)..(142): Homolog of NCBI NO: 100197 NR Description: chlorophyll a/b-binding protein (cab-12) - tomato
  misc_feature (1)..(141): Homolog of NCBI NO: 13385204 NR Description: cDNA sequence BC002118; hypothetical protein,
  misc_feature (1)..(140): Homolog of NCBI NO: 322392 NR Description: chlorophyll a/b-binding protein type 4,
  misc_feature (1)..(140): Homolog of NCBI NO: 322393 NR Description: chlorophyll a/b-binding protein type 4,
  misc_feature (1)..(140): Homolog of NCBI NO: 1076630 NR Description: light-harvesting chlorophyll a - common tobacco
  misc_feature (1)..(141): Homolog of NCBI NO: 13385204 NR Description: cDNA sequence BC002118; hypothetical protein,
  misc_feature (1)..(142): Homolog of NCBI NO: 100197 NR Description: chlorophyll a/b-binding protein (cab-12) - tomato
  misc_feature (1)..(140): Homolog of NCBI NO: 11277626 NR Description: chlorophyll a/b-binding protein [imported] -
  misc_feature (1)..(142): Homolog of NCBI NO: 100196 NR Description: chlorophyll a/b-binding protein (cab-11) - tomato
  misc_feature (1)..(142): Homolog of NCBI NO: 30692874 NR Description: light-harvesting chlorophyll a/b binding protein

SEQ ID NO: 46767 - DNA, 1854 bp, Arabidopsis thaliana
  misc_feature (1)..(1854): Ceres Seq. ID no. 15174489
  misc_feature: MA Experiment ID: 108462 Result: Up-regulated in Transcription
  misc_feature: MA Experiment 108462 PARAMETER Experiment Name: At_Germinating_Seeds_cDNA_P Parameter: Age (day) Value: 2 vs. 0
  misc_feature: MA Experiment 108462 PARAMETER Experiment Name: At_Germinating_Seeds_cDNA_P Parameter: Tissue Value: Germinating Seeds
  misc_feature: MA Experiment ID: 108463 Result: Up-regulated in Transcription
  misc_feature: MA Experiment 108463 PARAMETER Experiment Name: At_Germinating_Seeds_cDNA_P Parameter: Age (day) Value: 3 vs. 0
  misc_feature: MA Experiment 108463 PARAMETER Experiment Name: At_Germinating_Seeds_cDNA_P Parameter: Tissue Value: Germinating Seeds
  misc_feature: MA Experiment ID: 20000173 Result: Down-regulated in Transcription
  misc_feature: MA Experiment 20000173 PARAMETER Experiment Name: At_42deg_Heat_P Parameter: Age (day) Value: 14
  misc_feature: MA Experiment 20000173 PARAMETER Experiment Name: At_42deg_Heat_P Parameter: Organism Value: A. thaliana
  misc_feature: MA Experiment 20000173 PARAMETER Experiment Name: At_42deg_Heat_P Parameter: Plant Line Value: WS
  misc_feature: MA Experiment 20000173 PARAMETER Experiment Name: At_42deg_Heat_P Parameter: Temperature (deg C) Value: 42 vs. 22
  misc_feature: MA Experiment 20000173 PARAMETER Experiment Name: At_42deg_Heat_P Parameter: Timepoint (hr) Value: 6
  misc_feature: MA Experiment 20000173 PARAMETER Experiment Name: At_42deg_Heat_P Parameter: Tissue Value: Aerial
  misc_feature: MA Experiment ID: 20000180 Result: Up-regulated in Transcription
  misc_feature: MA Experiment 20000180 PARAMETER Experiment Name: At_Germinating_Seeds_P Parameter: Age (hr) Value: 24 vs. 0
  misc_feature: MA Experiment 20000180 PARAMETER Experiment Name: At_Germinating_Seeds_P Parameter: Tissue Value: Germinating Seeds
  misc_feature: MA Experiment ID: 20000234 Result: Up-regulated in Transcription
  misc_feature: MA Experiment 20000234 PARAMETER Experiment Name: At_Siliques_P Parameter: Age (day) Value: 21
  misc_feature: MA Experiment 20000234 PARAMETER Experiment Name: At_Siliques_P Parameter: Organism Value: A. thaliana
  misc_feature: MA Experiment 20000234 PARAMETER Experiment Name: At_Siliques_P Parameter: Plant Line Value: WS
  misc_feature: MA Experiment 20000234 PARAMETER Experiment Name: At_Siliques_P Parameter: Tissue Value: Less Than 5mm Siliques vs. Whole Plant
  misc_feature: MA Experiment ID: 20000235 Result: Up-regulated in Transcription
  misc_feature: MA Experiment 20000235 PARAMETER Experiment Name: At_Siliques_P Parameter: Age (day) Value: 21
  misc_feature: MA Experiment 20000235 PARAMETER Experiment Name: At_Siliques_P Parameter: Organism Value: A. thaliana
  misc_feature: MA Experiment 20000235 PARAMETER Experiment Name: At_Siliques_P Parameter: Plant Line Value: WS
  misc_feature: MA Experiment 20000235 PARAMETER Experiment Name: At_Siliques_P Parameter: Tissue Value: 5-10mm Siliques vs. Whole Plant
  misc_feature: MA Experiment ID: 20000264 Result: Up-regulated in Transcription
  misc_feature: MA Experiment 20000264 PARAMETER Experiment Name: At_Open_Flower_P Parameter: Age (day) Value: 21
  misc_feature: MA Experiment 20000264 PARAMETER Experiment Name: At_Open_Flower_P Parameter: Plant Line Value: WS
  misc_feature: MA Experiment 20000264 PARAMETER Experiment Name: At_Open_Flower_P Parameter: Tissue Value: Open Flower vs. Whole Plant
  misc_feature: MA Experiment ID: 20000265 Result: Up-regulated in Transcription
  misc_feature: MA Experiment 20000265 PARAMETER Experiment Name: At_Open_Flower_P Parameter: Age (day) Value: 21
  misc_feature: MA Experiment 20000265 PARAMETER Experiment Name: At_Open_Flower_P Parameter: Plant Line Value: WS
  misc_feature: MA Experiment 20000265 PARAMETER Experiment Name: At_Open_Flower_P Parameter: Tissue Value: Closed Flower vs. Whole Plant
  misc_feature: MA Experiment ID: 20000286 Result: Up-regulated in Transcription
  misc_feature: MA Experiment 20000286 PARAMETER Experiment Name: At_Open_Flower_P Parameter: Age (day) Value: 21
  misc_feature: MA Experiment 20000286 PARAMETER Experiment Name: At_Open_Flower_P Parameter: Plant Line Value: WS
  misc_feature: MA Experiment 20000286 PARAMETER Experiment Name: At_Open_Flower_P Parameter: Tissue Value: Half Open vs. Whole Plant
  misc_feature: MA Experiment ID: 20000438 Result: Up-regulated in Transcription
  misc_feature: MA Experiment 20000438 PARAMETER Experiment Name: At_Shoots__P Parameter: Age (day) Value: 14
  misc_feature: MA Experiment 20000438 PARAMETER Experiment Name: At_Shoots__P Parameter: Tissue Value: Shoots vs. Whole Plant
  misc_feature: MA Experiment ID: 20000794 Result: Up-regulated in Transcription
  misc_feature: MA Experiment 20000794 PARAMETER Experiment Name: At_Petals_P Parameter: Age (day) Value: 23-25 days
  misc_feature: MA Experiment 20000794 PARAMETER Experiment Name: At_Petals_P Parameter: Plant Line Value: WS
  misc_feature: MA Experiment 20000794 PARAMETER Experiment Name: At_Petals_P Parameter: Tissue Value: Petals vs. Whole plant
aactcatcttcacagatgtctcaagcagctctctctctttctctctctctctctcttctttctctgatcacaagggttatttgtctgaatctcattctattgagtcattattgacctctgcagagatccggacaaagttttgaaaccgaccacaagtccaagaatcatcgatcatacaacaatgtctggagactctctgctcacatctaaacaaggaggaggttctttgtccatatactcacagccaaagaatgttactaaagagttcaacggtcgtgattcccccaagaacagcaaattccaccattacagatttgagctcgagcacgatgtgaagcgattgaaaaatcaattgcagaaagagactgcaatgcgcgctcttttgctgaaagcttctgatcaaagccataagattgagctgtctcacgcatcttctcttccgcgcagtgttcaagaacttctcaccaatatagcagctatggaagctacggtctctaagctcgaacaagagatcatgtctctgcatttcttgctgattcaagaacgaaacgagagaaaacttgccgagtacaacctcacccattctctatctccacctaatgctttagatttggttagactttccgaaaagaatgaaagtctacgccctaaagaccacaaagcacaacctagaagcaaagtggcaaagtccttgcagagttttgacaatgctaatgaactatccaaggagatgatcagatgcatgagaaacatatttgtgtctctaggagagacatctgcaggatccaaatcctcacaagagactgccagtgtttcttctcgtgagaatcctccatcatcatcaacgtcatggtggtctccttcagaacactcacggatctccaggtgggcacagagtccacggatcgatattcagaagaactcagatgttttagccacagagagcgatgtgtttgatctttatacagtccaaggaaagctgagctgggctgacatcgggagttacagatctgcaactgaagtggcttcaatgtctgttgaggagaaaaggctcggatatgcttcagatgagttatggagattcaggaacctcgttgaaagacttgccagagtaaatccagcagaactaagccacaacgagaagcttgccttctggatcaacatatacaatgccatgatcatgcatgcatacttggcttacggcgtaccaaaaactgacttaaagctcttctccttgatgcaaaaggctgcttatacagttggtggccattcatacaacgcagcaacgatcgaatacatgactttaaagatgagccctcctctgcatcgtcctcaaattgctctgcttctctccattctcaagctgaaagtatcagacgaacagagacaagcggggataagtacaccggaacctctagtgtcatttgctctcagctgcgggatgcactcatctcctgcggtgagaatatactcagccgagaacgtaggagaagaacttgaagaagctcagaaagattatatccaggcgtcagtgggagtgagcccaaggggaaagttgattgtgccccaaatgcttcactgtttcgccaagaaatctgtcgatgactgcaaggttgctctgtggatttctcgtcatttgcctcctcgccaagctgcatttgttgagcagtgtattcacaggcgacaacggtggggttttctgggttcatctagtagcaaatgcggcatagttccttttgattcacggttccgatatttgtttcttccgtagcaaggcattgattcacaatgatgtgattaaagcaaatactgttccgatcctagggtttagatctatgattatttaggtgattc

SEQ ID NO: 46768 - protein, 529 aa, Arabidopsis thaliana
  peptide (1)..(529): Ceres Seq. ID no. 15174490
  misc_feature (302)..(447): Pfam Name: Protein of unknown function, DUF547 Pfam Description: Protein of unknown function, DUF547
  misc_feature (125)..(529): Homolog of NCBI NO: 34895788 NR Description: P0434B04.9 [Oryza sativa (japonica
  misc_feature (148)..(526): Homolog of NCBI NO: 30690854 NR Description: expressed protein [Arabidopsis thaliana]
  misc_feature (148)..(526): Homolog of NCBI NO: 25407787 NR Description: hypothetical protein AT4g37080 [imported] -
  misc_feature (47)..(527): Homolog of NCBI NO: 15239037 NR Description: hypothetical protein [Arabidopsis thaliana]
  misc_feature (36)..(527): Homolog of NCBI NO: 30695170 NR Description: expressed protein [Arabidopsis thaliana]
  misc_feature (51)..(139): Homolog of NCBI NO: 25518300 NR Description: hypothetical protein F17F16.4 - Arabidopsis
  misc_feature (46)..(529): Homolog of NCBI NO: 22331037 NR Description: expressed protein [Arabidopsis thaliana]
  misc_feature (184)..(529): Homolog of NCBI NO: 21618245 NR Description: unknown [Arabidopsis thaliana]
  misc_feature (89)..(529): Homolog of NCBI NO: 25518300 NR Description: hypothetical protein F17F16.4 - Arabidopsis
  misc_feature (1)..(529): Homolog of NCBI NO: 30684987 NR Description: expressed protein [Arabidopsis thaliana]
MSGDSLLTSKQGGGSLSIYSQPKNVTKEFNGRDSPKNSKFHHYRFELEHDVKRLKNQLQKETAMRALLLKASDQSHKIELSHASSLPRSVQELLTNIAAMEATVSKLEQEIMSLHFLLIQERNERKLAEYNLTHSLSPPNALDLVRLSEKNESLRPKDHKAQPRSKVAKSLQSFDNANELSKEMIRCMRNIFVSLGETSAGSKSSQETASVSSRENPPSSSTSWWSPSEHSRISRWAQSPRIDIQKNSDVLATESDVFDLYTVQGKLSWADIGSYRSATEVASMSVEEKRLGYASDELWRFRNLVERLARVNPAELSHNEKLAFWINIYNAMIMHAYLAYGVPKTDLKLFSLMQKAAYTVGGHSYNAATIEYMTLKMSPPLHRPQIALLLSILKLKVSDEQRQAGISTPEPLVSFALSCGMHSSPAVRIYSAENVGEELEEAQKDYIQASVGVSPRGKLIVPQMLHCFAKKSVDDCKVALWISRHLPPRQAAFVEQCIHRRQRWGFLGSSSSKCGIVPFDSRFRYLFLP

SEQ ID NO: 46769 - protein, 466 aa, Arabidopsis thaliana
  peptide (1)..(466): Ceres Seq. ID no. 15174491
  misc_feature (239)..(384): Pfam Name: Protein of unknown function, DUF547 Pfam Description: Protein of unknown function, DUF547
  misc_feature (62)..(466): Homolog of NCBI NO: 34895788 NR Description: P0434B04.9 [Oryza sativa (japonica
  misc_feature (85)..(463): Homolog of NCBI NO: 30690854 NR Description: expressed protein [Arabidopsis thaliana]
  misc_feature (85)..(463): Homolog of NCBI NO: 25407787 NR Description: hypothetical protein AT4g37080 [imported] -
  misc_feature (1)..(464): Homolog of NCBI NO: 15239037 NR Description: hypothetical protein [Arabidopsis thaliana]
  misc_feature (1)..(464): Homolog of NCBI NO: 30695170 NR Description: expressed protein [Arabidopsis thaliana]
  misc_feature (1)..(76): Homolog of NCBI NO: 25518300 NR Description: hypothetical protein F17F16.4 - Arabidopsis
  misc_feature (1)..(466): Homolog of NCBI NO: 22331037 NR Description: expressed protein [Arabidopsis thaliana]
  misc_feature (121)..(466): Homolog of NCBI NO: 21618245 NR Description: unknown [Arabidopsis thaliana]
  misc_feature (26)..(466): Homolog of NCBI NO: 25518300 NR Description: hypothetical protein F17F16.4 - Arabidopsis
  misc_feature (1)..(466): Homolog of NCBI NO: 30684987 NR Description: expressed protein [Arabidopsis thaliana]
MRALLLKASDQSHKIELSHASSLPRSVQELLTNIAAMEATVSKLEQEIMSLHFLLIQERNERKLAEYNLTHSLSPPNALDLVRLSEKNESLRPKDHKAQPRSKVAKSLQSFDNANELSKEMIRCMRNIFVSLGETSAGSKSSQETASVSSRENPPSSSTSWWSPSEHSRISRWAQSPRIDIQKNSDVLATESDVFDLYTVQGKLSWADIGSYRSATEVASMSVEEKRLGYASDELWRFRNLVERLARVNPAELSHNEKLAFWINIYNAMIMHAYLAYGVPKTDLKLFSLMQKAAYTVGGHSYNAATIEYMTLKMSPPLHRPQIALLLSILKLKVSDEQRQAGISTPEPLVSFALSCGMHSSPAVRIYSAENVGEELEEAQKDYIQASVGVSPRGKLIVPQMLHCFAKKSVDDCKVALWISRHLPPRQAAFVEQCIHRRQRWGFLGSSSSKCGIVPFDSRFRYLFLP

SEQ ID NO: 46770 - protein, 430 aa, Arabidopsis thaliana
  peptide (1)..(430): Ceres Seq. ID no. 15174492
  misc_feature (203)..(348): Pfam Name: Protein of unknown function, DUF547 Pfam Description: Protein of unknown function, DUF547
  misc_feature (26)..(430): Homolog of NCBI NO: 34895788 NR Description: P0434B04.9 [Oryza sativa (japonica
  misc_feature (49)..(427): Homolog of NCBI NO: 30690854 NR Description: expressed protein [Arabidopsis thaliana]
  misc_feature (49)..(427): Homolog of NCBI NO: 25407787 NR Description: hypothetical protein AT4g37080 [imported] -
  misc_feature (1)..(428): Homolog of NCBI NO: 15239037 NR Description: hypothetical protein [Arabidopsis thaliana]
  misc_feature (1)..(428): Homolog of NCBI NO: 30695170 NR Description: expressed protein [Arabidopsis thaliana]
  misc_feature (1)..(40): Homolog of NCBI NO: 25518300 NR Description: hypothetical protein F17F16.4 - Arabidopsis
  misc_feature (1)..(430): Homolog of NCBI NO: 22331037 NR Description: expressed protein [Arabidopsis thaliana]
  misc_feature (85)..(430): Homolog of NCBI NO: 21618245 NR Description: unknown [Arabidopsis thaliana]
  misc_feature (1)..(430): Homolog of NCBI NO: 25518300 NR Description: hypothetical protein F17F16.4 - Arabidopsis
  misc_feature (1)..(430): Homolog of NCBI NO: 30684987 NR Description: expressed protein [Arabidopsis thaliana]
MEATVSKLEQEIMSLHFLLIQERNERKLAEYNLTHSLSPPNALDLVRLSEKNESLRPKDHKAQPRSKVAKSLQSFDNANELSKEMIRCMRNIFVSLGETSAGSKSSQETASVSSRENPPSSSTSWWSPSEHSRISRWAQSPRIDIQKNSDVLATESDVFDLYTVQGKLSWADIGSYRSATEVASMSVEEKRLGYASDELWRFRNLVERLARVNPAELSHNEKLAFWINIYNAMIMHAYLAYGVPKTDLKLFSLMQKAAYTVGGHSYNAATIEYMTLKMSPPLHRPQIALLLSILKLKVSDEQRQAGISTPEPLVSFALSCGMHSSPAVRIYSAENVGEELEEAQKDYIQASVGVSPRGKLIVPQMLHCFAKKSVDDCKVALWISRHLPPRQAAFVEQCIHRRQRWGFLGSSSSKCGIVPFDSRFRYLFLP

SEQ ID NO: 46771 - DNA, 1206 bp, Arabidopsis thaliana; identical to SEQ ID NO: 29329
  misc_feature (1)..(1206): Ceres Seq. ID no. 12601145
  misc_feature: MA Experiment ID: 108561 Result: Down-regulated in Transcription
  misc_feature: MA Experiment 108561 PARAMETER Experiment Name: At_100uM_ABA_cDNA_P Parameter: Timepoint (hr) Value: 6
  misc_feature: MA Experiment 108561 PARAMETER Experiment Name: At_100uM_ABA_cDNA_P Parameter: Tissue Value: Aerial
  misc_feature: MA Experiment 108561 PARAMETER Experiment Name: At_100uM_ABA_cDNA_P Parameter: Treatment Value: 100uM ABA vs. No Treatment
  misc_feature: MA Experiment ID: 108585 Result: Down-regulated in Transcription
  misc_feature: MA Experiment 108585 PARAMETER Experiment Name: At_5mM_NaNP_cDNA_P Parameter: Timepoint (hr) Value: 6
  misc_feature: MA Experiment 108585 PARAMETER Experiment Name: At_5mM_NaNP_cDNA_P Parameter: Tissue Value: Aerial
  misc_feature: MA Experiment 108585 PARAMETER Experiment Name: At_5mM_NaNP_cDNA_P Parameter: Treatment Value: null
  misc_feature: MA Experiment ID: 20000180 Result: Up-regulated in Transcription
  misc_feature: MA Experiment 20000180 PARAMETER Experiment Name: At_Germinating_Seeds_P Parameter: Age (hr) Value: 24 vs. 0
  misc_feature: MA Experiment 20000180 PARAMETER Experiment Name: At_Germinating_Seeds_P Parameter: Tissue Value: Germinating Seeds
  misc_feature: MA Experiment ID: 20000185 Result: Down-regulated in Transcription
  misc_feature: MA Experiment 20000185 PARAMETER Experiment Name: At_Roots__P Parameter: Age (day) Value: 7 vs. 21
  misc_feature: MA Experiment 20000185 PARAMETER Experiment Name: At_Roots__P Parameter: Organism Value: A. thaliana
  misc_feature: MA Experiment 20000185 PARAMETER Experiment Name: At_Roots__P Parameter: Tissue Value: Roots vs. Whole Plant
  misc_feature: MA Experiment ID: 20000234 Result: Up-regulated in Transcription
  misc_feature: MA Experiment 20000234 PARAMETER Experiment Name: At_Siliques_P Parameter: Age (day) Value: 21
  misc_feature: MA Experiment 20000234 PARAMETER Experiment Name: At_Siliques_P Parameter: Organism Value: A. thaliana
  misc_feature: MA Experiment 20000234 PARAMETER Experiment Name: At_Siliques_P Parameter: Plant Line Value: WS
  misc_feature: MA Experiment 20000234 PARAMETER Experiment Name: At_Siliques_P Parameter: Tissue Value: Less Than 5mm Siliques vs. Whole Plant
  misc_feature: MA Experiment ID: 20000436 Result: Down-regulated in Transcription
  misc_feature: MA Experiment 20000436 PARAMETER Experiment Name: At_Drought_P Parameter: Age (day) Value: 7
  misc_feature: MA Experiment 20000436 PARAMETER Experiment Name: At_Drought_P Parameter: Organism Value: A. thaliana
  misc_feature: MA Experiment 20000436 PARAMETER Experiment Name: At_Drought_P Parameter: Plant Line Value: WS
  misc_feature: MA Experiment 20000436 PARAMETER Experiment Name: At_Drought_P Parameter: Timepoint (hr) Value: 12
  misc_feature: MA Experiment 20000436 PARAMETER Experiment Name: At_Drought_P Parameter: Tissue Value: Whole Plant
  misc_feature: MA Experiment 20000436 PARAMETER Experiment Name: At_Drought_P Parameter: Treatment Value: Drought vs. No Drought
  misc_feature: MA Experiment ID: 20000437 Result: Down-regulated in Transcription
  misc_feature: MA Experiment 20000437 PARAMETER Experiment Name: At_Drought_P Parameter: Age (day) Value: 8
  misc_feature: MA Experiment 20000437 PARAMETER Experiment Name: At_Drought_P Parameter: Organism Value: A. thaliana
  misc_feature: MA Experiment 20000437 PARAMETER Experiment Name: At_Drought_P Parameter: Plant Line Value: WS
  misc_feature: MA Experiment 20000437 PARAMETER Experiment Name: At_Drought_P Parameter: Timepoint (hr) Value: 24
  misc_feature: MA Experiment 20000437 PARAMETER Experiment Name: At_Drought_P Parameter: Tissue Value: Whole Plant
  misc_feature: MA Experiment 20000437 PARAMETER Experiment Name: At_Drought_P Parameter: Treatment Value: Drought vs. No Drought
  misc_feature: MA Experiment ID: 20000439 Result: Down-regulated in Transcription
  misc_feature: MA Experiment 20000439 PARAMETER Experiment Name: At_Roots__P Parameter: Age (day) Value: 14 vs. 21
  misc_feature: MA Experiment 20000439 PARAMETER Experiment Name: At_Roots__P Parameter: Organism Value: A. thaliana
  misc_feature: MA Experiment 20000439 PARAMETER Experiment Name: At_Roots__P Parameter: Tissue Value: Roots vs. Whole Plant
  misc_feature: MA Experiment ID: 20000794 Result: Down-regulated in Transcription
  misc_feature: MA Experiment 20000794 PARAMETER Experiment Name: At_Petals_P Parameter: Age (day) Value: 23-25 days
  misc_feature: MA Experiment 20000794 PARAMETER Experiment Name: At_Petals_P Parameter: Plant Line Value: WS
  misc_feature: MA Experiment 20000794 PARAMETER Experiment Name: At_Petals_P Parameter: Tissue Value: Petals vs. Whole plant
  misc_feature: MA Experiment ID: 20001248 Result: Down-regulated in Transcription
  misc_feature: MA Experiment 20001248 PARAMETER Experiment Name: At_Far-red-induction_P Parameter: Age (day) Value: 7
  misc_feature: MA Experiment 20001248 PARAMETER Experiment Name: At_Far-red-induction_P Parameter: Light Value: Far-red vs. White
  misc_feature: MA Experiment 20001248 PARAMETER Experiment Name: At_Far-red-induction_P Parameter: Organism Value: A. thaliana
  misc_feature: MA Experiment 20001248 PARAMETER Experiment Name: At_Far-red-induction_P Parameter: Plant Line Value: Columbia
  misc_feature: MA Experiment 20001248 PARAMETER Experiment Name: At_Far-red-induction_P Parameter: Timepoint (hr) Value: 4
  misc_feature: MA Experiment 20001248 PARAMETER Experiment Name: At_Far-red-induction_P Parameter: Tissue Value: Whole Plant
  misc_feature: MA Experiment ID: 20001450 Result: Down-regulated in Transcription
  misc_feature: MA Experiment 20001450 PARAMETER Experiment Name: At_Far-red-induction_P Parameter: Age (day) Value: 7
  misc_feature: MA Experiment 20001450 PARAMETER Experiment Name: At_Far-red-induction_P Parameter: Light Value: Far-red vs. White
  misc_feature: MA Experiment 20001450 PARAMETER Experiment Name: At_Far-red-induction_P Parameter: Organism Value: A. thaliana
  misc_feature: MA Experiment 20001450 PARAMETER Experiment Name: At_Far-red-induction_P Parameter: Plant Line Value: Columbia
  misc_feature: MA Experiment 20001450 PARAMETER Experiment Name: At_Far-red-induction_P Parameter: Timepoint (hr) Value: 8
  misc_feature: MA Experiment 20001450 PARAMETER Experiment Name: At_Far-red-induction_P Parameter: Tissue Value: Whole Plant
  misc_feature: MA Experiment ID: 20001560 Result: Up-regulated in Transcription
  misc_feature: MA Experiment 20001560 PARAMETER Experiment Name: At_Drought_Soil_Dry_P Parameter: Age (day) Value: 28
  misc_feature: MA Experiment 20001560 PARAMETER Experiment Name: At_Drought_Soil_Dry_P Parameter: Organism Value: A. thaliana
  misc_feature: MA Experiment 20001560 PARAMETER Experiment Name: At_Drought_Soil_Dry_P Parameter: Plant Line Value: WS
  misc_feature: MA Experiment 20001560 PARAMETER Experiment Name: At_Drought_Soil_Dry_P Parameter: Post Timepoint (hr) Value: None
  misc_feature: MA Experiment 20001560 PARAMETER Experiment Name: At_Drought_Soil_Dry_P Parameter: Post-Treatment Value: None
  misc_feature: MA Experiment 20001560 PARAMETER Experiment Name: At_Drought_Soil_Dry_P Parameter: Timepoint (day) Value: 14
  misc_feature: MA Experiment 20001560 PARAMETER Experiment Name: At_Drought_Soil_Dry_P Parameter: Treatment Value: Drought vs. No Drought
  misc_feature: MA Experiment ID: 20001757 Result: Up-regulated in Transcription
  misc_feature: MA Experiment 20001757 PARAMETER Experiment Name: At_50mM_NH4NO3_L-to-H_P Parameter: Timepoint (hr) Value: 6
  misc_feature: MA Experiment 20001757 PARAMETER Experiment Name: At_50mM_NH4NO3_L-to-H_P Parameter: Tissue Value: Leaf
  misc_feature: MA Experiment 20001757 PARAMETER Experiment Name: At_50mM_NH4NO3_L-to-H_P Parameter: Treatment Value: 50mM NH4NO3 vs 100mM Mannitol
  misc_feature: MA Experiment ID: 20001905 Result: Down-regulated in Transcription
  misc_feature: MA Experiment 20001905 PARAMETER Experiment Name: At_Drought_Reproduction_P Parameter: Age (day) Value: 40
  misc_feature: MA Experiment 20001905 PARAMETER Experiment Name: At_Drought_Reproduction_P Parameter: Organism Value: A. thaliana
  misc_feature: MA Experiment 20001905 PARAMETER Experiment Name: At_Drought_Reproduction_P Parameter: Plant Line Value: WS
  misc_feature: MA Experiment 20001905 PARAMETER Experiment Name: At_Drought_Reproduction_P Parameter: Timepoint (day) Value: 10
  misc_feature: MA Experiment 20001905 PARAMETER Experiment Name: At_Drought_Reproduction_P Parameter: Tissue Value: Rosettes
  misc_feature: MA Experiment 20001905 PARAMETER Experiment Name: At_Drought_Reproduction_P Parameter: Treatment Value: Drought vs. No Drought

SEQ ID NO: 46772 - protein, 325 aa, Arabidopsis thaliana; identical to SEQ ID NO: 29330
  peptide (1)..(325): Ceres Seq. ID no. 12601146
  misc_feature (164)..(320): Homolog of NCBI NO: 17230243 NR Description: hypothetical protein [Nostoc sp. PCC 7120]
  misc_feature (170)..(311): Homolog of NCBI NO: 37523053 NR Description: hypothetical protein gll3484 [Gloeobacter
  misc_feature (164)..(321): Homolog of NCBI NO: 16330694 NR Description: hypothetical protein [Synechocystis sp. PCC 6803]
  misc_feature (3)..(324): Homolog of NCBI NO: 30689062 NR Description: expressed protein [Arabidopsis thaliana]
  misc_feature (78)..(320): Homolog of NCBI NO: 11358410 NR Description: hypothetical protein T7H20.290 - Arabidopsis
  misc_feature (78)..(325): Homolog of NCBI NO: 18413869 NR Description: putative protein
  misc_feature (78)..(325): Homolog of NCBI NO: 34897418 NR Description: unknown protein [Oryza sativa (japonica
  misc_feature (62)..(325): Homolog of NCBI NO: 14719331 NR Description: putative 3-beta hydroxysteroid
  misc_feature (1)..(325): Homolog of NCBI NO: 7485430 NR Description: hypothetical protein At2g37660 [imported] -
  misc_feature (1)..(325): Homolog of NCBI NO: 18404496 NR Description: expressed protein
  misc_feature (164)..(320): Homolog of NCBI NO: 17230243 NR Description: hypothetical protein [Nostoc sp. PCC 7120]
  misc_feature (170)..(311): Homolog of NCBI NO: 37523053 NR Description: hypothetical protein gll3484 [Gloeobacter
  misc_feature (164)..(321): Homolog of NCBI NO: 16330694 NR Description: hypothetical protein [Synechocystis sp. PCC 6803]
  misc_feature (3)..(324): Homolog of NCBI NO: 30689062 NR Description: expressed protein [Arabidopsis thaliana]
  misc_feature (78)..(320): Homolog of NCBI NO: 11358410 NR Description: hypothetical protein T7H20.290 - Arabidopsis
  misc_feature (78)..(325): Homolog of NCBI NO: 18413869 NR Description: putative protein
  misc_feature (78)..(325): Homolog of NCBI NO: 34897418 NR Description: unknown protein [Oryza sativa (japonica
  misc_feature (62)..(325): Homolog of NCBI NO: 14719331 NR Description: putative 3-beta hydroxysteroid
  misc_feature (1)..(325): Homolog of NCBI NO: 7485430 NR Description: hypothetical protein At2g37660 [imported] -
  misc_feature (1)..(325): Homolog of NCBI NO: 18404496 NR Description: expressed protein
  misc_feature (164)..(320): Homolog of NCBI NO: 17230243 NR Description: hypothetical protein [Nostoc sp. PCC 7120]
  misc_feature (170)..(311): Homolog of NCBI NO: 37523053 NR Description: hypothetical protein gll3484 [Gloeobacter
  misc_feature (164)..(321): Homolog of NCBI NO: 16330694 NR Description: hypothetical protein [Synechocystis sp. PCC 6803]
  misc_feature (3)..(324): Homolog of NCBI NO: 30689062 NR Description: expressed protein [Arabidopsis thaliana]
  misc_feature (78)..(320): Homolog of NCBI NO: 11358410 NR Description: hypothetical protein T7H20.290 - Arabidopsis
  misc_feature (78)..(325): Homolog of NCBI NO: 18413869 NR Description: putative protein
  misc_feature (78)..(325): Homolog of NCBI NO: 34897418 NR Description: unknown protein [Oryza sativa (japonica
  misc_feature (62)..(325): Homolog of NCBI NO: 14719331 NR Description: putative 3-beta hydroxysteroid
  misc_feature (1)..(325): Homolog of NCBI NO: 7485430 NR Description: hypothetical protein At2g37660 [imported] -
  misc_feature (1)..(325): Homolog of NCBI NO: 18404496 NR Description: expressed protein
  misc_feature (164)..(320): Homolog of NCBI NO: 17230243 NR Description: hypothetical protein [Nostoc sp. PCC 7120]
  misc_feature (170)..(311): Homolog of NCBI NO: 37523053 NR Description: hypothetical protein gll3484 [Gloeobacter
  misc_feature (164)..(321): Homolog of NCBI NO: 16330694 NR Description: hypothetical protein [Synechocystis sp. PCC 6803]
  misc_feature (3)..(324): Homolog of NCBI NO: 30689062 NR Description: expressed protein [Arabidopsis thaliana]
  misc_feature (78)..(320): Homolog of NCBI NO: 11358410 NR Description: hypothetical protein T7H20.290 - Arabidopsis
  misc_feature (78)..(325): Homolog of NCBI NO: 18413869 NR Description: putative protein
  misc_feature (78)..(325): Homolog of NCBI NO: 34897418 NR Description: unknown protein [Oryza sativa (japonica
  misc_feature (62)..(325): Homolog of NCBI NO: 14719331 NR Description: putative 3-beta hydroxysteroid
  misc_feature (1)..(325): Homolog of NCBI NO: 7485430 NR Description: hypothetical protein At2g37660 [imported] -
  misc_feature (1)..(325): Homolog of NCBI NO: 18404496 NR Description: expressed protein

SEQ ID NO: 46773 - protein, 323 aa, Arabidopsis thaliana; identical to SEQ ID NO: 29331
  peptide (1)..(323): Ceres Seq. ID no. 12601147
  misc_feature (162)..(318): Homolog of NCBI NO: 17230243 NR Description: hypothetical protein [Nostoc sp. PCC 7120]
  misc_feature (168)..(309): Homolog of NCBI NO: 37523053 NR Description: hypothetical protein gll3484 [Gloeobacter
  misc_feature (162)..(319): Homolog of NCBI NO: 16330694 NR Description: hypothetical protein [Synechocystis sp. PCC 6803]
  misc_feature (1)..(322): Homolog of NCBI NO: 30689062 NR Description: expressed protein [Arabidopsis thaliana]
  misc_feature (76)..(318): Homolog of NCBI NO: 11358410 NR Description: hypothetical protein T7H20.290 - Arabidopsis
  misc_feature (76)..(323): Homolog of NCBI NO: 18413869 NR Description: putative protein
  misc_feature (76)..(323): Homolog of NCBI NO: 34897418 NR Description: unknown protein [Oryza sativa (japonica
  misc_feature (60)..(323): Homolog of NCBI NO: 14719331 NR Description: putative 3-beta hydroxysteroid
  misc_feature (1)..(323): Homolog of NCBI NO: 7485430 NR Description: hypothetical protein At2g37660 [imported] -
  misc_feature (1)..(323): Homolog of NCBI NO: 18404496 NR Description: expressed protein
  misc_feature (162)..(318): Homolog of NCBI NO: 17230243 NR Description: hypothetical protein [Nostoc sp. PCC 7120]
  misc_feature (168)..(309): Homolog of NCBI NO: 37523053 NR Description: hypothetical protein gll3484 [Gloeobacter
  misc_feature (162)..(319): Homolog of NCBI NO: 16330694 NR Description: hypothetical protein [Synechocystis sp. PCC 6803]
  misc_feature (1)..(322): Homolog of NCBI NO: 30689062 NR Description: expressed protein [Arabidopsis thaliana]
  misc_feature (76)..(318): Homolog of NCBI NO: 11358410 NR Description: hypothetical protein T7H20.290 - Arabidopsis
  misc_feature (76)..(323): Homolog of NCBI NO: 18413869 NR Description: putative protein
  misc_feature (76)..(323): Homolog of NCBI NO: 34897418 NR Description: unknown protein [Oryza sativa (japonica
  misc_feature (60)..(323): Homolog of NCBI NO: 14719331 NR Description: putative 3-beta hydroxysteroid
  misc_feature (1)..(323): Homolog of NCBI NO: 7485430 NR Description: hypothetical protein At2g37660 [imported] -
  misc_feature (1)..(323): Homolog of NCBI NO: 18404496 NR Description: expressed protein
  misc_feature (162)..(318): Homolog of NCBI NO: 17230243 NR Description: hypothetical protein [Nostoc sp. PCC 7120]
  misc_feature (168)..(309): Homolog of NCBI NO: 37523053 NR Description: hypothetical protein gll3484 [Gloeobacter
  misc_feature (162)..(319): Homolog of NCBI NO: 16330694 NR Description: hypothetical protein [Synechocystis sp. PCC 6803]
  misc_feature (1)..(322): Homolog of NCBI NO: 30689062 NR Description: expressed protein [Arabidopsis thaliana]
  misc_feature (76)..(318): Homolog of NCBI NO: 11358410 NR Description: hypothetical protein T7H20.290 - Arabidopsis
  misc_feature (76)..(323): Homolog of NCBI NO: 18413869 NR Description: putative protein
  misc_feature (76)..(323): Homolog of NCBI NO: 34897418 NR Description: unknown protein [Oryza sativa (japonica
  misc_feature (60)..(323): Homolog of NCBI NO: 14719331 NR Description: putative 3-beta hydroxysteroid
  misc_feature (1)..(323): Homolog of NCBI NO: 7485430 NR Description: hypothetical protein At2g37660 [imported] -
  misc_feature (1)..(323): Homolog of NCBI NO: 18404496 NR Description: expressed protein
  misc_feature (162)..(318): Homolog of NCBI NO: 17230243 NR Description: hypothetical protein [Nostoc sp. PCC 7120]
  misc_feature (168)..(309): Homolog of NCBI NO: 37523053 NR Description: hypothetical protein gll3484 [Gloeobacter
  misc_feature (162)..(319): Homolog of NCBI NO: 16330694 NR Description: hypothetical protein [Synechocystis sp. PCC 6803]
  misc_feature (1)..(322): Homolog of NCBI NO: 30689062 NR Description: expressed protein [Arabidopsis thaliana]
  misc_feature (76)..(318): Homolog of NCBI NO: 11358410 NR Description: hypothetical protein T7H20.290 - Arabidopsis
  misc_feature (76)..(323): Homolog of NCBI NO: 18413869 NR Description: putative protein
  misc_feature (76)..(323): Homolog of NCBI NO: 34897418 NR Description: unknown protein [Oryza sativa (japonica
  misc_feature (60)..(323): Homolog of NCBI NO: 14719331 NR Description: putative 3-beta hydroxysteroid
  misc_feature (1)..(323): Homolog of NCBI NO: 7485430 NR Description: hypothetical protein At2g37660 [imported] -
  misc_feature (1)..(323): Homolog of NCBI NO: 18404496 NR Description: expressed protein

SEQ ID NO: 46774 - protein, 322 aa, Arabidopsis thaliana; identical to SEQ ID NO: 29332
  peptide (1)..(322): Ceres Seq. ID no. 12601148
  misc_feature (161)..(317): Homolog of NCBI NO: 17230243 NR Description: hypothetical protein [Nostoc sp. PCC 7120]
  misc_feature (167)..(308): Homolog of NCBI NO: 37523053 NR Description: hypothetical protein gll3484 [Gloeobacter
  misc_feature (161)..(318): Homolog of NCBI NO: 16330694 NR Description: hypothetical protein [Synechocystis sp. PCC 6803]
  misc_feature (1)..(321): Homolog of NCBI NO: 30689062 NR Description: expressed protein [Arabidopsis thaliana]
  misc_feature (75)..(317): Homolog of NCBI NO: 11358410 NR Description: hypothetical protein T7H20.290 - Arabidopsis
  misc_feature (75)..(322): Homolog of NCBI NO: 18413869 NR Description: putative protein
  misc_feature (75)..(322): Homolog of NCBI NO: 34897418 NR Description: unknown protein [Oryza sativa (japonica
  misc_feature (59)..(322): Homolog of NCBI NO: 14719331 NR Description: putative 3-beta hydroxysteroid
  misc_feature (1)..(322): Homolog of NCBI NO: 7485430 NR Description: hypothetical protein At2g37660 [imported] -
  misc_feature (1)..(322): Homolog of NCBI NO: 18404496 NR Description: expressed protein
  misc_feature (161)..(317): Homolog of NCBI NO: 17230243 NR Description: hypothetical protein [Nostoc sp. PCC 7120]
  misc_feature (167)..(308): Homolog of NCBI NO: 37523053 NR Description: hypothetical protein gll3484 [Gloeobacter
  misc_feature (161)..(318): Homolog of NCBI NO: 16330694 NR Description: hypothetical protein [Synechocystis sp. PCC 6803]
  misc_feature (1)..(321): Homolog of NCBI NO: 30689062 NR Description: expressed protein [Arabidopsis thaliana]
  misc_feature (75)..(317): Homolog of NCBI NO: 11358410 NR Description: hypothetical protein T7H20.290 - Arabidopsis
  misc_feature (75)..(322): Homolog of NCBI NO: 18413869 NR Description: putative protein
  misc_feature (75)..(322): Homolog of NCBI NO: 34897418 NR Description: unknown protein [Oryza sativa (japonica
  misc_feature (59)..(322): Homolog of NCBI NO: 14719331 NR Description: putative 3-beta hydroxysteroid
  misc_feature (1)..(322): Homolog of NCBI NO: 7485430 NR Description: hypothetical protein At2g37660 [imported] -
  misc_feature (1)..(322): Homolog of NCBI NO: 18404496 NR Description: expressed protein
  misc_feature (161)..(317): Homolog of NCBI NO: 17230243 NR Description: hypothetical protein [Nostoc sp. PCC 7120]
  misc_feature (167)..(308): Homolog of NCBI NO: 37523053 NR Description: hypothetical protein gll3484 [Gloeobacter
  misc_feature (161)..(318): Homolog of NCBI NO: 16330694 NR Description: hypothetical protein [Synechocystis sp. PCC 6803]
  misc_feature (1)..(321): Homolog of NCBI NO: 30689062 NR Description: expressed protein [Arabidopsis thaliana]
  misc_feature (75)..(317): Homolog of NCBI NO: 11358410 NR Description: hypothetical protein T7H20.290 - Arabidopsis
  misc_feature (75)..(322): Homolog of NCBI NO: 18413869 NR Description: putative protein
  misc_feature (75)..(322): Homolog of NCBI NO: 34897418 NR Description: unknown protein [Oryza sativa (japonica
  misc_feature (59)..(322): Homolog of NCBI NO: 14719331 NR Description: putative 3-beta hydroxysteroid
  misc_feature (1)..(322): Homolog of NCBI NO: 7485430 NR Description: hypothetical protein At2g37660 [imported] -
  misc_feature (1)..(322): Homolog of NCBI NO: 18404496 NR Description: expressed protein
  misc_feature (161)..(317): Homolog of NCBI NO: 17230243 NR Description: hypothetical protein [Nostoc sp. PCC 7120]
  misc_feature (167)..(308): Homolog of NCBI NO: 37523053 NR Description: hypothetical protein gll3484 [Gloeobacter
  misc_feature (161)..(318): Homolog of NCBI NO: 16330694 NR Description: hypothetical protein [Synechocystis sp. PCC 6803]
  misc_feature (1)..(321): Homolog of NCBI NO: 30689062 NR Description: expressed protein [Arabidopsis thaliana]
  misc_feature (75)..(317): Homolog of NCBI NO: 11358410 NR Description: hypothetical protein T7H20.290 - Arabidopsis
  misc_feature (75)..(322): Homolog of NCBI NO: 18413869 NR Description: putative protein
  misc_feature (75)..(322): Homolog of NCBI NO: 34897418 NR Description: unknown protein [Oryza sativa (japonica
  misc_feature (59)..(322): Homolog of NCBI NO: 14719331 NR Description: putative 3-beta hydroxysteroid
  misc_feature (1)..(322): Homolog of NCBI NO: 7485430 NR Description: hypothetical protein At2g37660 [imported] -
  misc_feature (1)..(322): Homolog of NCBI NO: 18404496 NR Description: expressed protein

SEQ ID NO: 46775 - DNA, 1884 bp, Arabidopsis thaliana
  misc_feature (1)..(1884): Ceres Seq. ID no. 13647243
  misc_feature: MA Experiment ID: 108461 Result: Up-regulated in Transcription
  misc_feature: MA Experiment 108461 PARAMETER Experiment Name: At_Germinating_Seeds_cDNA_P Parameter: Age (day) Value: 1 vs. 0
  misc_feature: MA Experiment 108461 PARAMETER Experiment Name: At_Germinating_Seeds_cDNA_P Parameter: Tissue Value: Germinating Seeds
  misc_feature: MA Experiment ID: 108462 Result: Up-regulated in Transcription
  misc_feature: MA Experiment 108462 PARAMETER Experiment Name: At_Germinating_Seeds_cDNA_P Parameter: Age (day) Value: 2 vs. 0
  misc_feature: MA Experiment 108462 PARAMETER Experiment Name: At_Germinating_Seeds_cDNA_P Parameter: Tissue Value: Germinating Seeds
  misc_feature: MA Experiment ID: 108463 Result: Up-regulated in Transcription
  misc_feature: MA Experiment 108463 PARAMETER Experiment Name: At_Germinating_Seeds_cDNA_P Parameter: Age (day) Value: 3 vs. 0
  misc_feature: MA Experiment 108463 PARAMETER Experiment Name: At_Germinating_Seeds_cDNA_P Parameter: Tissue Value: Germinating Seeds
  misc_feature: MA Experiment ID: 108464 Result: Up-regulated in Transcription
  misc_feature: MA Experiment 108464 PARAMETER Experiment Name: At_Germinating_Seeds_cDNA_P Parameter: Age (day) Value: 4 vs. 0
  misc_feature: MA Experiment 108464 PARAMETER Experiment Name: At_Germinating_Seeds_cDNA_P Parameter: Tissue Value: Germinating Seeds
  misc_feature: MA Experiment ID: 108474 Result: Down-regulated in Transcription
  misc_feature: MA Experiment 108474 PARAMETER Experiment Name: At_Drought_Flowers_cDNA_P Parameter: Timepoint (hr) Value: null
  misc_feature: MA Experiment 108474 PARAMETER Experiment Name: At_Drought_Flowers_cDNA_P Parameter: Treatment Value: Drought vs. No Drought
  misc_feature: MA Experiment ID: 108576 Result: Up-regulated in Transcription
  misc_feature: MA Experiment 108576 PARAMETER Experiment Name: At_42deg_Heat_cDNA_P Parameter: Temperature (deg C) Value: 42 vs. 22
  misc_feature: MA Experiment 108576 PARAMETER Experiment Name: At_42deg_Heat_cDNA_P Parameter: Timepoint (hr) Value: 1
  misc_feature: MA Experiment 108576 PARAMETER Experiment Name: At_42deg_Heat_cDNA_P Parameter: Tissue Value: Aerial
  misc_feature: MA Experiment ID: 20000180 Result: Up-regulated in Transcription
  misc_feature: MA Experiment 20000180 PARAMETER Experiment Name: At_Germinating_Seeds_P Parameter: Age (hr) Value: 24 vs. 0
  misc_feature: MA Experiment 20000180 PARAMETER Experiment Name: At_Germinating_Seeds_P Parameter: Tissue Value: Germinating Seeds
  misc_feature: MA Experiment ID: 20000264 Result: Up-regulated in Transcription
  misc_feature: MA Experiment 20000264 PARAMETER Experiment Name: At_Open_Flower_P Parameter: Age (day) Value: 21
  misc_feature: MA Experiment 20000264 PARAMETER Experiment Name: At_Open_Flower_P Parameter: Plant Line Value: WS
  misc_feature: MA Experiment 20000264 PARAMETER Experiment Name: At_Open_Flower_P Parameter: Tissue Value: Open Flower vs. Whole Plant
  misc_feature: MA Experiment ID: 20000265 Result: Up-regulated in Transcription
  misc_feature: MA Experiment 20000265 PARAMETER Experiment Name: At_Open_Flower_P Parameter: Age (day) Value: 21
  misc_feature: MA Experiment 20000265 PARAMETER Experiment Name: At_Open_Flower_P Parameter: Plant Line Value: WS
  misc_feature: MA Experiment 20000265 PARAMETER Experiment Name: At_Open_Flower_P Parameter: Tissue Value: Closed Flower vs. Whole Plant
  misc_feature: MA Experiment ID: 20000286 Result: Up-regulated in Transcription
  misc_feature: MA Experiment 20000286 PARAMETER Experiment Name: At_Open_Flower_P Parameter: Age (day) Value: 21
  misc_feature: MA Experiment 20000286 PARAMETER Experiment Name: At_Open_Flower_P Parameter: Plant Line Value: WS
  misc_feature: MA Experiment 20000286 PARAMETER Experiment Name: At_Open_Flower_P Parameter: Tissue Value: Half Open vs. Whole Plant
  misc_feature: MA Experiment ID: 20001906 Result: Up-regulated in Transcription
  misc_feature: MA Experiment 20001906 PARAMETER Experiment Name: At_Drought_Reproduction_P Parameter: Age (day) Value: 35
  misc_feature: MA Experiment 20001906 PARAMETER Experiment Name: At_Drought_Reproduction_P Parameter: Organism Value: A. thaliana
  misc_feature: MA Experiment 20001906 PARAMETER Experiment Name: At_Drought_Reproduction_P Parameter: Plant Line Value: WS
  misc_feature: MA Experiment 20001906 PARAMETER Experiment Name: At_Drought_Reproduction_P Parameter: Timepoint (day) Value: 5
  misc_feature: MA Experiment 20001906 PARAMETER Experiment Name: At_Drought_Reproduction_P Parameter: Tissue Value: Siliques
  misc_feature: MA Experiment 20001906 PARAMETER Experiment Name: At_Drought_Reproduction_P Parameter: Treatment Value: Drought vs. No Drought
gctcactagtcccccccccccccaaaatcaagaaactctcaaaacccatttcaaaagagaaacacttctttaaaaagtttttagtaataaataatgggaaagctcttggtgttaatgttagttggggtgttcttggcttttgaaagcttggaagctcttgaatatggagatgcacttaacaagtcaatcttgttctttgaaggccaacgatccggtaaactcccgactaaccaacgagttaaatggcgagccgattctgcaatctctgatggttcactagctaatgtgaatttaattggaggatattacgatgctggtgacaatgtaaaatttgtgtggccaatgtcatttaccacaaccttgttaagttgggctgcaattgaataccaaaatgagatttcttccgttaaccagctcggttatctccggtctactatcaaatggggaaccgatttcatcctacgcgctcatacatctcccaacatgttatatacccaggtgggagatggtaattcagatcatagttgttgggagaggccagaagatatggacacatcaagaactctctacagtatctcttcctcttcccctggttccgaagccgcgggtgaagccgcagccgctcttgcagcggcctcacttgttttcaaatcggtcgattctacttattcatccacactactaaaccacgcaaaaaccctatttgaatttgctgataagtatagaggttcttatcaagcatcttgccccttctacagctcctactctggctacaaggatgaattattatgggctgcggcttggctatacaaagcaacaggagataaaagttacataaattatgttataagcaataaagattggagccaagccgttaatgaattcagttgggacaacaaattcgtcggcgctcaagctttactcgtatcggagttttacaacggggcaaatgacttggcaaaatttaagaccgatgttgaatccttcgtctgtgcaatgatgtcaggaagtagctctcaacaaattaaacaaactcctggtggccttttgtttattagagacagtagcaacttacaatatgtaacaacggctacaactgttttgttccattactcaaaaactcttaccaaagtcggggttggttcaatccagtgcggttcgaccaagttcaccgtatctcaaattcgaaatttcgctaaatcacaggttgattatatccttggaaataatccaatgaaaatgtcttacatggtcggatttgggacaaagtatccaacacaacctcatcatagaggctcatctttaccatcgatccaatctaaaccggagaaaattgactgtaatggaggatattcatactacaattctgatacaccaaacccgaatgtgcatattggtgcaattgtgggcggaccgaattcatccgatcagtatagcgacaaaaaatcagattactctcatgctgagcccacaacttacatcaacgccgcctttattggacctgttgcagctctaatcagttcttccggataaactcacgtttagattggttgtggggaaacaaatattagcaaagaagaatcattactcatcaacaaactattatgactacaaacttaaataattagtcaggggatgtatcgtttgctttaaacatatatctctatatagatgtatatacctacacacatacacacactcacatatatatcattgaatcgtatatcttagctaaaatgaaaactatttaattacagatgtctatataggttttcttatatcattatattgtatagattttttatgatacattatatatagttcattcttatttactacaaaaaaaaaaaaaaaaaaactcgagggggggcccggtacccaatt

SEQ ID NO: 46776 - protein, 479 aa, Arabidopsis thaliana
  peptide (1)..(479): Ceres Seq. ID no. 15218826
  misc_feature (23)..(474): Pfam Name: Glycosyl hydrolase family 9 Pfam Description: Glycosyl hydrolase family 9
  misc_feature (18)..(478): Homolog of NCBI NO: 1076692 NR Description: cellulase (EC 3.2.1.4) - European elder (fragment)
  misc_feature (21)..(478): Homolog of NCBI NO: 1655543 NR Description: cellulase; endo-beta-1,4-glucanase [Capsicum
  misc_feature (21)..(478): Homolog of NCBI NO: 1363496 NR Description: cellulase (EC 3.2.1.4) 3D precursor - pepper
  misc_feature (18)..(478): Homolog of NCBI NO: 575404 NR Description: cellulase [Sambucus nigra]
  misc_feature (23)..(478): Homolog of NCBI NO: 228690 NR Description: abscission cellulase
  misc_feature (23)..(478): Homolog of NCBI NO: 1346225 NR Description: Endoglucanase precursor (Endo-1,4-beta-glucanase)
  misc_feature (23)..(478): Homolog of NCBI NO: 1039431 NR Description: cellulase [Phaseolus vulgaris]
  misc_feature (1)..(478): Homolog of NCBI NO: 7484848 NR Description: cellulase (EC 3.2.1.4) F17A8.90 - Arabidopsis
  misc_feature (1)..(478): Homolog of NCBI NO: 30681176 NR Description: glycosyl hydrolase family 9 [Arabidopsis thaliana]
  misc_feature (1)..(479): Homolog of NCBI NO: 15236526 NR Description: glycosyl hydrolase family 9 [Arabidopsis
MGKLLVLMLVGVFLAFESLEALEYGDALNKSILFFEGQRSGKLPTNQRVKWRADSAISDGSLANVNLIGGYYDAGDNVKFVWPMSFTTTLLSWAAIEYQNEISSVNQLGYLRSTIKWGTDFILRAHTSPNMLYTQVGDGNSDHSCWERPEDMDTSRTLYSISSSSPGSEAAGEAAAALAAASLVFKSVDSTYSSTLLNHAKTLFEFADKYRGSYQASCPFYSSYSGYKDELLWAAAWLYKATGDKSYINYVISNKDWSQAVNEFSWDNKFVGAQALLVSEFYNGANDLAKFKTDVESFVCAMMSGSSSQQIKQTPGGLLFIRDSSNLQYVTTATTVLFHYSKTLTKVGVGSIQCGSTKFTVSQIRNFAKSQVDYILGNNPMKMSYMVGFGTKYPTQPHHRGSSLPSIQSKPEKIDCNGGYSYYNSDTPNPNVHIGAIVGGPNSSDQYSDKKSDYSHAEPTTYINAAFIGPVAALISSSG

SEQ ID NO: 46777 - protein, 472 aa, Arabidopsis thaliana
  peptide (1)..(472): Ceres Seq. ID no. 15218827
  misc_feature (16)..(467): Pfam Name: Glycosyl hydrolase family 9 Pfam Description: Glycosyl hydrolase family 9
  misc_feature (11)..(471): Homolog of NCBI NO: 1076692 NR Description: cellulase (EC 3.2.1.4) - European elder (fragment)
  misc_feature (14)..(471): Homolog of NCBI NO: 1655543 NR Description: cellulase; endo-beta-1,4-glucanase [Capsicum
  misc_feature (14)..(471): Homolog of NCBI NO: 1363496 NR Description: cellulase (EC 3.2.1.4) 3D precursor - pepper
  misc_feature (11)..(471): Homolog of NCBI NO: 575404 NR Description: cellulase [Sambucus nigra]
  misc_feature (16)..(471): Homolog of NCBI NO: 228690 NR Description: abscission cellulase
  misc_feature (16)..(471): Homolog of NCBI NO: 1346225 NR Description: Endoglucanase precursor (Endo-1,4-beta-glucanase)
  misc_feature (16)..(471): Homolog of NCBI NO: 1039431 NR Description: cellulase [Phaseolus vulgaris]
  misc_feature (1)..(471): Homolog of NCBI NO: 7484848 NR Description: cellulase (EC 3.2.1.4) F17A8.90 - Arabidopsis
  misc_feature (1)..(471): Homolog of NCBI NO: 30681176 NR Description: glycosyl hydrolase family 9 [Arabidopsis thaliana]
  misc_feature (1)..(472): Homolog of NCBI NO: 15236526 NR Description: glycosyl hydrolase family 9 [Arabidopsis
MLVGVFLAFESLEALEYGDALNKSILFFEGQRSGKLPTNQRVKWRADSAISDGSLANVNLIGGYYDAGDNVKFVWPMSFTTTLLSWAAIEYQNEISSVNQLGYLRSTIKWGTDFILRAHTSPNMLYTQVGDGNSDHSCWERPEDMDTSRTLYSISSSSPGSEAAGEAAAALAAASLVFKSVDSTYSSTLLNHAKTLFEFADKYRGSYQASCPFYSSYSGYKDELLWAAAWLYKATGDKSYINYVISNKDWSQAVNEFSWDNKFVGAQALLVSEFYNGANDLAKFKTDVESFVCAMMSGSSSQQIKQTPGGLLFIRDSSNLQYVTTATTVLFHYSKTLTKVGVGSIQCGSTKFTVSQIRNFAKSQVDYILGNNPMKMSYMVGFGTKYPTQPHHRGSSLPSIQSKPEKIDCNGGYSYYNSDTPNPNVHIGAIVGGPNSSDQYSDKKSDYSHAEPTTYINAAFIGPVAALISSSG

SEQ ID NO: 46778 - protein, 396 aa, Arabidopsis thaliana
  peptide (1)..(396): Ceres Seq. ID no. 15218828
  misc_feature (1)..(391): Pfam Name: Glycosyl hydrolase family 9 Pfam Description: Glycosyl hydrolase family 9
  misc_feature (1)..(395): Homolog of NCBI NO: 1076692 NR Description: cellulase (EC 3.2.1.4) - European elder (fragment)
  misc_feature (1)..(395): Homolog of NCBI NO: 1655543 NR Description: cellulase; endo-beta-1,4-glucanase [Capsicum
  misc_feature (1)..(395): Homolog of NCBI NO: 1363496 NR Description: cellulase (EC 3.2.1.4) 3D precursor - pepper
  misc_feature (1)..(395): Homolog of NCBI NO: 575404 NR Description: cellulase [Sambucus nigra]
  misc_feature (1)..(395): Homolog of NCBI NO: 228690 NR Description: abscission cellulase
  misc_feature (1)..(395): Homolog of NCBI NO: 1346225 NR Description: Endoglucanase precursor (Endo-1,4-beta-glucanase)
  misc_feature (1)..(395): Homolog of NCBI NO: 1039431 NR Description: cellulase [Phaseolus vulgaris]
  misc_feature (1)..(395): Homolog of NCBI NO: 7484848 NR Description: cellulase (EC 3.2.1.4) F17A8.90 - Arabidopsis
  misc_feature (1)..(395): Homolog of NCBI NO: 30681176 NR Description: glycosyl hydrolase family 9 [Arabidopsis thaliana]
  misc_feature (1)..(396): Homolog of NCBI NO: 15236526 NR Description: glycosyl hydrolase family 9 [Arabidopsis
MSFTTTLLSWAAIEYQNEISSVNQLGYLRSTIKWGTDFILRAHTSPNMLYTQVGDGNSDHSCWERPEDMDTSRTLYSISSSSPGSEAAGEAAAALAAASLVFKSVDSTYSSTLLNHAKTLFEFADKYRGSYQASCPFYSSYSGYKDELLWAAAWLYKATGDKSYINYVISNKDWSQAVNEFSWDNKFVGAQALLVSEFYNGANDLAKFKTDVESFVCAMMSGSSSQQIKQTPGGLLFIRDSSNLQYVTTATTVLFHYSKTLTKVGVGSIQCGSTKFTVSQIRNFAKSQVDYILGNNPMKMSYMVGFGTKYPTQPHHRGSSLPSIQSKPEKIDCNGGYSYYNSDTPNPNVHIGAIVGGPNSSDQYSDKKSDYSHAEPTTYINAAFIGPVAALISSSG

SEQ ID NO: 46779 - DNA, 2894 bp, Arabidopsis thaliana
  misc_feature (1)..(2894): Ceres Seq. ID no. 14309751
  misc_feature: MA Experiment ID: 20000171 Result: Down-regulated in Transcription
  misc_feature: MA Experiment 20000171 PARAMETER Experiment Name: At_42deg_Heat_P Parameter: Age (day) Value: 14
  misc_feature: MA Experiment 20000171 PARAMETER Experiment Name: At_42deg_Heat_P Parameter: Organism Value: A. thaliana
  misc_feature: MA Experiment 20000171 PARAMETER Experiment Name: At_42deg_Heat_P Parameter: Plant Line Value: WS
  misc_feature: MA Experiment 20000171 PARAMETER Experiment Name: At_42deg_Heat_P Parameter: Temperature (deg C) Value: 42 vs. 22
  misc_feature: MA Experiment 20000171 PARAMETER Experiment Name: At_42deg_Heat_P Parameter: Timepoint (hr) Value: 1
  misc_feature: MA Experiment 20000171 PARAMETER Experiment Name: At_42deg_Heat_P Parameter: Tissue Value: Aerial
  misc_feature: MA Experiment ID: 20000173 Result: Down-regulated in Transcription
  misc_feature: MA Experiment 20000173 PARAMETER Experiment Name: At_42deg_Heat_P Parameter: Age (day) Value: 14
  misc_feature: MA Experiment 20000173 PARAMETER Experiment Name: At_42deg_Heat_P Parameter: Organism Value: A. thaliana
  misc_feature: MA Experiment 20000173 PARAMETER Experiment Name: At_42deg_Heat_P Parameter: Plant Line Value: WS
  misc_feature: MA Experiment 20000173 PARAMETER Experiment Name: At_42deg_Heat_P Parameter: Temperature (deg C) Value: 42 vs. 22
  misc_feature: MA Experiment 20000173 PARAMETER Experiment Name: At_42deg_Heat_P Parameter: Timepoint (hr) Value: 6
  misc_feature: MA Experiment 20000173 PARAMETER Experiment Name: At_42deg_Heat_P Parameter: Tissue Value: Aerial
  misc_feature: MA Experiment ID: 20000234 Result: Up-regulated in Transcription
  misc_feature: MA Experiment 20000234 PARAMETER Experiment Name: At_Siliques_P Parameter: Age (day) Value: 21
  misc_feature: MA Experiment 20000234 PARAMETER Experiment Name: At_Siliques_P Parameter: Organism Value: A. thaliana
  misc_feature: MA Experiment 20000234 PARAMETER Experiment Name: At_Siliques_P Parameter: Plant Line Value: WS
  misc_feature: MA Experiment 20000234 PARAMETER Experiment Name: At_Siliques_P Parameter: Tissue Value: Less Than 5mm Siliques vs. Whole Plant
  misc_feature: MA Experiment ID: 20000264 Result: Up-regulated in Transcription
  misc_feature: MA Experiment 20000264 PARAMETER Experiment Name: At_Open_Flower_P Parameter: Age (day) Value: 21
  misc_feature: MA Experiment 20000264 PARAMETER Experiment Name: At_Open_Flower_P Parameter: Plant Line Value: WS
  misc_feature: MA Experiment 20000264 PARAMETER Experiment Name: At_Open_Flower_P Parameter: Tissue Value: Open Flower vs. Whole Plant
  misc_feature: MA Experiment ID: 20000265 Result: Up-regulated in Transcription
  misc_feature: MA Experiment 20000265 PARAMETER Experiment Name: At_Open_Flower_P Parameter: Age (day) Value: 21
  misc_feature: MA Experiment 20000265 PARAMETER Experiment Name: At_Open_Flower_P Parameter: Plant Line Value: WS
  misc_feature: MA Experiment 20000265 PARAMETER Experiment Name: At_Open_Flower_P Parameter: Tissue Value: Closed Flower vs. Whole Plant
  misc_feature: MA Experiment ID: 20000286 Result: Up-regulated in Transcription
  misc_feature: MA Experiment 20000286 PARAMETER Experiment Name: At_Open_Flower_P Parameter: Age (day) Value: 21
  misc_feature: MA Experiment 20000286 PARAMETER Experiment Name: At_Open_Flower_P Parameter: Plant Line Value: WS
  misc_feature: MA Experiment 20000286 PARAMETER Experiment Name: At_Open_Flower_P Parameter: Tissue Value: Half Open vs. Whole Plant
  misc_feature: MA Experiment ID: 20000436 Result: Down-regulated in Transcription
  misc_feature: MA Experiment 20000436 PARAMETER Experiment Name: At_Drought_P Parameter: Age (day) Value: 7
  misc_feature: MA Experiment 20000436 PARAMETER Experiment Name: At_Drought_P Parameter: Organism Value: A. thaliana
  misc_feature: MA Experiment 20000436 PARAMETER Experiment Name: At_Drought_P Parameter: Plant Line Value: WS
  misc_feature: MA Experiment 20000436 PARAMETER Experiment Name: At_Drought_P Parameter: Timepoint (hr) Value: 12
  misc_feature: MA Experiment 20000436 PARAMETER Experiment Name: At_Drought_P Parameter: Tissue Value: Whole Plant
  misc_feature: MA Experiment 20000436 PARAMETER Experiment Name: At_Drought_P Parameter: Treatment Value: Drought vs. No Drought
  misc_feature: MA Experiment ID: 20000437 Result: Down-regulated in Transcription
  misc_feature: MA Experiment 20000437 PARAMETER Experiment Name: At_Drought_P Parameter: Age (day) Value: 8
  misc_feature: MA Experiment 20000437 PARAMETER Experiment Name: At_Drought_P Parameter: Organism Value: A. thaliana
  misc_feature: MA Experiment 20000437 PARAMETER Experiment Name: At_Drought_P Parameter: Plant Line Value: WS
  misc_feature: MA Experiment 20000437 PARAMETER Experiment Name: At_Drought_P Parameter: Timepoint (hr) Value: 24
  misc_feature: MA Experiment 20000437 PARAMETER Experiment Name: At_Drought_P Parameter: Tissue Value: Whole Plant
  misc_feature: MA Experiment 20000437 PARAMETER Experiment Name: At_Drought_P Parameter: Treatment Value: Drought vs. No Drought
  misc_feature: MA Experiment ID: 20000438 Result: Up-regulated in Transcription
  misc_feature: MA Experiment 20000438 PARAMETER Experiment Name: At_Shoots__P Parameter: Age (day) Value: 14
  misc_feature: MA Experiment 20000438 PARAMETER Experiment Name: At_Shoots__P Parameter: Tissue Value: Shoots vs. Whole Plant
  misc_feature: MA Experiment ID: 20000794 Result: Up-regulated in Transcription
  misc_feature: MA Experiment 20000794 PARAMETER Experiment Name: At_Petals_P Parameter: Age (day) Value: 23-25 days
  misc_feature: MA Experiment 20000794 PARAMETER Experiment Name: At_Petals_P Parameter: Plant Line Value: WS
  misc_feature: MA Experiment 20000794 PARAMETER Experiment Name: At_Petals_P Parameter: Tissue Value: Petals vs. Whole plant
  misc_feature: MA Experiment ID: 20001554 Result: Down-regulated in Transcription
  misc_feature: MA Experiment 20001554 PARAMETER Experiment Name: At_Drought_Soil_Dry_P Parameter: Age (day) Value: 21
  misc_feature: MA Experiment 20001554 PARAMETER Experiment Name: At_Drought_Soil_Dry_P Parameter: Organism Value: A. thaliana
  misc_feature: MA Experiment 20001554 PARAMETER Experiment Name: At_Drought_Soil_Dry_P Parameter: Plant Line Value: WS
  misc_feature: MA Experiment 20001554 PARAMETER Experiment Name: At_Drought_Soil_Dry_P Parameter: Post Timepoint (hr) Value: None
  misc_feature: MA Experiment 20001554 PARAMETER Experiment Name: At_Drought_Soil_Dry_P Parameter: Post-Treatment Value: None
  misc_feature: MA Experiment 20001554 PARAMETER Experiment Name: At_Drought_Soil_Dry_P Parameter: Timepoint (day) Value: 7
  misc_feature: MA Experiment 20001554 PARAMETER Experiment Name: At_Drought_Soil_Dry_P Parameter: Treatment Value: Drought vs. No Drought
  misc_feature: MA Experiment ID: 20001555 Result: Down-regulated in Transcription
  misc_feature: MA Experiment 20001555 PARAMETER Experiment Name: At_Drought_Soil_Dry_P Parameter: Age (day) Value: 24
  misc_feature: MA Experiment 20001555 PARAMETER Experiment Name: At_Drought_Soil_Dry_P Parameter: Organism Value: A. thaliana
  misc_feature: MA Experiment 20001555 PARAMETER Experiment Name: At_Drought_Soil_Dry_P Parameter: Plant Line Value: WS
  misc_feature: MA Experiment 20001555 PARAMETER Experiment Name: At_Drought_Soil_Dry_P Parameter: Post Timepoint (hr) Value: None
  misc_feature: MA Experiment 20001555 PARAMETER Experiment Name: At_Drought_Soil_Dry_P Parameter: Post-Treatment Value: None
  misc_feature: MA Experiment 20001555 PARAMETER Experiment Name: At_Drought_Soil_Dry_P Parameter: Timepoint (day) Value: 10
  misc_feature: MA Experiment 20001555 PARAMETER Experiment Name: At_Drought_Soil_Dry_P Parameter: Treatment Value: Drought vs. No Drought
  misc_feature: MA Experiment ID: 20001556 Result: Down-regulated in Transcription
  misc_feature: MA Experiment 20001556 PARAMETER Experiment Name: At_Drought_Soil_Dry_P Parameter: Age (day) Value: 26
  misc_feature: MA Experiment 20001556 PARAMETER Experiment Name: At_Drought_Soil_Dry_P Parameter: Organism Value: A. thaliana
  misc_feature: MA Experiment 20001556 PARAMETER Experiment Name: At_Drought_Soil_Dry_P Parameter: Plant Line Value: WS
  misc_feature: MA Experiment 20001556 PARAMETER Experiment Name: At_Drought_Soil_Dry_P Parameter: Post Timepoint (hr) Value: None
  misc_feature: MA Experiment 20001556 PARAMETER Experiment Name: At_Drought_Soil_Dry_P Parameter: Post-Treatment Value: None
  misc_feature: MA Experiment 20001556 PARAMETER Experiment Name: At_Drought_Soil_Dry_P Parameter: Timepoint (day) Value: 12
  misc_feature: MA Experiment 20001556 PARAMETER Experiment Name: At_Drought_Soil_Dry_P Parameter: Treatment Value: Drought vs. No Drought
  misc_feature: MA Experiment ID: 20001904 Result: Down-regulated in Transcription
  misc_feature: MA Experiment 20001904 PARAMETER Experiment Name: At_Drought_Reproduction_P Parameter: Age (day) Value: 37
  misc_feature: MA Experiment 20001904 PARAMETER Experiment Name: At_Drought_Reproduction_P Parameter: Organism Value: A. thaliana
  misc_feature: MA Experiment 20001904 PARAMETER Experiment Name: At_Drought_Reproduction_P Parameter: Plant Line Value: WS
  misc_feature: MA Experiment 20001904 PARAMETER Experiment Name: At_Drought_Reproduction_P Parameter: Timepoint (day) Value: 7
  misc_feature: MA Experiment 20001904 PARAMETER Experiment Name: At_Drought_Reproduction_P Parameter: Tissue Value: Rosettes
  misc_feature: MA Experiment 20001904 PARAMETER Experiment Name: At_Drought_Reproduction_P Parameter: Treatment Value: Drought vs. No Drought
  misc_feature: MA Experiment ID: 20001905 Result: Down-regulated in Transcription
  misc_feature: MA Experiment 20001905 PARAMETER Experiment Name: At_Drought_Reproduction_P Parameter: Age (day) Value: 40
  misc_feature: MA Experiment 20001905 PARAMETER Experiment Name: At_Drought_Reproduction_P Parameter: Organism Value: A. thaliana
  misc_feature: MA Experiment 20001905 PARAMETER Experiment Name: At_Drought_Reproduction_P Parameter: Plant Line Value: WS
  misc_feature: MA Experiment 20001905 PARAMETER Experiment Name: At_Drought_Reproduction_P Parameter: Timepoint (day) Value: 10
  misc_feature: MA Experiment 20001905 PARAMETER Experiment Name: At_Drought_Reproduction_P Parameter: Tissue Value: Rosettes
  misc_feature: MA Experiment 20001905 PARAMETER Experiment Name: At_Drought_Reproduction_P Parameter: Treatment Value: Drought vs. No Drought
gaatgaaggaagaagattcaaaaaaaataagaggataggaatctatttggtcgcttttgcttcctcctattctggggagaatttgggatcttggagttgaatccgttgtgagaagaaggatctttttgagcttgtgtactgtgtcctctcagttgattcatcgcagagagaagaggtcctgtcatgtctatgagttttgtattcatctgaaaggtcttactggaatgacttatcaaaggggagagtctttggttcctgtcttgatttccaacttggtgggggcataggccaaataatgcaaacctaaaatccttgtttcttccagaatcttgtgagctttttaatctctccaacaaagtacaatttctctgaggattgtgttattacacagagaaaacaaaaagagggtccaagaaaatctcttgcattctcttctcctctctctggtattggtatcttcaaatgagtcgactacagaagcgagggaaacaggaaaagcctgttgtatctgatggagctcaaaaggttattgttgccgttaaagcatctagggagattccaaagactgccttgatttgggctttgactcatgttgttcagcctggggattgcattacccttattgttgttgtcccttctcacaactccggacgaaaactttggggtttcaataagagtttccctatgtttgctggggattgtgcaagtggtcatcggaaatcacattctgaagcactaccggagattaaaagtgatctcactgacacttgttcccaaatgattctccagcttcatgatgtctatgacccgaataagataaatgtcaagattaagattgtttctggatcaccctgtggagcagttgctgctgagtcgaagaaagcgcaagcgaactgggtagtaatggacaaacacctcaagcaggaagagaaacggtgtatggatgaattgcaatgcaacattgtggtgatgaagcgttcgcaggcaaaagttctacgcttaaaccttgttggatctcctaagaaagatgctggaaaagagtgtcccttaccatctggaccagaagcagcatctgagaaacactcaaagaacactaaaggattgttagatgctgaaagaggactacctgtcactcctactagcagccctgagctggggacaccgttcacaagtacagaagccgggacttcatctgtgtcgagctccgacctgggaacttcacctttcttcacattgggaatgaacggatacatgaagaaggatggagcattggtgatcaaggagaatgatggtcttgatgattctggctctgaaacagagagtgaaaaccaatcattagcgtcaacgagtatgagattccagccatggatatcagaatatattggcacccatcgccactcatcccaggaggccgaagaaagcttattatggaaaaatgatgacagggcacaaatatccactacaaaggctttgcttgaaaagttctctaaacttgatgttgaagttgggttgtcgtctagtcgaaggatggatttagagtttagtggaaacgtaagagatgcaatatcactctctcgaagtgctcctcctggtccacctcctctctgttcaatttgccagcacaaggcgccaatatttgggaaacccccaaggctgtttacatacgctgaattagagcttgcaacgggtgggttttcacaggctaacttcttggctgagggtggttatggatctgttcatcggggtgtgctaccagaaggccaggtagttgcagtaaagcaacacaaattggccagttctcaaggagatgtagagttttgctccgaagtggaagttctcagctgtgctcagcacagaaacgtcgttatgctaattggtttctgcattgaagacagcagacggctcttggtctatgaatacatttgcaatggttcacttgactctcatctatacggtcgtcaaaaggaaactctggaatggccagcacggcaaaagattgctgttggagctgcaagaggtcttcggtatcttcacgaagagtgcagagttggctgtattgtccacagagacatgcgtcctaacaacatcctcatcactcatgataatgagccactggttggagattttggtctagcaagatggcagcctgatggggaaatgggtgtagatacacgagtgataggaaccttcggctatctagctcccgaatatgctcaaagcgggcaaatcacagaaaaagctgatgtctactcgttcggggttgttctagttgagctagtcactggccgcaaagccattgatatcaccaggccgaaaggccagcaatgcctgactgaatgggcacgtcctctactggaagaatatgcgatagatgaacttatcgatccgaggcttgggaaccgttttgtagaaagtgaggtcatttgtatgcttcatgcagcttcgttgtgcatacgtagagatccacatttgaggccacgcatgtctcaggtgttgcgtatactggaaggagatatgataatggatggaaactacgcatcaactccaggttcagaggcaggcaaccgaagcgggaggttctgggcggatcattacagcggtcagctaacgaatgatggctcggataggttcagtgaaaggctgtctgttgaaacgccaagactagctttgagggagagggaaagaagccagaggtttgaactaaaccataacaagcaatactaatcacactactttgctttatgataagtttagttgatagggtatttagtaaattcctctgttttaagtgatgtggtcaagctggcaacacagctttttttgtttgtatagtggggtaagatgcaaaaacagttgctaaatatgttatcaaggaatttaaaattgtttttggt

SEQ ID NO: 46780 - protein, 753 aa, Arabidopsis thaliana
  peptide (1)..(753): Ceres Seq. ID no. 14309752
  misc_feature (18)..(148): Pfam Name: Universal stress protein family Pfam Description: Universal stress protein family
  misc_feature (399)..(715): Homolog of NCBI NO: 34904234 NR Description: putative receptor protein kinase PERK1
  misc_feature (350)..(682): Homolog of NCBI NO: 15221470 NR Description: protein kinase family [Arabidopsis thaliana]
  misc_feature (399)..(718): Homolog of NCBI NO: 29367569 NR Description: putative receptor protein kinase
  misc_feature (1)..(287): Homolog of NCBI NO: 15222672 NR Description: protein kinase family [Arabidopsis thaliana]
  misc_feature (139)..(710): Homolog of NCBI NO: 10880466 NR Description: dual-specific kinase DSK1 [Nicotiana tabacum]
  misc_feature (200)..(702): Homolog of NCBI NO: 15222672 NR Description: protein kinase family [Arabidopsis thaliana]
  misc_feature (23)..(677): Homolog of NCBI NO: 10176783 NR Description: contains similarity to protein
  misc_feature (20)..(688): Homolog of NCBI NO: 15810441 NR Description: unknown protein [Arabidopsis thaliana]
  misc_feature (20)..(688): Homolog of NCBI NO: 18423902 NR Description: protein kinase family [Arabidopsis thaliana]
  misc_feature (1)..(705): Homolog of NCBI NO: 34912394 NR Description: putative protein kinase APK1B, Serine/Threonine
MSRLQKRGKQEKPVVSDGAQKVIVAVKASREIPKTALIWALTHVVQPGDCITLIVVVPSHNSGRKLWGFNKSFPMFAGDCASGHRKSHSEALPEIKSDLTDTCSQMILQLHDVYDPNKINVKIKIVSGSPCGAVAAESKKAQANWVVMDKHLKQEEKRCMDELQCNIVVMKRSQAKVLRLNLVGSPKKDAGKECPLPSGPEAASEKHSKNTKGLLDAERGLPVTPTSSPELGTPFTSTEAGTSSVSSSDLGTSPFFTLGMNGYMKKDGALVIKENDGLDDSGSETESENQSLASTSMRFQPWISEYIGTHRHSSQEAEESLLWKNDDRAQISTTKALLEKFSKLDVEVGLSSSRRMDLEFSGNVRDAISLSRSAPPGPPPLCSICQHKAPIFGKPPRLFTYAELELATGGFSQANFLAEGGYGSVHRGVLPEGQVVAVKQHKLASSQGDVEFCSEVEVLSCAQHRNVVMLIGFCIEDSRRLLVYEYICNGSLDSHLYGRQKETLEWPARQKIAVGAARGLRYLHEECRVGCIVHRDMRPNNILITHDNEPLVGDFGLARWQPDGEMGVDTRVIGTFGYLAPEYAQSGQITEKADVYSFGVVLVELVTGRKAIDITRPKGQQCLTEWARPLLEEYAIDELIDPRLGNRFVESEVICMLHAASLCIRRDPHLRPRMSQVLRILEGDMIMDGNYASTPGSEAGNRSGRFWADHYSGQLTNDGSDRFSERLSVETPRLALRERERSQRFELNHNKQY

SEQ ID NO: 46781 - protein, 679 aa, Arabidopsis thaliana
  peptide (1)..(679): Ceres Seq. ID no. 14309753
  misc_feature (1)..(74): Pfam Name: Universal stress protein family Pfam Description: Universal stress protein family
  misc_feature (325)..(641): Homolog of NCBI NO: 34904234 NR Description: putative receptor protein kinase PERK1
  misc_feature (276)..(608): Homolog of NCBI NO: 15221470 NR Description: protein kinase family [Arabidopsis thaliana]
  misc_feature (325)..(644): Homolog of NCBI NO: 29367569 NR Description: putative receptor protein kinase
  misc_feature (1)..(213): Homolog of NCBI NO: 15222672 NR Description: protein kinase family [Arabidopsis thaliana]
  misc_feature (65)..(636): Homolog of NCBI NO: 10880466 NR Description: dual-specific kinase DSK1 [Nicotiana tabacum]
  misc_feature (126)..(628): Homolog of NCBI NO: 15222672 NR Description: protein kinase family [Arabidopsis thaliana]
  misc_feature (1)..(603): Homolog of NCBI NO: 10176783 NR Description: contains similarity to protein
  misc_feature (1)..(614): Homolog of NCBI NO: 15810441 NR Description: unknown protein [Arabidopsis thaliana]
  misc_feature (1)..(614): Homolog of NCBI NO: 18423902 NR Description: protein kinase family [Arabidopsis thaliana]
  misc_feature (1)..(631): Homolog of NCBI NO: 34912394 NR Description: putative protein kinase APK1B, Serine/Threonine
MFAGDCASGHRKSHSEALPEIKSDLTDTCSQMILQLHDVYDPNKINVKIKIVSGSPCGAVAAESKKAQANWVVMDKHLKQEEKRCMDELQCNIVVMKRSQAKVLRLNLVGSPKKDAGKECPLPSGPEAASEKHSKNTKGLLDAERGLPVTPTSSPELGTPFTSTEAGTSSVSSSDLGTSPFFTLGMNGYMKKDGALVIKENDGLDDSGSETESENQSLASTSMRFQPWISEYIGTHRHSSQEAEESLLWKNDDRAQISTTKALLEKFSKLDVEVGLSSSRRMDLEFSGNVRDAISLSRSAPPGPPPLCSICQHKAPIFGKPPRLFTYAELELATGGFSQANFLAEGGYGSVHRGVLPEGQVVAVKQHKLASSQGDVEFCSEVEVLSCAQHRNVVMLIGFCIEDSRRLLVYEYICNGSLDSHLYGRQKETLEWPARQKIAVGAARGLRYLHEECRVGCIVHRDMRPNNILITHDNEPLVGDFGLARWQPDGEMGVDTRVIGTFGYLAPEYAQSGQITEKADVYSFGVVLVELVTGRKAIDITRPKGQQCLTEWARPLLEEYAIDELIDPRLGNRFVESEVICMLHAASLCIRRDPHLRPRMSQVLRILEGDMIMDGNYASTPGSEAGNRSGRFWADHYSGQLTNDGSDRFSERLSVETPRLALRERERSQRFELNHNKQY

SEQ ID NO: 46782 - protein, 648 aa, Arabidopsis thaliana
  peptide (1)..(648): Ceres Seq. ID no. 14309754
  misc_feature (294)..(610): Homolog of NCBI NO: 34904234 NR Description: putative receptor protein kinase PERK1
  misc_feature (245)..(577): Homolog of NCBI NO: 15221470 NR Description: protein kinase family [Arabidopsis thaliana]
  misc_feature (294)..(613): Homolog of NCBI NO: 29367569 NR Description: putative receptor protein kinase
  misc_feature (1)..(182): Homolog of NCBI NO: 15222672 NR Description: protein kinase family [Arabidopsis thaliana]
  misc_feature (34)..(605): Homolog of NCBI NO: 10880466 NR Description: dual-specific kinase DSK1 [Nicotiana tabacum]
  misc_feature (95)..(597): Homolog of NCBI NO: 15222672 NR Description: protein kinase family [Arabidopsis thaliana]
  misc_feature (1)..(572): Homolog of NCBI NO: 10176783 NR Description: contains similarity to protein
  misc_feature (1)..(583): Homolog of NCBI NO: 15810441 NR Description: unknown protein [Arabidopsis thaliana]
  misc_feature (1)..(583): Homolog of NCBI NO: 18423902 NR Description: protein kinase family [Arabidopsis thaliana]
  misc_feature (1)..(600): Homolog of NCBI NO: 34912394 NR Description: putative protein kinase APK1B, Serine/Threonine
MILQLHDVYDPNKINVKIKIVSGSPCGAVAAESKKAQANWVVMDKHLKQEEKRCMDELQCNIVVMKRSQAKVLRLNLVGSPKKDAGKECPLPSGPEAASEKHSKNTKGLLDAERGLPVTPTSSPELGTPFTSTEAGTSSVSSSDLGTSPFFTLGMNGYMKKDGALVIKENDGLDDSGSETESENQSLASTSMRFQPWISEYIGTHRHSSQEAEESLLWKNDDRAQISTTKALLEKFSKLDVEVGLSSSRRMDLEFSGNVRDAISLSRSAPPGPPPLCSICQHKAPIFGKPPRLFTYAELELATGGFSQANFLAEGGYGSVHRGVLPEGQVVAVKQHKLASSQGDVEFCSEVEVLSCAQHRNVVMLIGFCIEDSRRLLVYEYICNGSLDSHLYGRQKETLEWPARQKIAVGAARGLRYLHEECRVGCIVHRDMRPNNILITHDNEPLVGDFGLARWQPDGEMGVDTRVIGTFGYLAPEYAQSGQITEKADVYSFGVVLVELVTGRKAIDITRPKGQQCLTEWARPLLEEYAIDELIDPRLGNRFVESEVICMLHAASLCIRRDPHLRPRMSQVLRILEGDMIMDGNYASTPGSEAGNRSGRFWADHYSGQLTNDGSDRFSERLSVETPRLALRERERSQRFELNHNKQY

SEQ ID NO: 46783 - DNA, 1592 bp, Arabidopsis thaliana
  misc_feature (1)..(1592): Ceres Seq. ID no. 12574698
  misc_feature: MA Experiment ID: 20000169 Result: Down-regulated in Transcription
  misc_feature: MA Experiment 20000169 PARAMETER Experiment Name: At_100uM_ABA_P Parameter: Age (day) Value: 14
  misc_feature: MA Experiment 20000169 PARAMETER Experiment Name: At_100uM_ABA_P Parameter: Organism Value: A. thaliana
  misc_feature: MA Experiment 20000169 PARAMETER Experiment Name: At_100uM_ABA_P Parameter: Plant Line Value: WS
  misc_feature: MA Experiment 20000169 PARAMETER Experiment Name: At_100uM_ABA_P Parameter: Timepoint (hr) Value: 6
  misc_feature: MA Experiment 20000169 PARAMETER Experiment Name: At_100uM_ABA_P Parameter: Tissue Value: Aerial
  misc_feature: MA Experiment 20000169 PARAMETER Experiment Name: At_100uM_ABA_P Parameter: Treatment Value: 100uM ABA vs. No Treatment
  misc_feature: MA Experiment ID: 20000185 Result: Down-regulated in Transcription
  misc_feature: MA Experiment 20000185 PARAMETER Experiment Name: At_Roots__P Parameter: Age (day) Value: 7 vs. 21
  misc_feature: MA Experiment 20000185 PARAMETER Experiment Name: At_Roots__P Parameter: Organism Value: A. thaliana
  misc_feature: MA Experiment 20000185 PARAMETER Experiment Name: At_Roots__P Parameter: Tissue Value: Roots vs. Whole Plant
  misc_feature: MA Experiment ID: 20000234 Result: Down-regulated in Transcription
  misc_feature: MA Experiment 20000234 PARAMETER Experiment Name: At_Siliques_P Parameter: Age (day) Value: 21
  misc_feature: MA Experiment 20000234 PARAMETER Experiment Name: At_Siliques_P Parameter: Organism Value: A. thaliana
  misc_feature: MA Experiment 20000234 PARAMETER Experiment Name: At_Siliques_P Parameter: Plant Line Value: WS
  misc_feature: MA Experiment 20000234 PARAMETER Experiment Name: At_Siliques_P Parameter: Tissue Value: Less Than 5mm Siliques vs. Whole Plant
  misc_feature: MA Experiment ID: 20000264 Result: Down-regulated in Transcription
  misc_feature: MA Experiment 20000264 PARAMETER Experiment Name: At_Open_Flower_P Parameter: Age (day) Value: 21
  misc_feature: MA Experiment 20000264 PARAMETER Experiment Name: At_Open_Flower_P Parameter: Plant Line Value: WS
  misc_feature: MA Experiment 20000264 PARAMETER Experiment Name: At_Open_Flower_P Parameter: Tissue Value: Open Flower vs. Whole Plant
  misc_feature: MA Experiment ID: 20000437 Result: Down-regulated in Transcription
  misc_feature: MA Experiment 20000437 PARAMETER Experiment Name: At_Drought_P Parameter: Age (day) Value: 8
  misc_feature: MA Experiment 20000437 PARAMETER Experiment Name: At_Drought_P Parameter: Organism Value: A. thaliana
  misc_feature: MA Experiment 20000437 PARAMETER Experiment Name: At_Drought_P Parameter: Plant Line Value: WS
  misc_feature: MA Experiment 20000437 PARAMETER Experiment Name: At_Drought_P Parameter: Timepoint (hr) Value: 24
  misc_feature: MA Experiment 20000437 PARAMETER Experiment Name: At_Drought_P Parameter: Tissue Value: Whole Plant
  misc_feature: MA Experiment 20000437 PARAMETER Experiment Name: At_Drought_P Parameter: Treatment Value: Drought vs. No Drought
  misc_feature: MA Experiment ID: 20000439 Result: Down-regulated in Transcription
  misc_feature: MA Experiment 20000439 PARAMETER Experiment Name: At_Roots__P Parameter: Age (day) Value: 14 vs. 21
  misc_feature: MA Experiment 20000439 PARAMETER Experiment Name: At_Roots__P Parameter: Organism Value: A. thaliana
  misc_feature: MA Experiment 20000439 PARAMETER Experiment Name: At_Roots__P Parameter: Tissue Value: Roots vs. Whole Plant
  misc_feature: MA Experiment ID: 20000455 Result: Up-regulated in Transcription
  misc_feature: MA Experiment 20000455 PARAMETER Experiment Name: At_100uM_ABA_P Parameter: Age (day) Value: 16
  misc_feature: MA Experiment 20000455 PARAMETER Experiment Name: At_100uM_ABA_P Parameter: Organism Value: A. thaliana
  misc_feature: MA Experiment 20000455 PARAMETER Experiment Name: At_100uM_ABA_P Parameter: Plant Line Value: WS
  misc_feature: MA Experiment 20000455 PARAMETER Experiment Name: At_100uM_ABA_P Parameter: Timepoint (hr) Value: 48
  misc_feature: MA Experiment 20000455 PARAMETER Experiment Name: At_100uM_ABA_P Parameter: Tissue Value: Aerial
  misc_feature: MA Experiment 20000455 PARAMETER Experiment Name: At_100uM_ABA_P Parameter: Treatment Value: 100uM ABA vs. No Treatment
  misc_feature: MA Experiment ID: 20000495 Result: Down-regulated in Transcription
  misc_feature: MA Experiment 20000495 PARAMETER Experiment Name: At_Guard_Cells_P Parameter: Harvest Date Value: 8/2/2002
  misc_feature: MA Experiment 20000495 PARAMETER Experiment Name: At_Guard_Cells_P Parameter: Organism Value: A. thaliana
  misc_feature: MA Experiment 20000495 PARAMETER Experiment Name: At_Guard_Cells_P Parameter: Tissue Value: Guard Cells vs. Leaves
  misc_feature: MA Experiment ID: 20000496 Result: Down-regulated in Transcription
  misc_feature: MA Experiment 20000496 PARAMETER Experiment Name: At_Guard_Cells_P Parameter: Harvest Date Value: 7/19/2002
  misc_feature: MA Experiment 20000496 PARAMETER Experiment Name: At_Guard_Cells_P Parameter: Organism Value: Canola
  misc_feature: MA Experiment 20000496 PARAMETER Experiment Name: At_Guard_Cells_P Parameter: Tissue Value: Guard Cells vs. Leaves
  misc_feature: MA Experiment ID: 20000794 Result: Down-regulated in Transcription
  misc_feature: MA Experiment 20000794 PARAMETER Experiment Name: At_Petals_P Parameter: Age (day) Value: 23-25 days
  misc_feature: MA Experiment 20000794 PARAMETER Experiment Name: At_Petals_P Parameter: Plant Line Value: WS
  misc_feature: MA Experiment 20000794 PARAMETER Experiment Name: At_Petals_P Parameter: Tissue Value: Petals vs. Whole plant
  misc_feature: MA Experiment ID: 20001450 Result: Down-regulated in Transcription
  misc_feature: MA Experiment 20001450 PARAMETER Experiment Name: At_Far-red-induction_P Parameter: Age (day) Value: 7
  misc_feature: MA Experiment 20001450 PARAMETER Experiment Name: At_Far-red-induction_P Parameter: Light Value: Far-red vs. White
  misc_feature: MA Experiment 20001450 PARAMETER Experiment Name: At_Far-red-induction_P Parameter: Organism Value: A. thaliana
  misc_feature: MA Experiment 20001450 PARAMETER Experiment Name: At_Far-red-induction_P Parameter: Plant Line Value: Columbia
  misc_feature: MA Experiment 20001450 PARAMETER Experiment Name: At_Far-red-induction_P Parameter: Timepoint (hr) Value: 8
  misc_feature: MA Experiment 20001450 PARAMETER Experiment Name: At_Far-red-induction_P Parameter: Tissue Value: Whole Plant
  misc_feature: MA Experiment ID: 20001451 Result: Down-regulated in Transcription
  misc_feature: MA Experiment 20001451 PARAMETER Experiment Name: At_Far-red-induction_P Parameter: Age (day) Value: 7
  misc_feature: MA Experiment 20001451 PARAMETER Experiment Name: At_Far-red-induction_P Parameter: Light Value: Far-red vs. White
  misc_feature: MA Experiment 20001451 PARAMETER Experiment Name: At_Far-red-induction_P Parameter: Organism Value: A. thaliana
  misc_feature: MA Experiment 20001451 PARAMETER Experiment Name: At_Far-red-induction_P Parameter: Plant Line Value: Columbia
  misc_feature: MA Experiment 20001451 PARAMETER Experiment Name: At_Far-red-induction_P Parameter: Timepoint (hr) Value: 24
  misc_feature: MA Experiment 20001451 PARAMETER Experiment Name: At_Far-red-induction_P Parameter: Tissue Value: Whole Plant
  misc_feature: MA Experiment ID: 20001458 Result: Up-regulated in Transcription
  misc_feature: MA Experiment 20001458 PARAMETER Experiment Name: At_50mM_NH4NO3_L-to-H_P Parameter: Age (day) Value: Undefined
  misc_feature: MA Experiment 20001458 PARAMETER Experiment Name: At_50mM_NH4NO3_L-to-H_P Parameter: Organism Value: Undefined
  misc_feature: MA Experiment 20001458 PARAMETER Experiment Name: At_50mM_NH4NO3_L-to-H_P Parameter: Plant Line Value: Undefined
  misc_feature: MA Experiment 20001458 PARAMETER Experiment Name: At_50mM_NH4NO3_L-to-H_P Parameter: Timepoint (hr) Value: 2
  misc_feature: MA Experiment 20001458 PARAMETER Experiment Name: At_50mM_NH4NO3_L-to-H_P Parameter: Tissue Value: Siliques
  misc_feature: MA Experiment 20001458 PARAMETER Experiment Name: At_50mM_NH4NO3_L-to-H_P Parameter: Treatment Value: 50mM NH4NO3 vs. 100mM Manitol
  misc_feature: MA Experiment ID: 20001556 Result: Up-regulated in Transcription
  misc_feature: MA Experiment 20001556 PARAMETER Experiment Name: At_Drought_Soil_Dry_P Parameter: Age (day) Value: 26
  misc_feature: MA Experiment 20001556 PARAMETER Experiment Name: At_Drought_Soil_Dry_P Parameter: Organism Value: A. thaliana
  misc_feature: MA Experiment 20001556 PARAMETER Experiment Name: At_Drought_Soil_Dry_P Parameter: Plant Line Value: WS
  misc_feature: MA Experiment 20001556 PARAMETER Experiment Name: At_Drought_Soil_Dry_P Parameter: Post Timepoint (hr) Value: None
  misc_feature: MA Experiment 20001556 PARAMETER Experiment Name: At_Drought_Soil_Dry_P Parameter: Post-Treatment Value: None
  misc_feature: MA Experiment 20001556 PARAMETER Experiment Name: At_Drought_Soil_Dry_P Parameter: Timepoint (day) Value: 12
  misc_feature: MA Experiment 20001556 PARAMETER Experiment Name: At_Drought_Soil_Dry_P Parameter: Treatment Value: Drought vs. No Drought
  misc_feature: MA Experiment ID: 20001557 Result: Up-regulated in Transcription
  misc_feature: MA Experiment 20001557 PARAMETER Experiment Name: At_Drought_Soil_Dry_P Parameter: Age (day) Value: 27
  misc_feature: MA Experiment 20001557 PARAMETER Experiment Name: At_Drought_Soil_Dry_P Parameter: Organism Value: A. thaliana
  misc_feature: MA Experiment 20001557 PARAMETER Experiment Name: At_Drought_Soil_Dry_P Parameter: Plant Line Value: WS
  misc_feature: MA Experiment 20001557 PARAMETER Experiment Name: At_Drought_Soil_Dry_P Parameter: Post Timepoint (hr) Value: 3
  misc_feature: MA Experiment 20001557 PARAMETER Experiment Name: At_Drought_Soil_Dry_P Parameter: Post-Treatment Value: Re-Water vs. No Drought
  misc_feature: MA Experiment 20001557 PARAMETER Experiment Name: At_Drought_Soil_Dry_P Parameter: Timepoint (day) Value: 13
  misc_feature: MA Experiment 20001557 PARAMETER Experiment Name: At_Drought_Soil_Dry_P Parameter: Treatment Value: Drought vs. No Drought
  misc_feature: MA Experiment ID: 20001757 Result: Up-regulated in Transcription
  misc_feature: MA Experiment 20001757 PARAMETER Experiment Name: At_50mM_NH4NO3_L-to-H_P Parameter: Timepoint (hr) Value: 6
  misc_feature: MA Experiment 20001757 PARAMETER Experiment Name: At_50mM_NH4NO3_L-to-H_P Parameter: Tissue Value: Leaf
  misc_feature: MA Experiment 20001757 PARAMETER Experiment Name: At_50mM_NH4NO3_L-to-H_P Parameter: Treatment Value: 50mM NH4NO3 vs 100mM Mannitol
gaaaagatagggcagaagcagagaagcaaaatcgtggaaggttacaaagcctttcaaaaacctcactctctcaactctcaaaccttatctccttccttctcttctcctctcctctccgtcgagcttactatctccacaaaatggcgtcgacggtaggagttccatcactataccaagttcctcaccttgaaatctccaaacccaattccaaaaagaggtctaattgtttatctttatctctcgataagcctttcttcactcccttatctcttgttcgtagaactcgtcgtatccattcctcttctcttcttgttccttctgctgttgctactcctaattctgttctcagtgaagaagctttcaaaagtcttggtctttctgaccatgacgaatatgaccttgacggcgacaacaacaacgttgaagctgatgatggtgaagaactcgctatctctaaacttagtttgcctcaacgtcttgaagagtctcttgagaaacgtggtatcactcatctcttccccattcagagagctgtgttggtacctgcactgcaaggaagagatattatagctcgtgcaaagacaggaactggaaagactttggcttttggtattcctatcattaaacgtctcactgaagaagctggagactacactgctttcaggaggtctggtcgtcttcctaagttccttgtccttgcgccgacccgagagctggctaagcaagtggagaaggagattaaggagtctgcaccttatttgagcactgtttgtgtgtatgggggagtttcttataccattcagcagagtgctttaactcgtggtgttgatgttgttgttggaactcctggaagaatcattgatttgattgaaggaaggagtcttaaattgggagaagttgagtatttggtacttgatgaagctgatcagatgcttgctgttgggtttgaggaggccgtggaatcgattcttgagaatcttccaactaagcgacaaagtatgcttttctcagcaactatgcctacttgggttaagaagttggcgaggaagtaccttgacaatcccttgaatattgatctggttggagaccaagatgagaagctcgcagagggtatcaaactttatgcaatcgcaaccacatcgacatcaaaacgcactattctaagcgaccttattacagtgtatgcgaagggtggcaagaccattgtttttacccaaactaaaagagatgcagacgaagtttctcttgcattgtcaaacagtatagctaccgaagcacttcatggagatatatctcagcatcaaagagagagaacactcaatgctttccgtcaagggaaattcaccgtattagttgccactgatgttgcatctcgtggacttgacatcccgaacgtagatctagttatccactatgaacttcctaatgacccagaaacttttgtgcaccgttctggtcgtactgggcgtgcagggaaagaaggctctgccattctcatgcacaccagcagccaaaagagaacagtgaggtctctggagcgtgacgtaggctgccattttgaattcgaattcaacaagaggatgatgttttaa

SEQ ID NO: 46784 - protein, 529 aa, Arabidopsis thaliana
  peptide (1)..(529): Ceres Seq. ID no. 12574699
  misc_feature (161)..(374): Pfam Name: DEAD/DEAH box helicase Pfam Description: DEAD/DEAH box helicase
  misc_feature (161)..(374): Pfam Name: DEAD/DEAH box helicase Pfam Description: DEAD/DEAH box helicase
  misc_feature (156)..(520): Homolog of NCBI NO: 2231116 NR Description: heat resistant RNA dependent ATPase [Thermus
  misc_feature (165)..(519): Homolog of NCBI NO: 34899624 NR Description: putative RNA helicase [Oryza sativa (japonica
  misc_feature (93)..(519): Homolog of NCBI NO: 15228722 NR Description: putative RNA helicase
  misc_feature (113)..(519): Homolog of NCBI NO: 22331253 NR Description: putative RNA helicase
  misc_feature (55)..(521): Homolog of NCBI NO: 34897326 NR Description: putative RNA helicase [Oryza sativa]
  misc_feature (156)..(520): Homolog of NCBI NO: 2231116 NR Description: heat resistant RNA dependent ATPase [Thermus
  misc_feature (93)..(519): Homolog of NCBI NO: 15228722 NR Description: putative RNA helicase
  misc_feature (55)..(521): Homolog of NCBI NO: 34897326 NR Description: putative RNA helicase [Oryza sativa]
  misc_feature (47)..(521): Homolog of NCBI NO: 11358808 NR Description: RNA helicase RH3 [imported] - Arabidopsis
  misc_feature (47)..(521): Homolog of NCBI NO: 19347898 NR Description: unknown protein [Arabidopsis thaliana]
  misc_feature (47)..(521): Homolog of NCBI NO: 30690260 NR Description: DEAD box RNA helicase (RH3) [Arabidopsis
  misc_feature (47)..(521): Homolog of NCBI NO: 22135801 NR Description: At5g26740 [Arabidopsis thaliana]
  misc_feature (47)..(521): Homolog of NCBI NO: 7488180 NR Description: probable RNA helicase F21E10.1 - Arabidopsis
  misc_feature (113)..(519): Homolog of NCBI NO: 22331253 NR Description: putative RNA helicase
  misc_feature (165)..(519): Homolog of NCBI NO: 34899624 NR Description: putative RNA helicase [Oryza sativa (japonica
  misc_feature (47)..(521): Homolog of NCBI NO: 7488180 NR Description: probable RNA helicase F21E10.1 - Arabidopsis
  misc_feature (47)..(521): Homolog of NCBI NO: 22135801 NR Description: At5g26740 [Arabidopsis thaliana]
  misc_feature (47)..(521): Homolog of NCBI NO: 30690260 NR Description: DEAD box RNA helicase (RH3) [Arabidopsis
  misc_feature (47)..(521): Homolog of NCBI NO: 19347898 NR Description: unknown protein [Arabidopsis thaliana]
  misc_feature (47)..(521): Homolog of NCBI NO: 11358808 NR Description: RNA helicase RH3 [imported] - Arabidopsis
KDRAEAEKQNRGRLQSLSKTSLSQLSNLISFLLFSSPLRRAYYLHKMASTVGVPSLYQVPHLEISKPNSKKRSNCLSLSLDKPFFTPLSLVRRTRRIHSSSLLVPSAVATPNSVLSEEAFKSLGLSDHDEYDLDGDNNNVEADDGEELAISKLSLPQRLEESLEKRGITHLFPIQRAVLVPALQGRDIIARAKTGTGKTLAFGIPIIKRLTEEAGDYTAFRRSGRLPKFLVLAPTRELAKQVEKEIKESAPYLSTVCVYGGVSYTIQQSALTRGVDVVVGTPGRIIDLIEGRSLKLGEVEYLVLDEADQMLAVGFEEAVESILENLPTKRQSMLFSATMPTWVKKLARKYLDNPLNIDLVGDQDEKLAEGIKLYAIATTSTSKRTILSDLITVYAKGGKTIVFTQTKRDADEVSLALSNSIATEALHGDISQHQRERTLNAFRQGKFTVLVATDVASRGLDIPNVDLVIHYELPNDPETFVHRSGRTGRAGKEGSAILMHTSSQKRTVRSLERDVGCHFEFEFNKRMMF

SEQ ID NO: 46785 - protein, 483 aa, Arabidopsis thaliana
  peptide (1)..(483): Ceres Seq. ID no. 12574700
  misc_feature (115)..(328): Pfam Name: DEAD/DEAH box helicase Pfam Description: DEAD/DEAH box helicase
  misc_feature (115)..(328): Pfam Name: DEAD/DEAH box helicase Pfam Description: DEAD/DEAH box helicase
  misc_feature (110)..(474): Homolog of NCBI NO: 2231116 NR Description: heat resistant RNA dependent ATPase [Thermus
  misc_feature (119)..(473): Homolog of NCBI NO: 34899624 NR Description: putative RNA helicase [Oryza sativa (japonica
  misc_feature (47)..(473): Homolog of NCBI NO: 15228722 NR Description: putative RNA helicase
  misc_feature (67)..(473): Homolog of NCBI NO: 22331253 NR Description: putative RNA helicase
  misc_feature (9)..(475): Homolog of NCBI NO: 34897326 NR Description: putative RNA helicase [Oryza sativa]
  misc_feature (110)..(474): Homolog of NCBI NO: 2231116 NR Description: heat resistant RNA dependent ATPase [Thermus
  misc_feature (47)..(473): Homolog of NCBI NO: 15228722 NR Description: putative RNA helicase
  misc_feature (9)..(475): Homolog of NCBI NO: 34897326 NR Description: putative RNA helicase [Oryza sativa]
  misc_feature (1)..(475): Homolog of NCBI NO: 11358808 NR Description: RNA helicase RH3 [imported] - Arabidopsis
  misc_feature (1)..(475): Homolog of NCBI NO: 19347898 NR Description: unknown protein [Arabidopsis thaliana]
  misc_feature (1)..(475): Homolog of NCBI NO: 30690260 NR Description: DEAD box RNA helicase (RH3) [Arabidopsis
  misc_feature (1)..(475): Homolog of NCBI NO: 22135801 NR Description: At5g26740 [Arabidopsis thaliana]
  misc_feature (1)..(475): Homolog of NCBI NO: 7488180 NR Description: probable RNA helicase F21E10.1 - Arabidopsis
  misc_feature (67)..(473): Homolog of NCBI NO: 22331253 NR Description: putative RNA helicase
  misc_feature (119)..(473): Homolog of NCBI NO: 34899624 NR Description: putative RNA helicase [Oryza sativa (japonica
  misc_feature (1)..(475): Homolog of NCBI NO: 7488180 NR Description: probable RNA helicase F21E10.1 - Arabidopsis
  misc_feature (1)..(475): Homolog of NCBI NO: 22135801 NR Description: At5g26740 [Arabidopsis thaliana]
  misc_feature (1)..(475): Homolog of NCBI NO: 30690260 NR Description: DEAD box RNA helicase (RH3) [Arabidopsis
  misc_feature (1)..(475): Homolog of NCBI NO: 19347898 NR Description: unknown protein [Arabidopsis thaliana]
  misc_feature (1)..(475): Homolog of NCBI NO: 11358808 NR Description: RNA helicase RH3 [imported] - Arabidopsis
MASTVGVPSLYQVPHLEISKPNSKKRSNCLSLSLDKPFFTPLSLVRRTRRIHSSSLLVPSAVATPNSVLSEEAFKSLGLSDHDEYDLDGDNNNVEADDGEELAISKLSLPQRLEESLEKRGITHLFPIQRAVLVPALQGRDIIARAKTGTGKTLAFGIPIIKRLTEEAGDYTAFRRSGRLPKFLVLAPTRELAKQVEKEIKESAPYLSTVCVYGGVSYTIQQSALTRGVDVVVGTPGRIIDLIEGRSLKLGEVEYLVLDEADQMLAVGFEEAVESILENLPTKRQSMLFSATMPTWVKKLARKYLDNPLNIDLVGDQDEKLAEGIKLYAIATTSTSKRTILSDLITVYAKGGKTIVFTQTKRDADEVSLALSNSIATEALHGDISQHQRERTLNAFRQGKFTVLVATDVASRGLDIPNVDLVIHYELPNDPETFVHRSGRTGRAGKEGSAILMHTSSQKRTVRSLERDVGCHFEFEFNKRMMF

SEQ ID NO: 46786 - DNA, 2440 bp, Arabidopsis thaliana
  misc_feature (1)..(2440): Ceres Seq. ID no. 12574237
  misc_feature: MA Experiment ID: 20000171 Result: Up-regulated in Transcription
  misc_feature: MA Experiment 20000171 PARAMETER Experiment Name: At_42deg_Heat_P Parameter: Age (day) Value: 14
  misc_feature: MA Experiment 20000171 PARAMETER Experiment Name: At_42deg_Heat_P Parameter: Organism Value: A. thaliana
  misc_feature: MA Experiment 20000171 PARAMETER Experiment Name: At_42deg_Heat_P Parameter: Plant Line Value: WS
  misc_feature: MA Experiment 20000171 PARAMETER Experiment Name: At_42deg_Heat_P Parameter: Temperature (deg C) Value: 42 vs. 22
  misc_feature: MA Experiment 20000171 PARAMETER Experiment Name: At_42deg_Heat_P Parameter: Timepoint (hr) Value: 1
  misc_feature: MA Experiment 20000171 PARAMETER Experiment Name: At_42deg_Heat_P Parameter: Tissue Value: Aerial
  misc_feature: MA Experiment ID: 20000173 Result: Up-regulated in Transcription
  misc_feature: MA Experiment 20000173 PARAMETER Experiment Name: At_42deg_Heat_P Parameter: Age (day) Value: 14
  misc_feature: MA Experiment 20000173 PARAMETER Experiment Name: At_42deg_Heat_P Parameter: Organism Value: A. thaliana
  misc_feature: MA Experiment 20000173 PARAMETER Experiment Name: At_42deg_Heat_P Parameter: Plant Line Value: WS
  misc_feature: MA Experiment 20000173 PARAMETER Experiment Name: At_42deg_Heat_P Parameter: Temperature (deg C) Value: 42 vs. 22
  misc_feature: MA Experiment 20000173 PARAMETER Experiment Name: At_42deg_Heat_P Parameter: Timepoint (hr) Value: 6
  misc_feature: MA Experiment 20000173 PARAMETER Experiment Name: At_42deg_Heat_P Parameter: Tissue Value: Aerial
  misc_feature: MA Experiment ID: 20000182 Result: Up-regulated in Transcription
  misc_feature: MA Experiment 20000182 PARAMETER Experiment Name: At_2mM_SA_P Parameter: Age (day) Value: 14
  misc_feature: MA Experiment 20000182 PARAMETER Experiment Name: At_2mM_SA_P Parameter: Organism Value: A. thaliana
  misc_feature: MA Experiment 20000182 PARAMETER Experiment Name: At_2mM_SA_P Parameter: Plant Line Value: WS
  misc_feature: MA Experiment 20000182 PARAMETER Experiment Name: At_2mM_SA_P Parameter: Timepoint (hr) Value: 6
  misc_feature: MA Experiment 20000182 PARAMETER Experiment Name: At_2mM_SA_P Parameter: Tissue Value: Aerial
  misc_feature: MA Experiment 20000182 PARAMETER Experiment Name: At_2mM_SA_P Parameter: Treatment Value: 2mM SA vs. No Treatment
  misc_feature: MA Experiment ID: 20000437 Result: Up-regulated in Transcription
  misc_feature: MA Experiment 20000437 PARAMETER Experiment Name: At_Drought_P Parameter: Age (day) Value: 8
  misc_feature: MA Experiment 20000437 PARAMETER Experiment Name: At_Drought_P Parameter: Organism Value: A. thaliana
  misc_feature: MA Experiment 20000437 PARAMETER Experiment Name: At_Drought_P Parameter: Plant Line Value: WS
  misc_feature: MA Experiment 20000437 PARAMETER Experiment Name: At_Drought_P Parameter: Timepoint (hr) Value: 24
  misc_feature: MA Experiment 20000437 PARAMETER Experiment Name: At_Drought_P Parameter: Tissue Value: Whole Plant
  misc_feature: MA Experiment 20000437 PARAMETER Experiment Name: At_Drought_P Parameter: Treatment Value: Drought vs. No Drought
  misc_feature: MA Experiment ID: 20000443 Result: Up-regulated in Transcription
  misc_feature: MA Experiment 20000443 PARAMETER Experiment Name: At_1uM_BR-BRZ__P Parameter: Tissue Value: Shoot Apices
  misc_feature: MA Experiment 20000443 PARAMETER Experiment Name: At_1uM_BR-BRZ__P Parameter: Treatment Value: 1uM BRZ vs. No Treatment
  misc_feature: MA Experiment ID: 20000709 Result: Up-regulated in Transcription
  misc_feature: MA Experiment 20000709 PARAMETER Experiment Name: At_15mM_NH4NO3_L-to-H_P Parameter: Age (hr) Value: 14
  misc_feature: MA Experiment 20000709 PARAMETER Experiment Name: At_15mM_NH4NO3_L-to-H_P Parameter: Organism Value: A. thaliana
  misc_feature: MA Experiment 20000709 PARAMETER Experiment Name: At_15mM_NH4NO3_L-to-H_P Parameter: Plant Line Value: WS
  misc_feature: MA Experiment 20000709 PARAMETER Experiment Name: At_15mM_NH4NO3_L-to-H_P Parameter: Timepoint (hr) Value: 4
  misc_feature: MA Experiment 20000709 PARAMETER Experiment Name: At_15mM_NH4NO3_L-to-H_P Parameter: Tissue Value: Aerial
  misc_feature: MA Experiment 20000709 PARAMETER Experiment Name: At_15mM_NH4NO3_L-to-H_P Parameter: Treatment Value: 15mM NH4NO3 vs. 30mM Mannitol
  misc_feature: MA Experiment ID: 20001248 Result: Down-regulated in Transcription
  misc_feature: MA Experiment 20001248 PARAMETER Experiment Name: At_Far-red-induction_P Parameter: Age (day) Value: 7
  misc_feature: MA Experiment 20001248 PARAMETER Experiment Name: At_Far-red-induction_P Parameter: Light Value: Far-red vs. White
  misc_feature: MA Experiment 20001248 PARAMETER Experiment Name: At_Far-red-induction_P Parameter: Organism Value: A. thaliana
  misc_feature: MA Experiment 20001248 PARAMETER Experiment Name: At_Far-red-induction_P Parameter: Plant Line Value: Columbia
  misc_feature: MA Experiment 20001248 PARAMETER Experiment Name: At_Far-red-induction_P Parameter: Timepoint (hr) Value: 4
  misc_feature: MA Experiment 20001248 PARAMETER Experiment Name: At_Far-red-induction_P Parameter: Tissue Value: Whole Plant
  misc_feature: MA Experiment ID: 20001450 Result: Down-regulated in Transcription
  misc_feature: MA Experiment 20001450 PARAMETER Experiment Name: At_Far-red-induction_P Parameter: Age (day) Value: 7
  misc_feature: MA Experiment 20001450 PARAMETER Experiment Name: At_Far-red-induction_P Parameter: Light Value: Far-red vs. White
  misc_feature: MA Experiment 20001450 PARAMETER Experiment Name: At_Far-red-induction_P Parameter: Organism Value: A. thaliana
  misc_feature: MA Experiment 20001450 PARAMETER Experiment Name: At_Far-red-induction_P Parameter: Plant Line Value: Columbia
  misc_feature: MA Experiment 20001450 PARAMETER Experiment Name: At_Far-red-induction_P Parameter: Timepoint (hr) Value: 8
  misc_feature: MA Experiment 20001450 PARAMETER Experiment Name: At_Far-red-induction_P Parameter: Tissue Value: Whole Plant
  misc_feature: MA Experiment ID: 20001451 Result: Down-regulated in Transcription
  misc_feature: MA Experiment 20001451 PARAMETER Experiment Name: At_Far-red-induction_P Parameter: Age (day) Value: 7
  misc_feature: MA Experiment 20001451 PARAMETER Experiment Name: At_Far-red-induction_P Parameter: Light Value: Far-red vs. White
  misc_feature: MA Experiment 20001451 PARAMETER Experiment Name: At_Far-red-induction_P Parameter: Organism Value: A. thaliana
  misc_feature: MA Experiment 20001451 PARAMETER Experiment Name: At_Far-red-induction_P Parameter: Plant Line Value: Columbia
  misc_feature: MA Experiment 20001451 PARAMETER Experiment Name: At_Far-red-induction_P Parameter: Timepoint (hr) Value: 24
  misc_feature: MA Experiment 20001451 PARAMETER Experiment Name: At_Far-red-induction_P Parameter: Tissue Value: Whole Plant
  misc_feature: MA Experiment ID: 20001555 Result: Up-regulated in Transcription
  misc_feature: MA Experiment 20001555 PARAMETER Experiment Name: At_Drought_Soil_Dry_P Parameter: Age (day) Value: 24
  misc_feature: MA Experiment 20001555 PARAMETER Experiment Name: At_Drought_Soil_Dry_P Parameter: Organism Value: A. thaliana
  misc_feature: MA Experiment 20001555 PARAMETER Experiment Name: At_Drought_Soil_Dry_P Parameter: Plant Line Value: WS
  misc_feature: MA Experiment 20001555 PARAMETER Experiment Name: At_Drought_Soil_Dry_P Parameter: Post Timepoint (hr) Value: None
  misc_feature: MA Experiment 20001555 PARAMETER Experiment Name: At_Drought_Soil_Dry_P Parameter: Post-Treatment Value: None
  misc_feature: MA Experiment 20001555 PARAMETER Experiment Name: At_Drought_Soil_Dry_P Parameter: Timepoint (day) Value: 10
  misc_feature: MA Experiment 20001555 PARAMETER Experiment Name: At_Drought_Soil_Dry_P Parameter: Treatment Value: Drought vs. No Drought
  misc_feature: MA Experiment ID: 20001768 Result: Up-regulated in Transcription
  misc_feature: MA Experiment 20001768 PARAMETER Experiment Name: At_Far-red-enriched-adult_P Parameter: Age (day) Value: 28
  misc_feature: MA Experiment 20001768 PARAMETER Experiment Name: At_Far-red-enriched-adult_P Parameter: Light Value: Far-red enriched vs. White
  misc_feature: MA Experiment 20001768 PARAMETER Experiment Name: At_Far-red-enriched-adult_P Parameter: Organism Value: A. thaliana
  misc_feature: MA Experiment 20001768 PARAMETER Experiment Name: At_Far-red-enriched-adult_P Parameter: Plant Line Value: Columbia
  misc_feature: MA Experiment 20001768 PARAMETER Experiment Name: At_Far-red-enriched-adult_P Parameter: Timepoint (hr) Value: 1
  misc_feature: MA Experiment 20001768 PARAMETER Experiment Name: At_Far-red-enriched-adult_P Parameter: Tissue Value: Aerial
  misc_feature: MA Experiment ID: 20001906 Result: Up-regulated in Transcription
  misc_feature: MA Experiment 20001906 PARAMETER Experiment Name: At_Drought_Reproduction_P Parameter: Age (day) Value: 35
  misc_feature: MA Experiment 20001906 PARAMETER Experiment Name: At_Drought_Reproduction_P Parameter: Organism Value: A. thaliana
  misc_feature: MA Experiment 20001906 PARAMETER Experiment Name: At_Drought_Reproduction_P Parameter: Plant Line Value: WS
  misc_feature: MA Experiment 20001906 PARAMETER Experiment Name: At_Drought_Reproduction_P Parameter: Timepoint (day) Value: 5
  misc_feature: MA Experiment 20001906 PARAMETER Experiment Name: At_Drought_Reproduction_P Parameter: Tissue Value: Siliques
  misc_feature: MA Experiment 20001906 PARAMETER Experiment Name: At_Drought_Reproduction_P Parameter: Treatment Value: Drought vs. No Drought
  misc_feature: MA Experiment ID: 20001911 Result: Up-regulated in Transcription
  misc_feature: MA Experiment 20001911 PARAMETER Experiment Name: At_Drought_Reproduction_P Parameter: Age (day) Value: 40
  misc_feature: MA Experiment 20001911 PARAMETER Experiment Name: At_Drought_Reproduction_P Parameter: Organism Value: A. thaliana
  misc_feature: MA Experiment 20001911 PARAMETER Experiment Name: At_Drought_Reproduction_P Parameter: Plant Line Value: WS
  misc_feature: MA Experiment 20001911 PARAMETER Experiment Name: At_Drought_Reproduction_P Parameter: Timepoint (day) Value: 10
  misc_feature: MA Experiment 20001911 PARAMETER Experiment Name: At_Drought_Reproduction_P Parameter: Tissue Value: Flowers
  misc_feature: MA Experiment 20001911 PARAMETER Experiment Name: At_Drought_Reproduction_P Parameter: Treatment Value: Drought vs. No Drought
ataaatcaacaaaacaatcacaaatctctcgaaacgctctcgaagttccaaattttctcttagcattctctttcgtttctcgtttgcgttgaatcaaagttcgttgcgatggcggatgttcagatggctgatgcagagacttttgctttccaagctgagattaaccagcttcttagcttgatcatcaacacgttctacagcaacaaagaaatcttcctccgtgagctcatcagtaactcttctgatgctcttgacaagatccgatttgagagcttaacggataagagcaagctcgatggacagcctgaactcttcattagattggttcctgacaagtctaataagacgctctcaattattgacagtggtattggcatgaccaaagcagatttggtgaacaacttgggaaccattgcgaggtctggaacaaaagagtttatggaggcgcttcaagctggagctgatgtaagcatgataggacaatttggtgttggtttctactctgcttatcttgttgcagagaaggttgttgtcactacaaagcacaatgatgatgaacaatacgtttgggagtctcaagctggtggttccttcactgtcactagggatgtggatggggaaccacttggtagaggaactaagatcaccctcttccttaaggacgatcagcttgaatacttggaggagaggagactcaaagacttggtgaagaagcactctgagttcatcagttaccctatctacctttggaccgagaaaaccaccgagaaggagatcagtgacgatgaggatgaagatgaaccaaagaaagaaaacgaaggtgaggttgaagaagttgatgaggagaaggagaaagatggtaaaaagaagaagaaaatcaaggaagtctctcacgagtgggaactcatcaacaagcagaaaccgatctggttgaggaagccagaagagatcactaaggaagagtatgctgctttctacaagagcttgaccaatgactgggaagatcacttagccgtgaaacacttctcagtggagggtcagctagaattcaaggccattctctttgtaccaaagagagctccgtttgatctctttgacacgaggaagaagttgaacaacatcaagctttatgtcaggagggtgttcattatggacaactgtgaagagctaatcccagagtacctcagctttgtgaaaggtgttgttgactctgatgacttgccactcaacatctctcgtgagacgcttcaacagaacaagatccttaaggtgatcaggaagaatctagtgaagaagtgcattgagatgttcaacgagattgctgagaacaaagaggactacaccaaattctatgaggctttctccaagaatctcaaattgggtatccatgaagacagtcagaacaggggaaagattgctgatcttctacggtaccactccacaaagagtggtgatgaaatgacgagcttcaaagattacgtcacaaggatgaaggaaggtcaaaaggacattttctacatcactggtgaaagcaaaaaggcggtggagaattctcccttcttggagaggctgaagaagagaggatacgaggtactttacatggtggatgcgattgacgaatacgctgttggacaattgaaggagtatgacggtaagaaacttgtttctgcgactaaagaaggcctcaaacttgaagatgagaccgaagaagagaagaaaaagagggaagagaagaagaagtccttcgagaatctgtgcaagacgattaaggaaattctcggggacaaggttgagaaggttgtggtctcagacaggattgtggactctccctgctgtctagtaactggtgaatatggatggactgcaaatatggagaggattatgaaggcacaggcgttgagagatagcagcatgagtggttacatgtcgagcaagaaaacaatggagatcaaccccgacaacggtataatggaggagctcaggaagagagctgaagcagacaagaatgacaagtctgttaaagatcttgtcatgttgctgtatgagacagctttgttgacgtctggattcagtcttgatgaaccgaacacttttgctgctaggattcacaggatgttgaagttgggtctgagtattgatgaggatgagaacgttgaggaagatggtgatatgcctgagttggaggaggacgctgctgaagagagcaagatggaggaagtcgactaagagatgaagaaattgctcttatggttctgaaaacttctaatatgtcgagttgttctgagttttaagattttccaaaatgtctttgtctttttttttatatctttagagttacttgaacattgtgactacttctagggttgggtttgtgtcaggtctgttatatcgtgtggtgggtctgtctaatactgattcaagtttttgttattcagctaag

SEQ ID NO: 46787 - protein, 705 aa, Arabidopsis thaliana
  peptide (1)..(705): Ceres Seq. ID no. 12574238
  misc_feature (9)..(703): Homolog of NCBI NO: 6755863 NR Description: tumor rejection antigen gp96; tumor rejection
  misc_feature (9)..(705): Homolog of NCBI NO: 119359 NR Description: Endoplasmin precursor (Heat shock 108 kDa
  misc_feature (9)..(705): Homolog of NCBI NO: 7441885 NR Description: protein kinase ppk98 (EC 2.7.1.-) precursor,
  misc_feature (9)..(705): Homolog of NCBI NO: 4507677 NR Description: tumor rejection antigen (gp96) 1
  misc_feature (9)..(705): Homolog of NCBI NO: 14714615 NR Description: tumor rejection antigen gp96 [Mus musculus]
  misc_feature (9)..(705): Homolog of NCBI NO: 27807263 NR Description: tumor rejection antigen (gp96) 1 [Bos taurus]
  misc_feature (9)..(705): Homolog of NCBI NO: 63509 NR Description: hsp 108 [Gallus gallus]
  misc_feature (399)..(703): Homolog of NCBI NO: 23477636 NR Description: Grp94 [Xerophyta viscosa]
  misc_feature (7)..(465): Homolog of NCBI NO: 23477636 NR Description: Grp94 [Xerophyta viscosa]
  misc_feature (8)..(705): Homolog of NCBI NO: 29145077 NR Description: heat shock protein, 1 [Mus musculus]
MADVQMADAETFAFQAEINQLLSLIINTFYSNKEIFLRELISNSSDALDKIRFESLTDKSKLDGQPELFIRLVPDKSNKTLSIIDSGIGMTKADLVNNLGTIARSGTKEFMEALQAGADVSMIGQFGVGFYSAYLVAEKVVVTTKHNDDEQYVWESQAGGSFTVTRDVDGEPLGRGTKITLFLKDDQLEYLEERRLKDLVKKHSEFISYPIYLWTEKTTEKEISDDEDEDEPKKENEGEVEEVDEEKEKDGKKKKKIKEVSHEWELINKQKPIWLRKPEEITKEEYAAFYKSLTNDWEDHLAVKHFSVEGQLEFKAILFVPKRAPFDLFDTRKKLNNIKLYVRRVFIMDNCEELIPEYLSFVKGVVDSDDLPLNISRETLQQNKILKVIRKNLVKKCIEMFNEIAENKEDYTKFYEAFSKNLKLGIHEDSQNRGKIADLLRYHSTKSGDEMTSFKDYVTRMKEGQKDIFYITGESKKAVENSPFLERLKKRGYEVLYMVDAIDEYAVGQLKEYDGKKLVSATKEGLKLEDETEEEKKKREEKKKSFENLCKTIKEILGDKVEKVVVSDRIVDSPCCLVTGEYGWTANMERIMKAQALRDSSMSGYMSSKKTMEINPDNGIMEELRKRAEADKNDKSVKDLVMLLYETALLTSGFSLDEPNTFAARIHRMLKLGLSIDEDENVEEDGDMPELEEDAAEESKMEEVD

SEQ ID NO: 46788 - protein, 700 aa, Arabidopsis thaliana
  peptide (1)..(700): Ceres Seq. ID no. 12574239
  misc_feature (4)..(698): Homolog of NCBI NO: 6755863 NR Description: tumor rejection antigen gp96; tumor rejection
  misc_feature (4)..(700): Homolog of NCBI NO: 119359 NR Description: Endoplasmin precursor (Heat shock 108 kDa
  misc_feature (4)..(700): Homolog of NCBI NO: 7441885 NR Description: protein kinase ppk98 (EC 2.7.1.-) precursor,
  misc_feature (4)..(700): Homolog of NCBI NO: 4507677 NR Description: tumor rejection antigen (gp96) 1
  misc_feature (4)..(700): Homolog of NCBI NO: 14714615 NR Description: tumor rejection antigen gp96 [Mus musculus]
  misc_feature (4)..(700): Homolog of NCBI NO: 27807263 NR Description: tumor rejection antigen (gp96) 1 [Bos taurus]
  misc_feature (4)..(700): Homolog of NCBI NO: 63509 NR Description: hsp 108 [Gallus gallus]
  misc_feature (394)..(698): Homolog of NCBI NO: 23477636 NR Description: Grp94 [Xerophyta viscosa]
  misc_feature (2)..(460): Homolog of NCBI NO: 23477636 NR Description: Grp94 [Xerophyta viscosa]
  misc_feature (3)..(700): Homolog of NCBI NO: 29145077 NR Description: heat shock protein, 1 [Mus musculus]
MADAETFAFQAEINQLLSLIINTFYSNKEIFLRELISNSSDALDKIRFESLTDKSKLDGQPELFIRLVPDKSNKTLSIIDSGIGMTKADLVNNLGTIARSGTKEFMEALQAGADVSMIGQFGVGFYSAYLVAEKVVVTTKHNDDEQYVWESQAGGSFTVTRDVDGEPLGRGTKITLFLKDDQLEYLEERRLKDLVKKHSEFISYPIYLWTEKTTEKEISDDEDEDEPKKENEGEVEEVDEEKEKDGKKKKKIKEVSHEWELINKQKPIWLRKPEEITKEEYAAFYKSLTNDWEDHLAVKHFSVEGQLEFKAILFVPKRAPFDLFDTRKKLNNIKLYVRRVFIMDNCEELIPEYLSFVKGVVDSDDLPLNISRETLQQNKILKVIRKNLVKKCIEMFNEIAENKEDYTKFYEAFSKNLKLGIHEDSQNRGKIADLLRYHSTKSGDEMTSFKDYVTRMKEGQKDIFYITGESKKAVENSPFLERLKKRGYEVLYMVDAIDEYAVGQLKEYDGKKLVSATKEGLKLEDETEEEKKKREEKKKSFENLCKTIKEILGDKVEKVVVSDRIVDSPCCLVTGEYGWTANMERIMKAQALRDSSMSGYMSSKKTMEINPDNGIMEELRKRAEADKNDKSVKDLVMLLYETALLTSGFSLDEPNTFAARIHRMLKLGLSIDEDENVEEDGDMPELEEDAAEESKMEEVD

SEQ ID NO: 46789 - protein, 616 aa, Arabidopsis thaliana
  peptide (1)..(616): Ceres Seq. ID no. 12574240
  misc_feature (1)..(614): Homolog of NCBI NO: 6755863 NR Description: tumor rejection antigen gp96; tumor rejection
  misc_feature (1)..(616): Homolog of NCBI NO: 119359 NR Description: Endoplasmin precursor (Heat shock 108 kDa
  misc_feature (1)..(616): Homolog of NCBI NO: 7441885 NR Description: protein kinase ppk98 (EC 2.7.1.-) precursor,
  misc_feature (1)..(616): Homolog of NCBI NO: 4507677 NR Description: tumor rejection antigen (gp96) 1
  misc_feature (1)..(616): Homolog of NCBI NO: 14714615 NR Description: tumor rejection antigen gp96 [Mus musculus]
  misc_feature (1)..(616): Homolog of NCBI NO: 27807263 NR Description: tumor rejection antigen (gp96) 1 [Bos taurus]
  misc_feature (1)..(616): Homolog of NCBI NO: 63509 NR Description: hsp 108 [Gallus gallus]
  misc_feature (310)..(614): Homolog of NCBI NO: 23477636 NR Description: Grp94 [Xerophyta viscosa]
  misc_feature (1)..(376): Homolog of NCBI NO: 23477636 NR Description: Grp94 [Xerophyta viscosa]
  misc_feature (1)..(616): Homolog of NCBI NO: 29145077 NR Description: heat shock protein, 1 [Mus musculus]
MTKADLVNNLGTIARSGTKEFMEALQAGADVSMIGQFGVGFYSAYLVAEKVVVTTKHNDDEQYVWESQAGGSFTVTRDVDGEPLGRGTKITLFLKDDQLEYLEERRLKDLVKKHSEFISYPIYLWTEKTTEKEISDDEDEDEPKKENEGEVEEVDEEKEKDGKKKKKIKEVSHEWELINKQKPIWLRKPEEITKEEYAAFYKSLTNDWEDHLAVKHFSVEGQLEFKAILFVPKRAPFDLFDTRKKLNNIKLYVRRVFIMDNCEELIPEYLSFVKGVVDSDDLPLNISRETLQQNKILKVIRKNLVKKCIEMFNEIAENKEDYTKFYEAFSKNLKLGIHEDSQNRGKIADLLRYHSTKSGDEMTSFKDYVTRMKEGQKDIFYITGESKKAVENSPFLERLKKRGYEVLYMVDAIDEYAVGQLKEYDGKKLVSATKEGLKLEDETEEEKKKREEKKKSFENLCKTIKEILGDKVEKVVVSDRIVDSPCCLVTGEYGWTANMERIMKAQALRDSSMSGYMSSKKTMEINPDNGIMEELRKRAEADKNDKSVKDLVMLLYETALLTSGFSLDEPNTFAARIHRMLKLGLSIDEDENVEEDGDMPELEEDAAEESKMEEVD

SEQ ID NO: 46790 - DNA, 2730 bp, Arabidopsis thaliana
  misc_feature (1)..(2730): Ceres Seq. ID no. 13646956
  misc_feature: MA Experiment ID: 20001557 Result: Up-regulated in Transcription
  misc_feature: MA Experiment 20001557 PARAMETER Experiment Name: At_Drought_Soil_Dry_P Parameter: Age (day) Value: 27
  misc_feature: MA Experiment 20001557 PARAMETER Experiment Name: At_Drought_Soil_Dry_P Parameter: Organism Value: A. thaliana
  misc_feature: MA Experiment 20001557 PARAMETER Experiment Name: At_Drought_Soil_Dry_P Parameter: Plant Line Value: WS
  misc_feature: MA Experiment 20001557 PARAMETER Experiment Name: At_Drought_Soil_Dry_P Parameter: Post Timepoint (hr) Value: 3
  misc_feature: MA Experiment 20001557 PARAMETER Experiment Name: At_Drought_Soil_Dry_P Parameter: Post-Treatment Value: Re-Water vs. No Drought
  misc_feature: MA Experiment 20001557 PARAMETER Experiment Name: At_Drought_Soil_Dry_P Parameter: Timepoint (day) Value: 13
  misc_feature: MA Experiment 20001557 PARAMETER Experiment Name: At_Drought_Soil_Dry_P Parameter: Treatment Value: Drought vs. No Drought
gagattcaaaaccaaaaagaaaaaaaaaaatcaaaacagaagcgagcgaagaggacggagggagaggatcttcttccctctttctcttatctactttctcttctaaatctctaatcttttgaaaccctaaatcaaagttttgtttttttttatcaactggggaagaagaaaggtgtaacctttatataaccatggattccggtgacgcgacatctttgcttttgacgaaaattcgaagcttggagccagattatgctcctaagattattgggtatttgcttttacatgattttggtgatagagacttgatgcatctgggctcgtggacctgaatcgattttgcagtcgactatttcgaaagtgaagagtctcttggggattttctccaacaactcgccttcttctactccgacgtctccttctccgttgaatcctatctgtcgtcctcctcttaacggaagaggaagctctcactccaatgggtttatggatttccgtagaaactctccgtcttctccttcttctacctctccttggtcattcaacaactgtatcaacggtaataatgggaataacccccacatttcccctaaacacactccgatctcgaaaccctttagctctcaccaaagcaatggactttctgctacacattctggtagtgctgacgctgctggtggtgctgatttacttgatgatcagcagcttaatgattgcctttcgtttctcgacgattcttgttctaaaaccgaggatcttgtggatcctagcattcctttggattactctgtagatggtgatggtgaaacccatctgcacaggaggagtttctcttgtgatgcgtcttttgtgtccggagatgatggatttggtggtggatgcaaaccatgtgtgtattttagtagaggtttgtgcaagaatggagaaagctgcaagtttatccacggtggatatccggataatatggatggtaatggcattgtcgctgactcgcctaggaaaatggagaactttgttaggcagcacgaggagatgatgaggctgaaattggcttaccagcagcagaggttggcttctcaaatcctgggtcgggctccccagttgccatacgagaaaagaatggactttctcttgcagcagcatgctcaaagagatggtggactgccttttggtgatgaaagattttggagcagcagcccaggacggcttgagaggatggagctggcaatgcatttaggtgatcagtcaaattcggcatctagacagatttacttgacattcccagctgacagcacgtttaaggatgaggatgttgctacatatttcagcctctttggaacagtccaagatgtgcggatcccataccaacagaagcgtatgtttggctttgtttcatttgctcatcccgagacagtgaaagttgtactagctagagggaatccccatttcatttgcgactcacgggttcttgtcaaaccttacaaagaaaaaggcaaagtcttggacaagaagcaacagcaactgctacaacagcagattgagcgaggaaattactccccgtgctccagtccatctgggattgatcctagagaacagtctgatttccaccttggttcaaagatgttgtatgagagacgtgagatgatgagaaggaaaatagagcaggctgatctcctgagggctattgaactcgaaagaagacgtttcattaatttacagcttcctgagttcaagaatagtgtaacgctgaatcatcaccgtagcttttctgtggggtctcctggttatttttcatctgccggcaatcaaagccctgattttcaatctgaacttaacggtgcagatgctttaaaagtaactgatgataccttggagctgcatccttacccagtagtcaacccaatgagtgttaacaatagctactcaaacggtgcaaaagaagagactaacaagagtgaattgcttgatcccgattctggaagcaccattgagcttgttcttcctagtaacctcttcccttctgcatcatctaccgatgatcacaaaaccgatgattctgctgaaactaatgcaaaagttggagtctcctctactaatgaaaatgaccatgaaccaccagtcactaccaataatctgatgcagtaggctatttcacctcataaatgccaagggttttttcttatggataagatgaggctaccgaagtgtatgtaataaagacaaagtaaacaagcatacacaaggaagtaggatgatgtatatgtatagctaagttatatatatctatatatatatggagaacagaaagaacgtaggagatatgataatatggtatgaagatcgcaagtttcctcaggtgatactatactactaacaaacggatgcgtaagacatactttaaagacgatctattttgaaactttcatttcttctgcttctatctgtttgcttctaatatcggttgctcatgtgattgttccggtttatgtgggtaacaaaccacaagagtctctgatgtaacaaaagaatagagggttctgtaactttatcatattaagccgtttcttaagtaaaaaaaaaaaaaaaaaaaaaaaagttctcgtaattgggttcttgatcggaggtggcggatctacacacacattcttcctgttttttgctttttatttgttttctcattttgaactgtttaaaatttctgttatatgaatgaatgttttccctgcggtt

SEQ ID NO: 46791 - protein, 552 aa, Arabidopsis thaliana
  peptide (1)..(552): Ceres Seq. ID no. 13646957
  misc_feature (273)..(329): Pfam Name: RNA recognition motif. (a.k.a. RRM, RBD, or RNP domain) Pfam Description: RNA recognition motif. (a.k.a. RRM, RBD, or RNP
  misc_feature (194)..(438): Homolog of NCBI NO: 21594547 NR Description: unknown [Arabidopsis thaliana]
  misc_feature (194)..(438): Homolog of NCBI NO: 15231090 NR Description: RNA recognition motif (RRM)-containing protein
  misc_feature (252)..(401): Homolog of NCBI NO: 30695000 NR Description: expressed protein [Arabidopsis thaliana]
  misc_feature (252)..(406): Homolog of NCBI NO: 15217946 NR Description: expressed protein [Arabidopsis thaliana]
  misc_feature (1)..(536): Homolog of NCBI NO: 33146675 NR Description: putative DAZ associated protein 1
  misc_feature (1)..(538): Homolog of NCBI NO: 11994270 NR Description: emb|CAB41315.1~gene_id:MSA6.14~similar to unknown
  misc_feature (1)..(552): Homolog of NCBI NO: 38230504 NR Description: predicted protein [Populus alba x Populus tremula]
  misc_feature (1)..(539): Homolog of NCBI NO: 22331232 NR Description: RNA recognition motif (RRM)-containing protein
  misc_feature (1)..(552): Homolog of NCBI NO: 30684113 NR Description: expressed protein [Arabidopsis thaliana]
  misc_feature (6)..(552): Homolog of NCBI NO: 14586374 NR Description: putative protein [Arabidopsis thaliana]
MDFRRNSPSSPSSTSPWSFNNCINGNNGNNPHISPKHTPISKPFSSHQSNGLSATHSGSADAAGGADLLDDQQLNDCLSFLDDSCSKTEDLVDPSIPLDYSVDGDGETHLHRRSFSCDASFVSGDDGFGGGCKPCVYFSRGLCKNGESCKFIHGGYPDNMDGNGIVADSPRKMENFVRQHEEMMRLKLAYQQQRLASQILGRAPQLPYEKRMDFLLQQHAQRDGGLPFGDERFWSSSPGRLERMELAMHLGDQSNSASRQIYLTFPADSTFKDEDVATYFSLFGTVQDVRIPYQQKRMFGFVSFAHPETVKVVLARGNPHFICDSRVLVKPYKEKGKVLDKKQQQLLQQQIERGNYSPCSSPSGIDPREQSDFHLGSKMLYERREMMRRKIEQADLLRAIELERRRFINLQLPEFKNSVTLNHHRSFSVGSPGYFSSAGNQSPDFQSELNGADALKVTDDTLELHPYPVVNPMSVNNSYSNGAKEETNKSELLDPDSGSTIELVLPSNLFPSASSTDDHKTDDSAETNAKVGVSSTNENDHEPPVTTNNLMQ

SEQ ID NO: 46792 - protein, 393 aa, Arabidopsis thaliana
  peptide (1)..(393): Ceres Seq. ID no. 13646958
  misc_feature (114)..(170): Pfam Name: RNA recognition motif. (a.k.a. RRM, RBD, or RNP domain) Pfam Description: RNA recognition motif. (a.k.a. RRM, RBD, or RNP
  misc_feature (35)..(279): Homolog of NCBI NO: 21594547 NR Description: unknown [Arabidopsis thaliana]
  misc_feature (35)..(279): Homolog of NCBI NO: 15231090 NR Description: RNA recognition motif (RRM)-containing protein
  misc_feature (93)..(242): Homolog of NCBI NO: 30695000 NR Description: expressed protein [Arabidopsis thaliana]
  misc_feature (93)..(247): Homolog of NCBI NO: 15217946 NR Description: expressed protein [Arabidopsis thaliana]
  misc_feature (1)..(377): Homolog of NCBI NO: 33146675 NR Description: putative DAZ associated protein 1
  misc_feature (1)..(379): Homolog of NCBI NO: 11994270 NR Description: emb|CAB41315.1~gene_id:MSA6.14~similar to unknown
  misc_feature (1)..(393): Homolog of NCBI NO: 38230504 NR Description: predicted protein [Populus alba x Populus tremula]
  misc_feature (1)..(380): Homolog of NCBI NO: 22331232 NR Description: RNA recognition motif (RRM)-containing protein
  misc_feature (1)..(393): Homolog of NCBI NO: 30684113 NR Description: expressed protein [Arabidopsis thaliana]
  misc_feature (1)..(393): Homolog of NCBI NO: 14586374 NR Description: putative protein [Arabidopsis thaliana]
MDGNGIVADSPRKMENFVRQHEEMMRLKLAYQQQRLASQILGRAPQLPYEKRMDFLLQQHAQRDGGLPFGDERFWSSSPGRLERMELAMHLGDQSNSASRQIYLTFPADSTFKDEDVATYFSLFGTVQDVRIPYQQKRMFGFVSFAHPETVKVVLARGNPHFICDSRVLVKPYKEKGKVLDKKQQQLLQQQIERGNYSPCSSPSGIDPREQSDFHLGSKMLYERREMMRRKIEQADLLRAIELERRRFINLQLPEFKNSVTLNHHRSFSVGSPGYFSSAGNQSPDFQSELNGADALKVTDDTLELHPYPVVNPMSVNNSYSNGAKEETNKSELLDPDSGSTIELVLPSNLFPSASSTDDHKTDDSAETNAKVGVSSTNENDHEPPVTTNNLMQ

SEQ ID NO: 46793 - protein, 380 aa, Arabidopsis thaliana
  peptide (1)..(380): Ceres Seq. ID no. 13646959
  misc_feature (101)..(157): Pfam Name: RNA recognition motif. (a.k.a. RRM, RBD, or RNP domain) Pfam Description: RNA recognition motif. (a.k.a. RRM, RBD, or RNP
  misc_feature (22)..(266): Homolog of NCBI NO: 21594547 NR Description: unknown [Arabidopsis thaliana]
  misc_feature (22)..(266): Homolog of NCBI NO: 15231090 NR Description: RNA recognition motif (RRM)-containing protein
  misc_feature (80)..(229): Homolog of NCBI NO: 30695000 NR Description: expressed protein [Arabidopsis thaliana]
  misc_feature (80)..(234): Homolog of NCBI NO: 15217946 NR Description: expressed protein [Arabidopsis thaliana]
  misc_feature (1)..(364): Homolog of NCBI NO: 33146675 NR Description: putative DAZ associated protein 1
  misc_feature (1)..(366): Homolog of NCBI NO: 11994270 NR Description: emb|CAB41315.1~gene_id:MSA6.14~similar to unknown
  misc_feature (1)..(380): Homolog of NCBI NO: 38230504 NR Description: predicted protein [Populus alba x Populus tremula]
  misc_feature (1)..(367): Homolog of NCBI NO: 22331232 NR Description: RNA recognition motif (RRM)-containing protein
  misc_feature (1)..(380): Homolog of NCBI NO: 30684113 NR Description: expressed protein [Arabidopsis thaliana]
  misc_feature (1)..(380): Homolog of NCBI NO: 14586374 NR Description: putative protein [Arabidopsis thaliana]
MENFVRQHEEMMRLKLAYQQQRLASQILGRAPQLPYEKRMDFLLQQHAQRDGGLPFGDERFWSSSPGRLERMELAMHLGDQSNSASRQIYLTFPADSTFKDEDVATYFSLFGTVQDVRIPYQQKRMFGFVSFAHPETVKVVLARGNPHFICDSRVLVKPYKEKGKVLDKKQQQLLQQQIERGNYSPCSSPSGIDPREQSDFHLGSKMLYERREMMRRKIEQADLLRAIELERRRFINLQLPEFKNSVTLNHHRSFSVGSPGYFSSAGNQSPDFQSELNGADALKVTDDTLELHPYPVVNPMSVNNSYSNGAKEETNKSELLDPDSGSTIELVLPSNLFPSASSTDDHKTDDSAETNAKVGVSSTNENDHEPPVTTNNLMQ

SEQ ID NO: 46794 - DNA, 1381 bp, Arabidopsis thaliana
  misc_feature (1)..(1381): Ceres Seq. ID no. 13579012
  misc_feature: MA Experiment ID: 20000306 Result: Up-regulated in Transcription
  misc_feature: MA Experiment 20000306 PARAMETER Experiment Name: At_Germinating_Seeds_Sub_P Parameter: Age (hr) Value: 6 vs. 0
  misc_feature: MA Experiment 20000306 PARAMETER Experiment Name: At_Germinating_Seeds_Sub_P Parameter: Organism Value: A. thaliana
  misc_feature: MA Experiment 20000306 PARAMETER Experiment Name: At_Germinating_Seeds_Sub_P Parameter: Plant Line Value: WS
  misc_feature: MA Experiment 20000306 PARAMETER Experiment Name: At_Germinating_Seeds_Sub_P Parameter: Tissue Value: Germinating Seeds
  misc_feature: MA Experiment ID: 20000307 Result: Up-regulated in Transcription
  misc_feature: MA Experiment 20000307 PARAMETER Experiment Name: At_Germinating_Seeds_Sub_P Parameter: Age (hr) Value: 24 vs. 0
  misc_feature: MA Experiment 20000307 PARAMETER Experiment Name: At_Germinating_Seeds_Sub_P Parameter: Organism Value: A. thaliana
  misc_feature: MA Experiment 20000307 PARAMETER Experiment Name: At_Germinating_Seeds_Sub_P Parameter: Plant Line Value: WS
  misc_feature: MA Experiment 20000307 PARAMETER Experiment Name: At_Germinating_Seeds_Sub_P Parameter: Tissue Value: Germinating Seeds
  misc_feature: MA Experiment ID: 20000440 Result: Up-regulated in Transcription
  misc_feature: MA Experiment 20000440 PARAMETER Experiment Name: At_Closed-Flower__Sub_P Parameter: Tissue Value: Closed Flower vs. Whole Plant
gacaagactacaaagcaaagacacaaatcaaggagaaaacttccacaaattgtctctctttctttcctacacaccaatttgttttgtgattctttcgattgcattcttctttttcgaattcccgatcactggattttcccgtttaaccggaaaatccagtggattagattttacccagtgttatctttttggattggattcgatgactgttacggaggacgaaaaaccggttcttgagctgctggtgagagttgaagacgacgatgagaaagggccttatgtgaaattgagtgaggttttagagaaaggtcaagaatcagagcaggagaaggaagaagaaaagactgattcgtcgcggttttggttttgggtcaagctttctcttttattcgcctttcttgctgcattggctgttgtgggttacatttggatcggtccattgatcatggataaggagcttataccgcttatacaatgggagatacgaacttttacacatcctgtgtgtggtcttcttgtttttgcatcagtggcgatatttccaactatacttcttccatctacaccatcaatgtggattgctgggatgacttttggttatggctatggctttctacttattatctcagctgcagctgttggtgtttcgctaccttactttattggacaactcttctgccacaaaattcaaggatggctagaaagatatcctgatcaagcagccgtattaagagctgctggtgaagggaattggcttcaccaatttctattagtaaccttaatccggatttctccattcccttacattctttataactactgttctgtagcaactcgtgttaagtatggtccttacatcacgggctctctcttaggcatggtgcctgaggtttttgtcgcaatctacacagggatacttgtaaggacattagcagaagcatcttctgcagaagaacagggtctctcggtaacacaggtgattctcaacattctcggctttttagcaacagtggctacaacgattctcatcacaaagtatgcgaaaagacagctggagacgatgaagaaagaggacgaagcattgttgcagtaaaactgtaaaaccacgtgacaaactctgagctgcttttgtctctctgctactttatctgaaacaccccttgtcttcttacacagtacaggtctcaggtctgttcctagatgtgaaagagctctggtttttttgtccttgcttcttttaatctcatttattaacagccttaaaatttgagaagagaaaaatggttaacaaggaaaaatctaacacattactttttttttgtaattattgtagtcaagttttatgtttggcatgaatgagagaactgagaagaatattcgt

SEQ ID NO: 46795 - protein, 363 aa, Arabidopsis thaliana
  peptide (1)..(363): Ceres Seq. ID no. 13579013
  misc_feature (68)..(151): Homolog of NCBI NO: 7486891 NR Description: hypothetical protein T12H17.240 - Arabidopsis
  misc_feature (202)..(303): Homolog of NCBI NO: 8778630 NR Description: F5O11.19 [Arabidopsis thaliana]
  misc_feature (297)..(363): Homolog of NCBI NO: 8778630 NR Description: F5O11.19 [Arabidopsis thaliana]
  misc_feature (77)..(230): Homolog of NCBI NO: 8778630 NR Description: F5O11.19 [Arabidopsis thaliana]
  misc_feature (123)..(358): Homolog of NCBI NO: 34913316 NR Description: P0519E12.36 [Oryza sativa (japonica
  misc_feature (93)..(358): Homolog of NCBI NO: 18395356 NR Description: expressed protein [Arabidopsis thaliana]
  misc_feature (205)..(363): Homolog of NCBI NO: 7486891 NR Description: hypothetical protein T12H17.240 - Arabidopsis
  misc_feature (77)..(363): Homolog of NCBI NO: 15221330 NR Description: expressed protein [Arabidopsis thaliana]
  misc_feature (68)..(362): Homolog of NCBI NO: 15234386 NR Description: expressed protein [Arabidopsis thaliana]
  misc_feature (68)..(363): Homolog of NCBI NO: 30685958 NR Description: expressed protein [Arabidopsis thaliana]
TRLQSKDTNQGENFHKLSLFLSYTPICFVILSIAFFFFEFPITGFSRLTGKSSGLDFTQCYLFGLDSMTVTEDEKPVLELLVRVEDDDEKGPYVKLSEVLEKGQESEQEKEEEKTDSSRFWFWVKLSLLFAFLAALAVVGYIWIGPLIMDKELIPLIQWEIRTFTHPVCGLLVFASVAIFPTILLPSTPSMWIAGMTFGYGYGFLLIISAAAVGVSLPYFIGQLFCHKIQGWLERYPDQAAVLRAAGEGNWLHQFLLVTLIRISPFPYILYNYCSVATRVKYGPYITGSLLGMVPEVFVAIYTGILVRTLAEASSAEEQGLSVTQVILNILGFLATVATTILITKYAKRQLETMKKEDEALLQ

SEQ ID NO: 46796 - protein, 296 aa, Arabidopsis thaliana
  peptide (1)..(296): Ceres Seq. ID no. 13579014
  misc_feature (1)..(84): Homolog of NCBI NO: 7486891 NR Description: hypothetical protein T12H17.240 - Arabidopsis
  misc_feature (135)..(236): Homolog of NCBI NO: 8778630 NR Description: F5O11.19 [Arabidopsis thaliana]
  misc_feature (230)..(296): Homolog of NCBI NO: 8778630 NR Description: F5O11.19 [Arabidopsis thaliana]
  misc_feature (10)..(163): Homolog of NCBI NO: 8778630 NR Description: F5O11.19 [Arabidopsis thaliana]
  misc_feature (56)..(291): Homolog of NCBI NO: 34913316 NR Description: P0519E12.36 [Oryza sativa (japonica
  misc_feature (26)..(291): Homolog of NCBI NO: 18395356 NR Description: expressed protein [Arabidopsis thaliana]
  misc_feature (138)..(296): Homolog of NCBI NO: 7486891 NR Description: hypothetical protein T12H17.240 - Arabidopsis
  misc_feature (10)..(296): Homolog of NCBI NO: 15221330 NR Description: expressed protein [Arabidopsis thaliana]
  misc_feature (1)..(295): Homolog of NCBI NO: 15234386 NR Description: expressed protein [Arabidopsis thaliana]
  misc_feature (1)..(296): Homolog of NCBI NO: 30685958 NR Description: expressed protein [Arabidopsis thaliana]
MTVTEDEKPVLELLVRVEDDDEKGPYVKLSEVLEKGQESEQEKEEEKTDSSRFWFWVKLSLLFAFLAALAVVGYIWIGPLIMDKELIPLIQWEIRTFTHPVCGLLVFASVAIFPTILLPSTPSMWIAGMTFGYGYGFLLIISAAAVGVSLPYFIGQLFCHKIQGWLERYPDQAAVLRAAGEGNWLHQFLLVTLIRISPFPYILYNYCSVATRVKYGPYITGSLLGMVPEVFVAIYTGILVRTLAEASSAEEQGLSVTQVILNILGFLATVATTILITKYAKRQLETMKKEDEALLQ

SEQ ID NO: 46797 - protein, 215 aa, Arabidopsis thaliana
  peptide (1)..(215): Ceres Seq. ID no. 13579015
  misc_feature (81)..(210): Homolog of NCBI NO: 25410981 NR Description: hypothetical protein At2g02370 [imported] -
  misc_feature (54)..(155): Homolog of NCBI NO: 8778630 NR Description: F5O11.19 [Arabidopsis thaliana]
  misc_feature (149)..(215): Homolog of NCBI NO: 8778630 NR Description: F5O11.19 [Arabidopsis thaliana]
  misc_feature (1)..(82): Homolog of NCBI NO: 8778630 NR Description: F5O11.19 [Arabidopsis thaliana]
  misc_feature (1)..(210): Homolog of NCBI NO: 34913316 NR Description: P0519E12.36 [Oryza sativa (japonica
  misc_feature (1)..(210): Homolog of NCBI NO: 18395356 NR Description: expressed protein [Arabidopsis thaliana]
  misc_feature (57)..(215): Homolog of NCBI NO: 7486891 NR Description: hypothetical protein T12H17.240 - Arabidopsis
  misc_feature (1)..(215): Homolog of NCBI NO: 15221330 NR Description: expressed protein [Arabidopsis thaliana]
  misc_feature (1)..(214): Homolog of NCBI NO: 15234386 NR Description: expressed protein [Arabidopsis thaliana]
  misc_feature (1)..(215): Homolog of NCBI NO: 30685958 NR Description: expressed protein [Arabidopsis thaliana]
MDKELIPLIQWEIRTFTHPVCGLLVFASVAIFPTILLPSTPSMWIAGMTFGYGYGFLLIISAAAVGVSLPYFIGQLFCHKIQGWLERYPDQAAVLRAAGEGNWLHQFLLVTLIRISPFPYILYNYCSVATRVKYGPYITGSLLGMVPEVFVAIYTGILVRTLAEASSAEEQGLSVTQVILNILGFLATVATTILITKYAKRQLETMKKEDEALLQ

SEQ ID NO: 46798 - DNA, 2071 bp, Arabidopsis thaliana
  misc_feature (1)..(2071): Ceres Seq. ID no. 14302791
  misc_feature: MA Experiment ID: 20000327 Result: Down-regulated in Transcription
  misc_feature: MA Experiment 20000327 PARAMETER Experiment Name: At_42deg_Heat_Sub_P Parameter: Age (day) Value: 14
  misc_feature: MA Experiment 20000327 PARAMETER Experiment Name: At_42deg_Heat_Sub_P Parameter: Organism Value: A. thaliana
  misc_feature: MA Experiment 20000327 PARAMETER Experiment Name: At_42deg_Heat_Sub_P Parameter: Plant Line Value: WS
  misc_feature: MA Experiment 20000327 PARAMETER Experiment Name: At_42deg_Heat_Sub_P Parameter: Temperature (deg C) Value: 42 vs. 22
  misc_feature: MA Experiment 20000327 PARAMETER Experiment Name: At_42deg_Heat_Sub_P Parameter: Timepoint (hr) Value: 1
  misc_feature: MA Experiment 20000327 PARAMETER Experiment Name: At_42deg_Heat_Sub_P Parameter: Tissue Value: Aerial
gatcatttcctgaaaactagaaaacacagtttaaagggaacataaaaagcaactctttgagagatcagagaaaccctaatttgctaagaaccctaatctcaatttccatcttccaaagttcagattctgtatgtaaatgcatctgaagaattctactgtagcagaacggcggtacatcggaaaagaaaccgccggttatttaacttcttcctccgatttggatccgaaacctaagattaaacatcatcgtcctcttcaggtacctgagattctgactccagacattggtgctggtgctggattcagtgtgtataacaatcaagttcaagctcagagtcgtcatcatctgacggttgaaatcccagattcatcgtctcacaatcttacatctaagagacctgtggtggttcaatcttctaatccgttcaacgttgacgatttccgaagacagcaacgcacaagcttgggttcgatttcatcttattgtccgtcgtatctcttatcgtttttttcttcttctcttccatcgatcccatcggcgactaatcagaagcttcttcgtcatgttcttagagtccgtttgatatgtttccatcttcgtttcttacttcttctctctgttcctcctctctatatctttttcctggtgattagtttcagattcttccttctctttgtcttctcgattatcgctttctctttcgtcctttcgatctctctcaaattcgctcttcctcacttaccatcgattcgtttgattatcgctcggttactttctctcaagcttacccctaccagatcatcctcttcatctcaggagaacactaaacatgttatttggtcaattgggtctaagcctgtgactgagaagaagaccaactctggctcatgggttcagaagtacagctctggtgatgtatacgagggagagtttcatagggggaagtgttcaggaagtggagtttattactattctatgaagggtaaatacgaaggggattggattgatgggaagtatgatggatatggagttgaaacttgggctaaagggagtaggtaccgaggtcaatacaggcaagggatgagacatggaactggtatctacagattttatacaggggatgtatatgctggtgagtggtcgaatggacagagccatggctgtggtgtgtatacctctgaggatggtagtcgttttgttggagagtttaaatggggtgtcaaacatggccttggtcattatcatttcagaaatggtgatacatatgctggggagtattttgcagacaggatgcatggttttggagtgtatcaatttggaaacgggcatcggtatgaaggagcctggcatgaggggagaaggcaaggacttggtatgtacacgttcaggaatggtgagacacaggcaggccattgggaagacggagttcttaactgtcctaccgagcagaccactcgccctgattcatcgttttccatcagtcattccaaggttgtcgacactgtccagcaagcaaggaaagcagccaagaaagcacgcgaagttgtgaaagttgaagagagagtgaacagagcagtgatggtcgcaaaccgagcagcaaatgctgctagagttgctgctacaaaggctgtccaaacccaaacatttcattgtagtagtggtgacgatcccttgtgaattcctgcggcaaagattttgacataatcgcagtcatgaccttacctcaaacttctacgaagacagaagagtgaaagagagatgtttagagaacagagtcagaattcgcaatctccgttgagattttcttgaaggtgaaccacttggaaccaatatcgagatctcataagtaataagtaagagatctggctatggagcaagtattactggtttactttttcttttctcccacttgttttatgagcaggctggtttaaaactgtacataggttgttgaagagtaagcaatgtgtgttaacaaaagatctttgtaacaagcgtaatccatgtaagagaagtaacaaaacattgttttacttttacaacgtgttgaaaataacacctttttttacc

SEQ ID NO: 46799 - protein, 513 aa, Arabidopsis thaliana
  peptide (1)..(513): Ceres Seq. ID no. 14302792
  misc_feature (354)..(376): Pfam Name: MORN repeat Pfam Description: MORN repeat
  misc_feature (235)..(430): Homolog of NCBI NO: 40062709 NR Description: MORN repeat protein [uncultured bacterium 314]
  misc_feature (250)..(429): Homolog of NCBI NO: 40062709 NR Description: MORN repeat protein [uncultured bacterium 314]
  misc_feature (1)..(381): Homolog of NCBI NO: 15235967 NR Description: expressed protein [Arabidopsis thaliana]
  misc_feature (172)..(502): Homolog of NCBI NO: 15217439 NR Description: hypothetical protein [Arabidopsis thaliana]
  misc_feature (154)..(502): Homolog of NCBI NO: 21593251 NR Description: phosphatidylinositol-4-phosphate 5-kinase,
  misc_feature (150)..(502): Homolog of NCBI NO: 15219142 NR Description: phosphatidylinositol-4-phosphate 5-kinase
  misc_feature (71)..(513): Homolog of NCBI NO: 37536922 NR Description: putative phosphatidylinositol-4-phosphate
  misc_feature (96)..(510): Homolog of NCBI NO: 18403768 NR Description: expressed protein [Arabidopsis thaliana]
  misc_feature (164)..(513): Homolog of NCBI NO: 15235967 NR Description: expressed protein [Arabidopsis thaliana]
  misc_feature (1)..(513): Homolog of NCBI NO: 21928129 NR Description: AT4g17080/dl4570w [Arabidopsis thaliana]
MHLKNSTVAERRYIGKETAGYLTSSSDLDPKPKIKHHRPLQVPEILTPDIGAGAGFSVYNNQVQAQSRHHLTVEIPDSSSHNLTSKRPVVVQSSNPFNVDDFRRQQRTSLGSISSYCPSYLLSFFSSSLPSIPSATNQKLLRHVLRVRLICFHLRFLLLLSVPPLYIFFLVISFRFFLLFVFSIIAFSFVLSISLKFALPHLPSIRLIIARLLSLKLTPTRSSSSSQENTKHVIWSIGSKPVTEKKTNSGSWVQKYSSGDVYEGEFHRGKCSGSGVYYYSMKGKYEGDWIDGKYDGYGVETWAKGSRYRGQYRQGMRHGTGIYRFYTGDVYAGEWSNGQSHGCGVYTSEDGSRFVGEFKWGVKHGLGHYHFRNGDTYAGEYFADRMHGFGVYQFGNGHRYEGAWHEGRRQGLGMYTFRNGETQAGHWEDGVLNCPTEQTTRPDSSFSISHSKVVDTVQQARKAAKKAREVVKVEERVNRAVMVANRAANAARVAATKAVQTQTFHCSSGDDPL

SEQ ID NO: 46800 - DNA, 1281 bp, Arabidopsis thaliana
  misc_feature (1)..(1281): Ceres Seq. ID no. 14302801
  misc_feature: MA Experiment ID: 20000184 Result: Down-regulated in Transcription
  misc_feature: MA Experiment 20000184 PARAMETER Experiment Name: At_Shoots__P Parameter: Age (day) Value: 7
  misc_feature: MA Experiment 20000184 PARAMETER Experiment Name: At_Shoots__P Parameter: Tissue Value: Shoots vs. Whole Plant
  misc_feature: MA Experiment ID: 20000185 Result: Up-regulated in Transcription
  misc_feature: MA Experiment 20000185 PARAMETER Experiment Name: At_Roots__P Parameter: Age (day) Value: 7 vs. 21
  misc_feature: MA Experiment 20000185 PARAMETER Experiment Name: At_Roots__P Parameter: Organism Value: A. thaliana
  misc_feature: MA Experiment 20000185 PARAMETER Experiment Name: At_Roots__P Parameter: Tissue Value: Roots vs. Whole Plant
  misc_feature: MA Experiment ID: 20000439 Result: Up-regulated in Transcription
  misc_feature: MA Experiment 20000439 PARAMETER Experiment Name: At_Roots__P Parameter: Age (day) Value: 14 vs. 21
  misc_feature: MA Experiment 20000439 PARAMETER Experiment Name: At_Roots__P Parameter: Organism Value: A. thaliana
  misc_feature: MA Experiment 20000439 PARAMETER Experiment Name: At_Roots__P Parameter: Tissue Value: Roots vs. Whole Plant
  misc_feature: MA Experiment ID: 20000495 Result: Up-regulated in Transcription
  misc_feature: MA Experiment 20000495 PARAMETER Experiment Name: At_Guard_Cells_P Parameter: Harvest Date Value: 8/2/2002
  misc_feature: MA Experiment 20000495 PARAMETER Experiment Name: At_Guard_Cells_P Parameter: Organism Value: A. thaliana
  misc_feature: MA Experiment 20000495 PARAMETER Experiment Name: At_Guard_Cells_P Parameter: Tissue Value: Guard Cells vs. Leaves
  misc_feature: MA Experiment ID: 20001905 Result: Down-regulated in Transcription
  misc_feature: MA Experiment 20001905 PARAMETER Experiment Name: At_Drought_Reproduction_P Parameter: Age (day) Value: 40
  misc_feature: MA Experiment 20001905 PARAMETER Experiment Name: At_Drought_Reproduction_P Parameter: Organism Value: A. thaliana
  misc_feature: MA Experiment 20001905 PARAMETER Experiment Name: At_Drought_Reproduction_P Parameter: Plant Line Value: WS
  misc_feature: MA Experiment 20001905 PARAMETER Experiment Name: At_Drought_Reproduction_P Parameter: Timepoint (day) Value: 10
  misc_feature: MA Experiment 20001905 PARAMETER Experiment Name: At_Drought_Reproduction_P Parameter: Tissue Value: Rosettes
  misc_feature: MA Experiment 20001905 PARAMETER Experiment Name: At_Drought_Reproduction_P Parameter: Treatment Value: Drought vs. No Drought
gcaaaacaccaggaggaaaccaaaaagctagaggctttgtggagtgagaagaagagtctcagtgaaaacagaaagcagcatttgagattccactgttaatctttgaatcaaaaatgagtgcagcagctacaatgcctatgccccgagaagcgtctaattacgatgagatctctatgcaacagagcatgctcttctctgatagtctcaaggatctgaagaatctgagaacacagttgtattcagcagctgagtatttcgaactatcctacacaaacgatgaacaaaaacagatagtcgtggagacactgaaagattatgcaataaaggctctggtgaatacagttgaccatttggggtctgttacatataaagtaaatgactttgtagatgaaaaagtcgatgaagtagcaggaaccgaactgcgagtatcttgcattgaacagaggctacggatgtgccaagagtacatggatcatgaaggtcgttcccagcaatcacttgtgatcgacactccaaagttccacaagcggtacttcttgccttctggtgaaatcaaaagaggtggcaacctcgcaaagcttaagaatgttgaaggtagttttgatggagaagatgactggaaccaattcagaaatgctgttcgcgctacaattcgtgaaacgcctccaccacctgttagaaaaccgatacttcagtctccctctcaacggaaacctcaacgttcagcaaccttttcgttctcctctatcgccaccgcaccaaagaaagaacaagataagcgagcagtatcaccacatcggtttccgctgctaagatctggttcggttgctatccgaccgtcatcaatcagccggccaacaaccccgagcaagagtagagcggtaactccaactcctaaacggtatccgtcagaaccaagaagatcggcttcggttcgggttgcgttcgagaaagaagctcagaaagaaccagagcatcaacaacaaccgagcaagagcaaacggctgctaaaggcgctacttagccgacgcaaaacaaagaaggacgatacgctctacacttatttggacgaatattaaaccgaaagctggttttgtatgttgactggtaaaccggaaattacattccagttttaattgcatttacgtaatgtcaaattgtcaatatatgtgttacaaaatatgtccatgattctatgattttgtgtataccttatgactgtcagagtgtgaatgcagttttgtttacaagcgtagtaaaatttgctgtgaattattttag

SEQ ID NO: 46801 - protein, 321 aa, Arabidopsis thaliana
  peptide (1)..(321): Ceres Seq. ID no. 14302802
  misc_feature (9)..(149): Homolog of NCBI NO: 18407012 NR Description: expressed protein [Arabidopsis thaliana]
  misc_feature (1)..(242): Homolog of NCBI NO: 34904432 NR Description: unnamed protein product [Oryza sativa (japonica
  misc_feature (12)..(190): Homolog of NCBI NO: 15238265 NR Description: expressed protein [Arabidopsis thaliana]
  misc_feature (12)..(190): Homolog of NCBI NO: 21618229 NR Description: unknown [Arabidopsis thaliana]
  misc_feature (259)..(321): Homolog of NCBI NO: 34913914 NR Description: OSJNBa0066C06.8 [Oryza sativa (japonica
  misc_feature (13)..(146): Homolog of NCBI NO: 34913914 NR Description: OSJNBa0066C06.8 [Oryza sativa (japonica
  misc_feature (142)..(321): Homolog of NCBI NO: 26451274 NR Description: unknown protein [Arabidopsis thaliana]
  misc_feature (7)..(321): Homolog of NCBI NO: 15229112 NR Description: expressed protein [Arabidopsis thaliana]
  misc_feature (1)..(321): Homolog of NCBI NO: 10177091 NR Description: emb|CAB66408.1~gene_id:MOP9.13~strong similarity
  misc_feature (1)..(321): Homolog of NCBI NO: 30689382 NR Description: expressed protein [Arabidopsis thaliana]
MSAAATMPMPREASNYDEISMQQSMLFSDSLKDLKNLRTQLYSAAEYFELSYTNDEQKQIVVETLKDYAIKALVNTVDHLGSVTYKVNDFVDEKVDEVAGTELRVSCIEQRLRMCQEYMDHEGRSQQSLVIDTPKFHKRYFLPSGEIKRGGNLAKLKNVEGSFDGEDDWNQFRNAVRATIRETPPPPVRKPILQSPSQRKPQRSATFSFSSIATAPKKEQDKRAVSPHRFPLLRSGSVAIRPSSISRPTTPSKSRAVTPTPKRYPSEPRRSASVRVAFEKEAQKEPEHQQQPSKSKRLLKALLSRRKTKKDDTLYTYLDEY

SEQ ID NO: 46802 - protein, 315 aa, Arabidopsis thaliana
  peptide (1)..(315): Ceres Seq. ID no. 14302803
  misc_feature (3)..(143): Homolog of NCBI NO: 18407012 NR Description: expressed protein [Arabidopsis thaliana]
  misc_feature (1)..(236): Homolog of NCBI NO: 34904432 NR Description: unnamed protein product [Oryza sativa (japonica
  misc_feature (6)..(184): Homolog of NCBI NO: 15238265 NR Description: expressed protein [Arabidopsis thaliana]
  misc_feature (6)..(184): Homolog of NCBI NO: 21618229 NR Description: unknown [Arabidopsis thaliana]
  misc_feature (253)..(315): Homolog of NCBI NO: 34913914 NR Description: OSJNBa0066C06.8 [Oryza sativa (japonica
  misc_feature (7)..(140): Homolog of NCBI NO: 34913914 NR Description: OSJNBa0066C06.8 [Oryza sativa (japonica
  misc_feature (136)..(315): Homolog of NCBI NO: 26451274 NR Description: unknown protein [Arabidopsis thaliana]
  misc_feature (1)..(315): Homolog of NCBI NO: 15229112 NR Description: expressed protein [Arabidopsis thaliana]
  misc_feature (1)..(315): Homolog of NCBI NO: 10177091 NR Description: emb|CAB66408.1~gene_id:MOP9.13~strong similarity
  misc_feature (1)..(315): Homolog of NCBI NO: 30689382 NR Description: expressed protein [Arabidopsis thaliana]
MPMPREASNYDEISMQQSMLFSDSLKDLKNLRTQLYSAAEYFELSYTNDEQKQIVVETLKDYAIKALVNTVDHLGSVTYKVNDFVDEKVDEVAGTELRVSCIEQRLRMCQEYMDHEGRSQQSLVIDTPKFHKRYFLPSGEIKRGGNLAKLKNVEGSFDGEDDWNQFRNAVRATIRETPPPPVRKPILQSPSQRKPQRSATFSFSSIATAPKKEQDKRAVSPHRFPLLRSGSVAIRPSSISRPTTPSKSRAVTPTPKRYPSEPRRSASVRVAFEKEAQKEPEHQQQPSKSKRLLKALLSRRKTKKDDTLYTYLDEY

SEQ ID NO: 46803 - protein, 313 aa, Arabidopsis thaliana
  peptide (1)..(313): Ceres Seq. ID no. 14302804
  misc_feature (1)..(141): Homolog of NCBI NO: 18407012 NR Description: expressed protein [Arabidopsis thaliana]
  misc_feature (1)..(234): Homolog of NCBI NO: 34904432 NR Description: unnamed protein product [Oryza sativa (japonica
  misc_feature (4)..(182): Homolog of NCBI NO: 15238265 NR Description: expressed protein [Arabidopsis thaliana]
  misc_feature (4)..(182): Homolog of NCBI NO: 21618229 NR Description: unknown [Arabidopsis thaliana]
  misc_feature (251)..(313): Homolog of NCBI NO: 34913914 NR Description: OSJNBa0066C06.8 [Oryza sativa (japonica
  misc_feature (5)..(138): Homolog of NCBI NO: 34913914 NR Description: OSJNBa0066C06.8 [Oryza sativa (japonica
  misc_feature (134)..(313): Homolog of NCBI NO: 26451274 NR Description: unknown protein [Arabidopsis thaliana]
  misc_feature (1)..(313): Homolog of NCBI NO: 15229112 NR Description: expressed protein [Arabidopsis thaliana]
  misc_feature (1)..(313): Homolog of NCBI NO: 10177091 NR Description: emb|CAB66408.1~gene_id:MOP9.13~strong similarity
  misc_feature (1)..(313): Homolog of NCBI NO: 30689382 NR Description: expressed protein [Arabidopsis thaliana]
MPREASNYDEISMQQSMLFSDSLKDLKNLRTQLYSAAEYFELSYTNDEQKQIVVETLKDYAIKALVNTVDHLGSVTYKVNDFVDEKVDEVAGTELRVSCIEQRLRMCQEYMDHEGRSQQSLVIDTPKFHKRYFLPSGEIKRGGNLAKLKNVEGSFDGEDDWNQFRNAVRATIRETPPPPVRKPILQSPSQRKPQRSATFSFSSIATAPKKEQDKRAVSPHRFPLLRSGSVAIRPSSISRPTTPSKSRAVTPTPKRYPSEPRRSASVRVAFEKEAQKEPEHQQQPSKSKRLLKALLSRRKTKKDDTLYTYLDEY

SEQ ID NO: 46804 - DNA, 1353 bp, Arabidopsis thaliana; identical to SEQ ID NO: 37049
  misc_feature (1)..(1353): Ceres Seq. ID no. 13600835
  misc_feature: MA Experiment ID: 20000171 Result: Up-regulated in Transcription
  misc_feature: MA Experiment 20000171 PARAMETER Experiment Name: At_42deg_Heat_P Parameter: Age (day) Value: 14
  misc_feature: MA Experiment 20000171 PARAMETER Experiment Name: At_42deg_Heat_P Parameter: Organism Value: A. thaliana
  misc_feature: MA Experiment 20000171 PARAMETER Experiment Name: At_42deg_Heat_P Parameter: Plant Line Value: WS
  misc_feature: MA Experiment 20000171 PARAMETER Experiment Name: At_42deg_Heat_P Parameter: Temperature (deg C) Value: 42 vs. 22
  misc_feature: MA Experiment 20000171 PARAMETER Experiment Name: At_42deg_Heat_P Parameter: Timepoint (hr) Value: 1
  misc_feature: MA Experiment 20000171 PARAMETER Experiment Name: At_42deg_Heat_P Parameter: Tissue Value: Aerial
  misc_feature: MA Experiment ID: 20000173 Result: Up-regulated in Transcription
  misc_feature: MA Experiment 20000173 PARAMETER Experiment Name: At_42deg_Heat_P Parameter: Age (day) Value: 14
  misc_feature: MA Experiment 20000173 PARAMETER Experiment Name: At_42deg_Heat_P Parameter: Organism Value: A. thaliana
  misc_feature: MA Experiment 20000173 PARAMETER Experiment Name: At_42deg_Heat_P Parameter: Plant Line Value: WS
  misc_feature: MA Experiment 20000173 PARAMETER Experiment Name: At_42deg_Heat_P Parameter: Temperature (deg C) Value: 42 vs. 22
  misc_feature: MA Experiment 20000173 PARAMETER Experiment Name: At_42deg_Heat_P Parameter: Timepoint (hr) Value: 6
  misc_feature: MA Experiment 20000173 PARAMETER Experiment Name: At_42deg_Heat_P Parameter: Tissue Value: Aerial
  misc_feature: MA Experiment ID: 20000180 Result: Down-regulated in Transcription
  misc_feature: MA Experiment 20000180 PARAMETER Experiment Name: At_Germinating_Seeds_P Parameter: Age (hr) Value: 24 vs. 0
  misc_feature: MA Experiment 20000180 PARAMETER Experiment Name: At_Germinating_Seeds_P Parameter: Tissue Value: Germinating Seeds
  misc_feature: MA Experiment ID: 20001247 Result: Down-regulated in Transcription
  misc_feature: MA Experiment 20001247 PARAMETER Experiment Name: At_Far-red-induction_P Parameter: Age (day) Value: 7
  misc_feature: MA Experiment 20001247 PARAMETER Experiment Name: At_Far-red-induction_P Parameter: Light Value: Far-red vs. White
  misc_feature: MA Experiment 20001247 PARAMETER Experiment Name: At_Far-red-induction_P Parameter: Organism Value: A. thaliana
  misc_feature: MA Experiment 20001247 PARAMETER Experiment Name: At_Far-red-induction_P Parameter: Plant Line Value: Columbia
  misc_feature: MA Experiment 20001247 PARAMETER Experiment Name: At_Far-red-induction_P Parameter: Timepoint (hr) Value: 1
  misc_feature: MA Experiment 20001247 PARAMETER Experiment Name: At_Far-red-induction_P Parameter: Tissue Value: Whole Plant
  misc_feature: MA Experiment ID: 20001556 Result: Up-regulated in Transcription
  misc_feature: MA Experiment 20001556 PARAMETER Experiment Name: At_Drought_Soil_Dry_P Parameter: Age (day) Value: 26
  misc_feature: MA Experiment 20001556 PARAMETER Experiment Name: At_Drought_Soil_Dry_P Parameter: Organism Value: A. thaliana
  misc_feature: MA Experiment 20001556 PARAMETER Experiment Name: At_Drought_Soil_Dry_P Parameter: Plant Line Value: WS
  misc_feature: MA Experiment 20001556 PARAMETER Experiment Name: At_Drought_Soil_Dry_P Parameter: Post Timepoint (hr) Value: None
  misc_feature: MA Experiment 20001556 PARAMETER Experiment Name: At_Drought_Soil_Dry_P Parameter: Post-Treatment Value: None
  misc_feature: MA Experiment 20001556 PARAMETER Experiment Name: At_Drought_Soil_Dry_P Parameter: Timepoint (day) Value: 12
  misc_feature: MA Experiment 20001556 PARAMETER Experiment Name: At_Drought_Soil_Dry_P Parameter: Treatment Value: Drought vs. No Drought
  misc_feature: MA Experiment ID: 20001558 Result: Up-regulated in Transcription
  misc_feature: MA Experiment 20001558 PARAMETER Experiment Name: At_Drought_Soil_Dry_P Parameter: Age (day) Value: 27
  misc_feature: MA Experiment 20001558 PARAMETER Experiment Name: At_Drought_Soil_Dry_P Parameter: Organism Value: A. thaliana
  misc_feature: MA Experiment 20001558 PARAMETER Experiment Name: At_Drought_Soil_Dry_P Parameter: Plant Line Value: WS
  misc_feature: MA Experiment 20001558 PARAMETER Experiment Name: At_Drought_Soil_Dry_P Parameter: Post Timepoint (hr) Value: 6
  misc_feature: MA Experiment 20001558 PARAMETER Experiment Name: At_Drought_Soil_Dry_P Parameter: Post-Treatment Value: Re-Water vs. No Drought
  misc_feature: MA Experiment 20001558 PARAMETER Experiment Name: At_Drought_Soil_Dry_P Parameter: Timepoint (day) Value: 13
  misc_feature: MA Experiment 20001558 PARAMETER Experiment Name: At_Drought_Soil_Dry_P Parameter: Treatment Value: Drought vs. No Drought
  misc_feature: MA Experiment ID: 20001757 Result: Up-regulated in Transcription
  misc_feature: MA Experiment 20001757 PARAMETER Experiment Name: At_50mM_NH4NO3_L-to-H_P Parameter: Timepoint (hr) Value: 6
  misc_feature: MA Experiment 20001757 PARAMETER Experiment Name: At_50mM_NH4NO3_L-to-H_P Parameter: Tissue Value: Leaf
  misc_feature: MA Experiment 20001757 PARAMETER Experiment Name: At_50mM_NH4NO3_L-to-H_P Parameter: Treatment Value: 50mM NH4NO3 vs 100mM Mannitol

SEQ ID NO: 46805 - protein, 439 aa, Arabidopsis thaliana; identical to SEQ ID NO: 37050
  peptide (1)..(439): Ceres Seq. ID no. 13600836
  misc_feature (211)..(419): Pfam Name: High molecular weight glutenin subunit Pfam Description: High molecular weight glutenin subunit
  misc_feature (211)..(419): Pfam Name: High molecular weight glutenin subunit Pfam Description: High molecular weight glutenin subunit
  misc_feature (21)..(226): Homolog of NCBI NO: 15230785 NR Description: DAG protein -related [Arabidopsis thaliana]
  misc_feature (21)..(226): Homolog of NCBI NO: 27754695 NR Description: putative DAG protein [Arabidopsis thaliana]
  misc_feature (21)..(219): Homolog of NCBI NO: 6014904 NR Description: DAG PROTEIN, CHLOROPLAST PRECURSOR
  misc_feature (20)..(247): Homolog of NCBI NO: 15220382 NR Description: DAG protein -related [Arabidopsis thaliana]
  misc_feature (44)..(230): Homolog of NCBI NO: 38636775 NR Description: putative DAG protein [Oryza sativa (japonica
  misc_feature (21)..(226): Homolog of NCBI NO: 15230785 NR Description: DAG protein -related [Arabidopsis thaliana]
  misc_feature (21)..(219): Homolog of NCBI NO: 6014904 NR Description: DAG PROTEIN, CHLOROPLAST PRECURSOR
  misc_feature (44)..(230): Homolog of NCBI NO: 38636775 NR Description: putative DAG protein [Oryza sativa (japonica
  misc_feature (21)..(439): Homolog of NCBI NO: 15235263 NR Description: putative DAG protein [Arabidopsis thaliana]
  misc_feature (249)..(419): Homolog of NCBI NO: 19310564 NR Description: putative DAG protein [Arabidopsis thaliana]
  misc_feature (21)..(394): Homolog of NCBI NO: 15241580 NR Description: expressed protein [Arabidopsis thaliana]
  misc_feature (97)..(409): Homolog of NCBI NO: 18400602 NR Description: expressed protein [Arabidopsis thaliana]
  misc_feature (20)..(247): Homolog of NCBI NO: 21593052 NR Description: DAG protein, putative [Arabidopsis thaliana]
  misc_feature (20)..(247): Homolog of NCBI NO: 15220382 NR Description: DAG protein -related [Arabidopsis thaliana]
  misc_feature (21)..(226): Homolog of NCBI NO: 27754695 NR Description: putative DAG protein [Arabidopsis thaliana]
  misc_feature (20)..(247): Homolog of NCBI NO: 21593052 NR Description: DAG protein, putative [Arabidopsis thaliana]
  misc_feature (97)..(409): Homolog of NCBI NO: 18400602 NR Description: expressed protein [Arabidopsis thaliana]
  misc_feature (21)..(394): Homolog of NCBI NO: 15241580 NR Description: expressed protein [Arabidopsis thaliana]
  misc_feature (249)..(419): Homolog of NCBI NO: 19310564 NR Description: putative DAG protein [Arabidopsis thaliana]
  misc_feature (21)..(439): Homolog of NCBI NO: 15235263 NR Description: putative DAG protein [Arabidopsis thaliana]

SEQ ID NO: 46806 - protein, 419 aa, Arabidopsis thaliana; identical to SEQ ID NO: 37051
  peptide (1)..(419): Ceres Seq. ID no. 13600837
  misc_feature (191)..(399): Pfam Name: High molecular weight glutenin subunit Pfam Description: High molecular weight glutenin subunit
  misc_feature (191)..(399): Pfam Name: High molecular weight glutenin subunit Pfam Description: High molecular weight glutenin subunit
  misc_feature (1)..(206): Homolog of NCBI NO: 15230785 NR Description: DAG protein -related [Arabidopsis thaliana]
  misc_feature (1)..(206): Homolog of NCBI NO: 27754695 NR Description: putative DAG protein [Arabidopsis thaliana]
  misc_feature (1)..(199): Homolog of NCBI NO: 6014904 NR Description: DAG PROTEIN, CHLOROPLAST PRECURSOR
  misc_feature (1)..(227): Homolog of NCBI NO: 15220382 NR Description: DAG protein -related [Arabidopsis thaliana]
  misc_feature (24)..(210): Homolog of NCBI NO: 38636775 NR Description: putative DAG protein [Oryza sativa (japonica
  misc_feature (1)..(206): Homolog of NCBI NO: 15230785 NR Description: DAG protein -related [Arabidopsis thaliana]
  misc_feature (1)..(199): Homolog of NCBI NO: 6014904 NR Description: DAG PROTEIN, CHLOROPLAST PRECURSOR
  misc_feature (24)..(210): Homolog of NCBI NO: 38636775 NR Description: putative DAG protein [Oryza sativa (japonica
  misc_feature (1)..(419): Homolog of NCBI NO: 15235263 NR Description: putative DAG protein [Arabidopsis thaliana]
  misc_feature (229)..(399): Homolog of NCBI NO: 19310564 NR Description: putative DAG protein [Arabidopsis thaliana]
  misc_feature (1)..(374): Homolog of NCBI NO: 15241580 NR Description: expressed protein [Arabidopsis thaliana]
  misc_feature (77)..(389): Homolog of NCBI NO: 18400602 NR Description: expressed protein [Arabidopsis thaliana]
  misc_feature (1)..(227): Homolog of NCBI NO: 21593052 NR Description: DAG protein, putative [Arabidopsis thaliana]
  misc_feature (1)..(227): Homolog of NCBI NO: 15220382 NR Description: DAG protein -related [Arabidopsis thaliana]
  misc_feature (1)..(206): Homolog of NCBI NO: 27754695 NR Description: putative DAG protein [Arabidopsis thaliana]
  misc_feature (1)..(227): Homolog of NCBI NO: 21593052 NR Description: DAG protein, putative [Arabidopsis thaliana]
  misc_feature (77)..(389): Homolog of NCBI NO: 18400602 NR Description: expressed protein [Arabidopsis thaliana]
  misc_feature (1)..(374): Homolog of NCBI NO: 15241580 NR Description: expressed protein [Arabidopsis thaliana]
  misc_feature (229)..(399): Homolog of NCBI NO: 19310564 NR Description: putative DAG protein [Arabidopsis thaliana]
  misc_feature (1)..(419): Homolog of NCBI NO: 15235263 NR Description: putative DAG protein [Arabidopsis thaliana]

SEQ ID NO: 46807 - protein, 417 aa, Arabidopsis thaliana; identical to SEQ ID NO: 37052
  peptide (1)..(417): Ceres Seq. ID no. 13600838
  misc_feature (189)..(397): Pfam Name: High molecular weight glutenin subunit Pfam Description: High molecular weight glutenin subunit
  misc_feature (189)..(397): Pfam Name: High molecular weight glutenin subunit Pfam Description: High molecular weight glutenin subunit
  misc_feature (1)..(204): Homolog of NCBI NO: 15230785 NR Description: DAG protein -related [Arabidopsis thaliana]
  misc_feature (1)..(204): Homolog of NCBI NO: 27754695 NR Description: putative DAG protein [Arabidopsis thaliana]
  misc_feature (1)..(197): Homolog of NCBI NO: 6014904 NR Description: DAG PROTEIN, CHLOROPLAST PRECURSOR
  misc_feature (1)..(225): Homolog of NCBI NO: 15220382 NR Description: DAG protein -related [Arabidopsis thaliana]
  misc_feature (22)..(208): Homolog of NCBI NO: 38636775 NR Description: putative DAG protein [Oryza sativa (japonica
  misc_feature (1)..(204): Homolog of NCBI NO: 15230785 NR Description: DAG protein -related [Arabidopsis thaliana]
  misc_feature (1)..(197): Homolog of NCBI NO: 6014904 NR Description: DAG PROTEIN, CHLOROPLAST PRECURSOR
  misc_feature (22)..(208): Homolog of NCBI NO: 38636775 NR Description: putative DAG protein [Oryza sativa (japonica
  misc_feature (1)..(417): Homolog of NCBI NO: 15235263 NR Description: putative DAG protein [Arabidopsis thaliana]
  misc_feature (227)..(397): Homolog of NCBI NO: 19310564 NR Description: putative DAG protein [Arabidopsis thaliana]
  misc_feature (1)..(372): Homolog of NCBI NO: 15241580 NR Description: expressed protein [Arabidopsis thaliana]
  misc_feature (75)..(387): Homolog of NCBI NO: 18400602 NR Description: expressed protein [Arabidopsis thaliana]
  misc_feature (1)..(225): Homolog of NCBI NO: 21593052 NR Description: DAG protein, putative [Arabidopsis thaliana]
  misc_feature (1)..(225): Homolog of NCBI NO: 15220382 NR Description: DAG protein -related [Arabidopsis thaliana]
  misc_feature (1)..(204): Homolog of NCBI NO: 27754695 NR Description: putative DAG protein [Arabidopsis thaliana]
  misc_feature (1)..(225): Homolog of NCBI NO: 21593052 NR Description: DAG protein, putative [Arabidopsis thaliana]
  misc_feature (75)..(387): Homolog of NCBI NO: 18400602 NR Description: expressed protein [Arabidopsis thaliana]
  misc_feature (1)..(372): Homolog of NCBI NO: 15241580 NR Description: expressed protein [Arabidopsis thaliana]
  misc_feature (227)..(397): Homolog of NCBI NO: 19310564 NR Description: putative DAG protein [Arabidopsis thaliana]
  misc_feature (1)..(417): Homolog of NCBI NO: 15235263 NR Description: putative DAG protein [Arabidopsis thaliana]

SEQ ID NO: 46808 - DNA, 1731 bp, Arabidopsis thaliana
  misc_feature (1)..(1731): Ceres Seq. ID no. 12604559
  misc_feature: MA Experiment ID: 20000185 Result: Down-regulated in Transcription
  misc_feature: MA Experiment 20000185 PARAMETER Experiment Name: At_Roots__P Parameter: Age (day) Value: 7 vs. 21
  misc_feature: MA Experiment 20000185 PARAMETER Experiment Name: At_Roots__P Parameter: Organism Value: A. thaliana
  misc_feature: MA Experiment 20000185 PARAMETER Experiment Name: At_Roots__P Parameter: Tissue Value: Roots vs. Whole Plant
  misc_feature: MA Experiment ID: 20000437 Result: Down-regulated in Transcription
  misc_feature: MA Experiment 20000437 PARAMETER Experiment Name: At_Drought_P Parameter: Age (day) Value: 8
  misc_feature: MA Experiment 20000437 PARAMETER Experiment Name: At_Drought_P Parameter: Organism Value: A. thaliana
  misc_feature: MA Experiment 20000437 PARAMETER Experiment Name: At_Drought_P Parameter: Plant Line Value: WS
  misc_feature: MA Experiment 20000437 PARAMETER Experiment Name: At_Drought_P Parameter: Timepoint (hr) Value: 24
  misc_feature: MA Experiment 20000437 PARAMETER Experiment Name: At_Drought_P Parameter: Tissue Value: Whole Plant
  misc_feature: MA Experiment 20000437 PARAMETER Experiment Name: At_Drought_P Parameter: Treatment Value: Drought vs. No Drought
  misc_feature: MA Experiment ID: 20000438 Result: Up-regulated in Transcription
  misc_feature: MA Experiment 20000438 PARAMETER Experiment Name: At_Shoots__P Parameter: Age (day) Value: 14
  misc_feature: MA Experiment 20000438 PARAMETER Experiment Name: At_Shoots__P Parameter: Tissue Value: Shoots vs. Whole Plant
  misc_feature: MA Experiment ID: 20000439 Result: Down-regulated in Transcription
  misc_feature: MA Experiment 20000439 PARAMETER Experiment Name: At_Roots__P Parameter: Age (day) Value: 14 vs. 21
  misc_feature: MA Experiment 20000439 PARAMETER Experiment Name: At_Roots__P Parameter: Organism Value: A. thaliana
  misc_feature: MA Experiment 20000439 PARAMETER Experiment Name: At_Roots__P Parameter: Tissue Value: Roots vs. Whole Plant
  misc_feature: MA Experiment ID: 20000451 Result: Up-regulated in Transcription
  misc_feature: MA Experiment 20000451 PARAMETER Experiment Name: At_CS6879_Shoots-Roots_P Parameter: Age (day) Value: 14
  misc_feature: MA Experiment 20000451 PARAMETER Experiment Name: At_CS6879_Shoots-Roots_P Parameter: Organism Value: A. thaliana
  misc_feature: MA Experiment 20000451 PARAMETER Experiment Name: At_CS6879_Shoots-Roots_P Parameter: Plant Line Value: CS6879 vs. WS
  misc_feature: MA Experiment 20000451 PARAMETER Experiment Name: At_CS6879_Shoots-Roots_P Parameter: Tissue Value: Roots
  misc_feature: MA Experiment ID: 20000452 Result: Up-regulated in Transcription
  misc_feature: MA Experiment 20000452 PARAMETER Experiment Name: At_CS6879_Shoots-Roots_P Parameter: Age (day) Value: 14
  misc_feature: MA Experiment 20000452 PARAMETER Experiment Name: At_CS6879_Shoots-Roots_P Parameter: Organism Value: A. thaliana
  misc_feature: MA Experiment 20000452 PARAMETER Experiment Name: At_CS6879_Shoots-Roots_P Parameter: Plant Line Value: CS6879 vs. WS
  misc_feature: MA Experiment 20000452 PARAMETER Experiment Name: At_CS6879_Shoots-Roots_P Parameter: Tissue Value: Shoots
  misc_feature: MA Experiment ID: 20000794 Result: Down-regulated in Transcription
  misc_feature: MA Experiment 20000794 PARAMETER Experiment Name: At_Petals_P Parameter: Age (day) Value: 23-25 days
  misc_feature: MA Experiment 20000794 PARAMETER Experiment Name: At_Petals_P Parameter: Plant Line Value: WS
  misc_feature: MA Experiment 20000794 PARAMETER Experiment Name: At_Petals_P Parameter: Tissue Value: Petals vs. Whole plant
  misc_feature: MA Experiment ID: 20001248 Result: Down-regulated in Transcription
  misc_feature: MA Experiment 20001248 PARAMETER Experiment Name: At_Far-red-induction_P Parameter: Age (day) Value: 7
  misc_feature: MA Experiment 20001248 PARAMETER Experiment Name: At_Far-red-induction_P Parameter: Light Value: Far-red vs. White
  misc_feature: MA Experiment 20001248 PARAMETER Experiment Name: At_Far-red-induction_P Parameter: Organism Value: A. thaliana
  misc_feature: MA Experiment 20001248 PARAMETER Experiment Name: At_Far-red-induction_P Parameter: Plant Line Value: Columbia
  misc_feature: MA Experiment 20001248 PARAMETER Experiment Name: At_Far-red-induction_P Parameter: Timepoint (hr) Value: 4
  misc_feature: MA Experiment 20001248 PARAMETER Experiment Name: At_Far-red-induction_P Parameter: Tissue Value: Whole Plant
  misc_feature: MA Experiment ID: 20001458 Result: Up-regulated in Transcription
  misc_feature: MA Experiment 20001458 PARAMETER Experiment Name: At_50mM_NH4NO3_L-to-H_P Parameter: Age (day) Value: Undefined
  misc_feature: MA Experiment 20001458 PARAMETER Experiment Name: At_50mM_NH4NO3_L-to-H_P Parameter: Organism Value: Undefined
  misc_feature: MA Experiment 20001458 PARAMETER Experiment Name: At_50mM_NH4NO3_L-to-H_P Parameter: Plant Line Value: Undefined
  misc_feature: MA Experiment 20001458 PARAMETER Experiment Name: At_50mM_NH4NO3_L-to-H_P Parameter: Timepoint (hr) Value: 2
  misc_feature: MA Experiment 20001458 PARAMETER Experiment Name: At_50mM_NH4NO3_L-to-H_P Parameter: Tissue Value: Siliques
  misc_feature: MA Experiment 20001458 PARAMETER Experiment Name: At_50mM_NH4NO3_L-to-H_P Parameter: Treatment Value: 50mM NH4NO3 vs. 100mM Manitol
  misc_feature: MA Experiment ID: 20001756 Result: Up-regulated in Transcription
  misc_feature: MA Experiment 20001756 PARAMETER Experiment Name: At_50mM_NH4NO3_L-to-H_P Parameter: Timepoint (hr) Value: 4
  misc_feature: MA Experiment 20001756 PARAMETER Experiment Name: At_50mM_NH4NO3_L-to-H_P Parameter: Tissue Value: Leaf
  misc_feature: MA Experiment 20001756 PARAMETER Experiment Name: At_50mM_NH4NO3_L-to-H_P Parameter: Treatment Value: 50mM NH4NO3 vs 100mM Mannitol
  misc_feature: MA Experiment ID: 20001757 Result: Up-regulated in Transcription
  misc_feature: MA Experiment 20001757 PARAMETER Experiment Name: At_50mM_NH4NO3_L-to-H_P Parameter: Timepoint (hr) Value: 6
  misc_feature: MA Experiment 20001757 PARAMETER Experiment Name: At_50mM_NH4NO3_L-to-H_P Parameter: Tissue Value: Leaf
  misc_feature: MA Experiment 20001757 PARAMETER Experiment Name: At_50mM_NH4NO3_L-to-H_P Parameter: Treatment Value: 50mM NH4NO3 vs 100mM Mannitol
  misc_feature: MA Experiment ID: 20001904 Result: Down-regulated in Transcription
  misc_feature: MA Experiment 20001904 PARAMETER Experiment Name: At_Drought_Reproduction_P Parameter: Age (day) Value: 37
  misc_feature: MA Experiment 20001904 PARAMETER Experiment Name: At_Drought_Reproduction_P Parameter: Organism Value: A. thaliana
  misc_feature: MA Experiment 20001904 PARAMETER Experiment Name: At_Drought_Reproduction_P Parameter: Plant Line Value: WS
  misc_feature: MA Experiment 20001904 PARAMETER Experiment Name: At_Drought_Reproduction_P Parameter: Timepoint (day) Value: 7
  misc_feature: MA Experiment 20001904 PARAMETER Experiment Name: At_Drought_Reproduction_P Parameter: Tissue Value: Rosettes
  misc_feature: MA Experiment 20001904 PARAMETER Experiment Name: At_Drought_Reproduction_P Parameter: Treatment Value: Drought vs. No Drought
  misc_feature: MA Experiment ID: 20001905 Result: Down-regulated in Transcription
  misc_feature: MA Experiment 20001905 PARAMETER Experiment Name: At_Drought_Reproduction_P Parameter: Age (day) Value: 40
  misc_feature: MA Experiment 20001905 PARAMETER Experiment Name: At_Drought_Reproduction_P Parameter: Organism Value: A. thaliana
  misc_feature: MA Experiment 20001905 PARAMETER Experiment Name: At_Drought_Reproduction_P Parameter: Plant Line Value: WS
  misc_feature: MA Experiment 20001905 PARAMETER Experiment Name: At_Drought_Reproduction_P Parameter: Timepoint (day) Value: 10
  misc_feature: MA Experiment 20001905 PARAMETER Experiment Name: At_Drought_Reproduction_P Parameter: Tissue Value: Rosettes
  misc_feature: MA Experiment 20001905 PARAMETER Experiment Name: At_Drought_Reproduction_P Parameter: Treatment Value: Drought vs. No Drought
  misc_feature: MA Experiment ID: 20001906 Result: Down-regulated in Transcription
  misc_feature: MA Experiment 20001906 PARAMETER Experiment Name: At_Drought_Reproduction_P Parameter: Age (day) Value: 35
  misc_feature: MA Experiment 20001906 PARAMETER Experiment Name: At_Drought_Reproduction_P Parameter: Organism Value: A. thaliana
  misc_feature: MA Experiment 20001906 PARAMETER Experiment Name: At_Drought_Reproduction_P Parameter: Plant Line Value: WS
  misc_feature: MA Experiment 20001906 PARAMETER Experiment Name: At_Drought_Reproduction_P Parameter: Timepoint (day) Value: 5
  misc_feature: MA Experiment 20001906 PARAMETER Experiment Name: At_Drought_Reproduction_P Parameter: Tissue Value: Siliques
  misc_feature: MA Experiment 20001906 PARAMETER Experiment Name: At_Drought_Reproduction_P Parameter: Treatment Value: Drought vs. No Drought
  misc_feature: MA Experiment ID: 20001908 Result: Down-regulated in Transcription
  misc_feature: MA Experiment 20001908 PARAMETER Experiment Name: At_Drought_Reproduction_P Parameter: Age (day) Value: 40
  misc_feature: MA Experiment 20001908 PARAMETER Experiment Name: At_Drought_Reproduction_P Parameter: Organism Value: A. thaliana
  misc_feature: MA Experiment 20001908 PARAMETER Experiment Name: At_Drought_Reproduction_P Parameter: Plant Line Value: WS
  misc_feature: MA Experiment 20001908 PARAMETER Experiment Name: At_Drought_Reproduction_P Parameter: Timepoint (day) Value: 10
  misc_feature: MA Experiment 20001908 PARAMETER Experiment Name: At_Drought_Reproduction_P Parameter: Tissue Value: Siliques
  misc_feature: MA Experiment 20001908 PARAMETER Experiment Name: At_Drought_Reproduction_P Parameter: Treatment Value: Drought vs. No Drought
ctcttttatcttcccctctcttcaaacccttcaagagacaatctttcctgcgaaaatggtggtctctgctgactgcagaatctccctctctgcccctagctgcatacgtagtagctccacgggattgactaggcacattaagcttggcagcttctgcaatggtgagctcatggggaagaagctcaacttgtctcagcttccaaacattcgtcttcgatcttctactaacttctctcagaagagaattttaatgtctctaaatagtgtagctggggagagtaaggtacaagaacttgagactgagaaaagggatccaaggacagttgcttccattattcttggaggtggagcaggaactcgactctttcctctcacaaaacgccgcgccaagcctgccgttcctatcgggggagcctataggttgatagatgtaccaatgagcaattgtattaacagcggaatcaacaaagtctacatactcacacaatataactcagcatcattgaacaggcatttagcccgtgcttacaactccaatggacttggctttggagatggctatgttgaggttcttgcggccactcaaacgccaggagaatctggtaaaaggtggttccaaggtacagcagatgcggttcggcaattccattggcttttcgaggatgcaagaagcaaggacatagaggatgtattgatcctttctggagatcacctctacaggatggattacatggattttatacaggatcatcggcagagtggcgcggatataagcatttcctgcataccaatagatgacagacgtgcctcagattttgggcttatgaagatagatgacaaaggaagagttatctcattcagtgaaaaacctaaaggagacgacctgaaagcaatggcagtagacacaactattttaggactttccaaggaggaagctgaaaagaaaccatacatagcttcaatgggagtttatgttttcaaaaaagaaatactgttaaatctcttgagatggcgtttccccacagcaaacgactttggttcagagattatacccttctcagctaaagaattctatgtgaatgcttatctctttaatgactactgggaagatataggaacaataagatctttcttcgaggcgaatcttgcactcactgagcatcctggggcatttagtttctacgacgcggcaaaaccaatatatacatcaaggagaaacctgccaccatcaaaaatagacaactctaagctcatcgattcaatcatttctcatggaagcttcttaaccaactgcttgattgagcatagcattgtgggaattagatcaagagtaggcagtaatgttcagttgaaggacactgtgatgcttggggcagattactacgaaactgaagcagaagttgcagcactacttgctgagggaaacgttcccattggaataggagagaacacaaaaattcaagaatgcataatagacaagaatgctagagttggaaagaatgtaatcatcgcaaactcggagggaatacaagaagcagataggtcatccgatggattttacatcagatctggcattactgtaatcttgaagaactcagtaattaaagatggagttgtgatatgatacttttaagatctaattgtaagaactgagaactaaaaaatgcagagcataaaagtcaacaataaattacaaagaaatttatttgatagtgatgacacttcacatat

SEQ ID NO: 46809 - protein, 540 aa, Arabidopsis thaliana
  peptide (1)..(540): Ceres Seq. ID no. 12604560
  misc_feature (109)..(387): Pfam Name: Nucleotidyl transferase Pfam Description: Nucleotidyl transferase
  misc_feature (35)..(540): Homolog of NCBI NO: 13487785 NR Description: ADP-glucose pyrophosphorylase large subunit
  misc_feature (64)..(540): Homolog of NCBI NO: 15217670 NR Description: ADP-glucose pyrophosphorylase, putative
  misc_feature (62)..(540): Homolog of NCBI NO: 7434870 NR Description: glucose-1-phosphate adenylyltransferase (EC
  misc_feature (85)..(540): Homolog of NCBI NO: 7434885 NR Description: glucose-1-phosphate adenylyltransferase (EC
  misc_feature (27)..(540): Homolog of NCBI NO: 22347636 NR Description: ADP-glucose pyrophosphorylase large subunit
  misc_feature (57)..(540): Homolog of NCBI NO: 1707932 NR Description: Glucose-1-phosphate adenylyltransferase large
  misc_feature (19)..(540): Homolog of NCBI NO: 7434883 NR Description: glucose-1-phosphate adenylyltransferase (EC
  misc_feature (19)..(540): Homolog of NCBI NO: 13487783 NR Description: ADP-glucose pyrophosphorylase [Cicer arietinum]
  misc_feature (19)..(540): Homolog of NCBI NO: 4586350 NR Description: glucose-1-phosphate adenylyltransferase
  misc_feature (19)..(540): Homolog of NCBI NO: 15239684 NR Description: Glucose-1-phosphate adenylyltransferase
SFIFPSLQTLQETIFPAKMVVSADCRISLSAPSCIRSSSTGLTRHIKLGSFCNGELMGKKLNLSQLPNIRLRSSTNFSQKRILMSLNSVAGESKVQELETEKRDPRTVASIILGGGAGTRLFPLTKRRAKPAVPIGGAYRLIDVPMSNCINSGINKVYILTQYNSASLNRHLARAYNSNGLGFGDGYVEVLAATQTPGESGKRWFQGTADAVRQFHWLFEDARSKDIEDVLILSGDHLYRMDYMDFIQDHRQSGADISISCIPIDDRRASDFGLMKIDDKGRVISFSEKPKGDDLKAMAVDTTILGLSKEEAEKKPYIASMGVYVFKKEILLNLLRWRFPTANDFGSEIIPFSAKEFYVNAYLFNDYWEDIGTIRSFFEANLALTEHPGAFSFYDAAKPIYTSRRNLPPSKIDNSKLIDSIISHGSFLTNCLIEHSIVGIRSRVGSNVQLKDTVMLGADYYETEAEVAALLAEGNVPIGIGENTKIQECIIDKNARVGKNVIIANSEGIQEADRSSDGFYIRSGITVILKNSVIKDGVVI

SEQ ID NO: 46810 - protein, 522 aa, Arabidopsis thaliana
  peptide (1)..(522): Ceres Seq. ID no. 12604561
  misc_feature (91)..(369): Pfam Name: Nucleotidyl transferase Pfam Description: Nucleotidyl transferase
  misc_feature (17)..(522): Homolog of NCBI NO: 13487785 NR Description: ADP-glucose pyrophosphorylase large subunit
  misc_feature (46)..(522): Homolog of NCBI NO: 15217670 NR Description: ADP-glucose pyrophosphorylase, putative
  misc_feature (44)..(522): Homolog of NCBI NO: 7434870 NR Description: glucose-1-phosphate adenylyltransferase (EC
  misc_feature (67)..(522): Homolog of NCBI NO: 7434885 NR Description: glucose-1-phosphate adenylyltransferase (EC
  misc_feature (9)..(522): Homolog of NCBI NO: 22347636 NR Description: ADP-glucose pyrophosphorylase large subunit
  misc_feature (39)..(522): Homolog of NCBI NO: 1707932 NR Description: Glucose-1-phosphate adenylyltransferase large
  misc_feature (1)..(522): Homolog of NCBI NO: 7434883 NR Description: glucose-1-phosphate adenylyltransferase (EC
  misc_feature (1)..(522): Homolog of NCBI NO: 13487783 NR Description: ADP-glucose pyrophosphorylase [Cicer arietinum]
  misc_feature (1)..(522): Homolog of NCBI NO: 4586350 NR Description: glucose-1-phosphate adenylyltransferase
  misc_feature (1)..(522): Homolog of NCBI NO: 15239684 NR Description: Glucose-1-phosphate adenylyltransferase
MVVSADCRISLSAPSCIRSSSTGLTRHIKLGSFCNGELMGKKLNLSQLPNIRLRSSTNFSQKRILMSLNSVAGESKVQELETEKRDPRTVASIILGGGAGTRLFPLTKRRAKPAVPIGGAYRLIDVPMSNCINSGINKVYILTQYNSASLNRHLARAYNSNGLGFGDGYVEVLAATQTPGESGKRWFQGTADAVRQFHWLFEDARSKDIEDVLILSGDHLYRMDYMDFIQDHRQSGADISISCIPIDDRRASDFGLMKIDDKGRVISFSEKPKGDDLKAMAVDTTILGLSKEEAEKKPYIASMGVYVFKKEILLNLLRWRFPTANDFGSEIIPFSAKEFYVNAYLFNDYWEDIGTIRSFFEANLALTEHPGAFSFYDAAKPIYTSRRNLPPSKIDNSKLIDSIISHGSFLTNCLIEHSIVGIRSRVGSNVQLKDTVMLGADYYETEAEVAALLAEGNVPIGIGENTKIQECIIDKNARVGKNVIIANSEGIQEADRSSDGFYIRSGITVILKNSVIKDGVVI

SEQ ID NO: 46811 - protein, 484 aa, Arabidopsis thaliana
  peptide (1)..(484): Ceres Seq. ID no. 12604562
  misc_feature (53)..(331): Pfam Name: Nucleotidyl transferase Pfam Description: Nucleotidyl transferase
  misc_feature (1)..(484): Homolog of NCBI NO: 13487785 NR Description: ADP-glucose pyrophosphorylase large subunit
  misc_feature (8)..(484): Homolog of NCBI NO: 15217670 NR Description: ADP-glucose pyrophosphorylase, putative
  misc_feature (6)..(484): Homolog of NCBI NO: 7434870 NR Description: glucose-1-phosphate adenylyltransferase (EC
  misc_feature (29)..(484): Homolog of NCBI NO: 7434885 NR Description: glucose-1-phosphate adenylyltransferase (EC
  misc_feature (1)..(484): Homolog of NCBI NO: 22347636 NR Description: ADP-glucose pyrophosphorylase large subunit
  misc_feature (1)..(484): Homolog of NCBI NO: 1707932 NR Description: Glucose-1-phosphate adenylyltransferase large
  misc_feature (1)..(484): Homolog of NCBI NO: 7434883 NR Description: glucose-1-phosphate adenylyltransferase (EC
  misc_feature (1)..(484): Homolog of NCBI NO: 13487783 NR Description: ADP-glucose pyrophosphorylase [Cicer arietinum]
  misc_feature (1)..(484): Homolog of NCBI NO: 4586350 NR Description: glucose-1-phosphate adenylyltransferase
  misc_feature (1)..(484): Homolog of NCBI NO: 15239684 NR Description: Glucose-1-phosphate adenylyltransferase
MGKKLNLSQLPNIRLRSSTNFSQKRILMSLNSVAGESKVQELETEKRDPRTVASIILGGGAGTRLFPLTKRRAKPAVPIGGAYRLIDVPMSNCINSGINKVYILTQYNSASLNRHLARAYNSNGLGFGDGYVEVLAATQTPGESGKRWFQGTADAVRQFHWLFEDARSKDIEDVLILSGDHLYRMDYMDFIQDHRQSGADISISCIPIDDRRASDFGLMKIDDKGRVISFSEKPKGDDLKAMAVDTTILGLSKEEAEKKPYIASMGVYVFKKEILLNLLRWRFPTANDFGSEIIPFSAKEFYVNAYLFNDYWEDIGTIRSFFEANLALTEHPGAFSFYDAAKPIYTSRRNLPPSKIDNSKLIDSIISHGSFLTNCLIEHSIVGIRSRVGSNVQLKDTVMLGADYYETEAEVAALLAEGNVPIGIGENTKIQECIIDKNARVGKNVIIANSEGIQEADRSSDGFYIRSGITVILKNSVIKDGVVI

SEQ ID NO: 46812 - DNA, 924 bp, Arabidopsis thaliana
  misc_feature (1)..(924): Ceres Seq. ID no. 13646862
  misc_feature: MA Experiment ID: 20000182 Result: Up-regulated in Transcription
  misc_feature: MA Experiment 20000182 PARAMETER Experiment Name: At_2mM_SA_P Parameter: Age (day) Value: 14
  misc_feature: MA Experiment 20000182 PARAMETER Experiment Name: At_2mM_SA_P Parameter: Organism Value: A. thaliana
  misc_feature: MA Experiment 20000182 PARAMETER Experiment Name: At_2mM_SA_P Parameter: Plant Line Value: WS
  misc_feature: MA Experiment 20000182 PARAMETER Experiment Name: At_2mM_SA_P Parameter: Timepoint (hr) Value: 6
  misc_feature: MA Experiment 20000182 PARAMETER Experiment Name: At_2mM_SA_P Parameter: Tissue Value: Aerial
  misc_feature: MA Experiment 20000182 PARAMETER Experiment Name: At_2mM_SA_P Parameter: Treatment Value: 2mM SA vs. No Treatment
  misc_feature: MA Experiment ID: 20000184 Result: Down-regulated in Transcription
  misc_feature: MA Experiment 20000184 PARAMETER Experiment Name: At_Shoots__P Parameter: Age (day) Value: 7
  misc_feature: MA Experiment 20000184 PARAMETER Experiment Name: At_Shoots__P Parameter: Tissue Value: Shoots vs. Whole Plant
  misc_feature: MA Experiment ID: 20000185 Result: Down-regulated in Transcription
  misc_feature: MA Experiment 20000185 PARAMETER Experiment Name: At_Roots__P Parameter: Age (day) Value: 7 vs. 21
  misc_feature: MA Experiment 20000185 PARAMETER Experiment Name: At_Roots__P Parameter: Organism Value: A. thaliana
  misc_feature: MA Experiment 20000185 PARAMETER Experiment Name: At_Roots__P Parameter: Tissue Value: Roots vs. Whole Plant
  misc_feature: MA Experiment ID: 20000234 Result: Down-regulated in Transcription
  misc_feature: MA Experiment 20000234 PARAMETER Experiment Name: At_Siliques_P Parameter: Age (day) Value: 21
  misc_feature: MA Experiment 20000234 PARAMETER Experiment Name: At_Siliques_P Parameter: Organism Value: A. thaliana
  misc_feature: MA Experiment 20000234 PARAMETER Experiment Name: At_Siliques_P Parameter: Plant Line Value: WS
  misc_feature: MA Experiment 20000234 PARAMETER Experiment Name: At_Siliques_P Parameter: Tissue Value: Less Than 5mm Siliques vs. Whole Plant
  misc_feature: MA Experiment ID: 20000235 Result: Down-regulated in Transcription
  misc_feature: MA Experiment 20000235 PARAMETER Experiment Name: At_Siliques_P Parameter: Age (day) Value: 21
  misc_feature: MA Experiment 20000235 PARAMETER Experiment Name: At_Siliques_P Parameter: Organism Value: A. thaliana
  misc_feature: MA Experiment 20000235 PARAMETER Experiment Name: At_Siliques_P Parameter: Plant Line Value: WS
  misc_feature: MA Experiment 20000235 PARAMETER Experiment Name: At_Siliques_P Parameter: Tissue Value: 5-10mm Siliques vs. Whole Plant
  misc_feature: MA Experiment ID: 20000264 Result: Down-regulated in Transcription
  misc_feature: MA Experiment 20000264 PARAMETER Experiment Name: At_Open_Flower_P Parameter: Age (day) Value: 21
  misc_feature: MA Experiment 20000264 PARAMETER Experiment Name: At_Open_Flower_P Parameter: Plant Line Value: WS
  misc_feature: MA Experiment 20000264 PARAMETER Experiment Name: At_Open_Flower_P Parameter: Tissue Value: Open Flower vs. Whole Plant
  misc_feature: MA Experiment ID: 20000286 Result: Down-regulated in Transcription
  misc_feature: MA Experiment 20000286 PARAMETER Experiment Name: At_Open_Flower_P Parameter: Age (day) Value: 21
  misc_feature: MA Experiment 20000286 PARAMETER Experiment Name: At_Open_Flower_P Parameter: Plant Line Value: WS
  misc_feature: MA Experiment 20000286 PARAMETER Experiment Name: At_Open_Flower_P Parameter: Tissue Value: Half Open vs. Whole Plant
  misc_feature: MA Experiment ID: 20000436 Result: Down-regulated in Transcription
  misc_feature: MA Experiment 20000436 PARAMETER Experiment Name: At_Drought_P Parameter: Age (day) Value: 7
  misc_feature: MA Experiment 20000436 PARAMETER Experiment Name: At_Drought_P Parameter: Organism Value: A. thaliana
  misc_feature: MA Experiment 20000436 PARAMETER Experiment Name: At_Drought_P Parameter: Plant Line Value: WS
  misc_feature: MA Experiment 20000436 PARAMETER Experiment Name: At_Drought_P Parameter: Timepoint (hr) Value: 12
  misc_feature: MA Experiment 20000436 PARAMETER Experiment Name: At_Drought_P Parameter: Tissue Value: Whole Plant
  misc_feature: MA Experiment 20000436 PARAMETER Experiment Name: At_Drought_P Parameter: Treatment Value: Drought vs. No Drought
  misc_feature: MA Experiment ID: 20000437 Result: Down-regulated in Transcription
  misc_feature: MA Experiment 20000437 PARAMETER Experiment Name: At_Drought_P Parameter: Age (day) Value: 8
  misc_feature: MA Experiment 20000437 PARAMETER Experiment Name: At_Drought_P Parameter: Organism Value: A. thaliana
  misc_feature: MA Experiment 20000437 PARAMETER Experiment Name: At_Drought_P Parameter: Plant Line Value: WS
  misc_feature: MA Experiment 20000437 PARAMETER Experiment Name: At_Drought_P Parameter: Timepoint (hr) Value: 24
  misc_feature: MA Experiment 20000437 PARAMETER Experiment Name: At_Drought_P Parameter: Tissue Value: Whole Plant
  misc_feature: MA Experiment 20000437 PARAMETER Experiment Name: At_Drought_P Parameter: Treatment Value: Drought vs. No Drought
  misc_feature: MA Experiment ID: 20000438 Result: Down-regulated in Transcription
  misc_feature: MA Experiment 20000438 PARAMETER Experiment Name: At_Shoots__P Parameter: Age (day) Value: 14
  misc_feature: MA Experiment 20000438 PARAMETER Experiment Name: At_Shoots__P Parameter: Tissue Value: Shoots vs. Whole Plant
  misc_feature: MA Experiment ID: 20000439 Result: Down-regulated in Transcription
  misc_feature: MA Experiment 20000439 PARAMETER Experiment Name: At_Roots__P Parameter: Age (day) Value: 14 vs. 21
  misc_feature: MA Experiment 20000439 PARAMETER Experiment Name: At_Roots__P Parameter: Organism Value: A. thaliana
  misc_feature: MA Experiment 20000439 PARAMETER Experiment Name: At_Roots__P Parameter: Tissue Value: Roots vs. Whole Plant
  misc_feature: MA Experiment ID: 20000709 Result: Up-regulated in Transcription
  misc_feature: MA Experiment 20000709 PARAMETER Experiment Name: At_15mM_NH4NO3_L-to-H_P Parameter: Age (hr) Value: 14
  misc_feature: MA Experiment 20000709 PARAMETER Experiment Name: At_15mM_NH4NO3_L-to-H_P Parameter: Organism Value: A. thaliana
  misc_feature: MA Experiment 20000709 PARAMETER Experiment Name: At_15mM_NH4NO3_L-to-H_P Parameter: Plant Line Value: WS
  misc_feature: MA Experiment 20000709 PARAMETER Experiment Name: At_15mM_NH4NO3_L-to-H_P Parameter: Timepoint (hr) Value: 4
  misc_feature: MA Experiment 20000709 PARAMETER Experiment Name: At_15mM_NH4NO3_L-to-H_P Parameter: Tissue Value: Aerial
  misc_feature: MA Experiment 20000709 PARAMETER Experiment Name: At_15mM_NH4NO3_L-to-H_P Parameter: Treatment Value: 15mM NH4NO3 vs. 30mM Mannitol
  misc_feature: MA Experiment ID: 20000794 Result: Down-regulated in Transcription
  misc_feature: MA Experiment 20000794 PARAMETER Experiment Name: At_Petals_P Parameter: Age (day) Value: 23-25 days
  misc_feature: MA Experiment 20000794 PARAMETER Experiment Name: At_Petals_P Parameter: Plant Line Value: WS
  misc_feature: MA Experiment 20000794 PARAMETER Experiment Name: At_Petals_P Parameter: Tissue Value: Petals vs. Whole plant
  misc_feature: MA Experiment ID: 20001554 Result: Down-regulated in Transcription
  misc_feature: MA Experiment 20001554 PARAMETER Experiment Name: At_Drought_Soil_Dry_P Parameter: Age (day) Value: 21
  misc_feature: MA Experiment 20001554 PARAMETER Experiment Name: At_Drought_Soil_Dry_P Parameter: Organism Value: A. thaliana
  misc_feature: MA Experiment 20001554 PARAMETER Experiment Name: At_Drought_Soil_Dry_P Parameter: Plant Line Value: WS
  misc_feature: MA Experiment 20001554 PARAMETER Experiment Name: At_Drought_Soil_Dry_P Parameter: Post Timepoint (hr) Value: None
  misc_feature: MA Experiment 20001554 PARAMETER Experiment Name: At_Drought_Soil_Dry_P Parameter: Post-Treatment Value: None
  misc_feature: MA Experiment 20001554 PARAMETER Experiment Name: At_Drought_Soil_Dry_P Parameter: Timepoint (day) Value: 7
  misc_feature: MA Experiment 20001554 PARAMETER Experiment Name: At_Drought_Soil_Dry_P Parameter: Treatment Value: Drought vs. No Drought
  misc_feature: MA Experiment ID: 20001555 Result: Down-regulated in Transcription
  misc_feature: MA Experiment 20001555 PARAMETER Experiment Name: At_Drought_Soil_Dry_P Parameter: Age (day) Value: 24
  misc_feature: MA Experiment 20001555 PARAMETER Experiment Name: At_Drought_Soil_Dry_P Parameter: Organism Value: A. thaliana
  misc_feature: MA Experiment 20001555 PARAMETER Experiment Name: At_Drought_Soil_Dry_P Parameter: Plant Line Value: WS
  misc_feature: MA Experiment 20001555 PARAMETER Experiment Name: At_Drought_Soil_Dry_P Parameter: Post Timepoint (hr) Value: None
  misc_feature: MA Experiment 20001555 PARAMETER Experiment Name: At_Drought_Soil_Dry_P Parameter: Post-Treatment Value: None
  misc_feature: MA Experiment 20001555 PARAMETER Experiment Name: At_Drought_Soil_Dry_P Parameter: Timepoint (day) Value: 10
  misc_feature: MA Experiment 20001555 PARAMETER Experiment Name: At_Drought_Soil_Dry_P Parameter: Treatment Value: Drought vs. No Drought
  misc_feature: MA Experiment ID: 20001557 Result: Down-regulated in Transcription
  misc_feature: MA Experiment 20001557 PARAMETER Experiment Name: At_Drought_Soil_Dry_P Parameter: Age (day) Value: 27
  misc_feature: MA Experiment 20001557 PARAMETER Experiment Name: At_Drought_Soil_Dry_P Parameter: Organism Value: A. thaliana
  misc_feature: MA Experiment 20001557 PARAMETER Experiment Name: At_Drought_Soil_Dry_P Parameter: Plant Line Value: WS
  misc_feature: MA Experiment 20001557 PARAMETER Experiment Name: At_Drought_Soil_Dry_P Parameter: Post Timepoint (hr) Value: 3
  misc_feature: MA Experiment 20001557 PARAMETER Experiment Name: At_Drought_Soil_Dry_P Parameter: Post-Treatment Value: Re-Water vs. No Drought
  misc_feature: MA Experiment 20001557 PARAMETER Experiment Name: At_Drought_Soil_Dry_P Parameter: Timepoint (day) Value: 13
  misc_feature: MA Experiment 20001557 PARAMETER Experiment Name: At_Drought_Soil_Dry_P Parameter: Treatment Value: Drought vs. No Drought
  misc_feature: MA Experiment ID: 20001757 Result: Up-regulated in Transcription
  misc_feature: MA Experiment 20001757 PARAMETER Experiment Name: At_50mM_NH4NO3_L-to-H_P Parameter: Timepoint (hr) Value: 6
  misc_feature: MA Experiment 20001757 PARAMETER Experiment Name: At_50mM_NH4NO3_L-to-H_P Parameter: Tissue Value: Leaf
  misc_feature: MA Experiment 20001757 PARAMETER Experiment Name: At_50mM_NH4NO3_L-to-H_P Parameter: Treatment Value: 50mM NH4NO3 vs 100mM Mannitol
  misc_feature: MA Experiment ID: 20001904 Result: Down-regulated in Transcription
  misc_feature: MA Experiment 20001904 PARAMETER Experiment Name: At_Drought_Reproduction_P Parameter: Age (day) Value: 37
  misc_feature: MA Experiment 20001904 PARAMETER Experiment Name: At_Drought_Reproduction_P Parameter: Organism Value: A. thaliana
  misc_feature: MA Experiment 20001904 PARAMETER Experiment Name: At_Drought_Reproduction_P Parameter: Plant Line Value: WS
  misc_feature: MA Experiment 20001904 PARAMETER Experiment Name: At_Drought_Reproduction_P Parameter: Timepoint (day) Value: 7
  misc_feature: MA Experiment 20001904 PARAMETER Experiment Name: At_Drought_Reproduction_P Parameter: Tissue Value: Rosettes
  misc_feature: MA Experiment 20001904 PARAMETER Experiment Name: At_Drought_Reproduction_P Parameter: Treatment Value: Drought vs. No Drought
tcccatttcctccgactctgtctctacccacttccttccttctcccactactctctcactaaccgattcatcatgggcgagaagaagaacgaaggagataacaagaagaaaggaggagataacaagaagaagaacgaaacgccttccatcaccgtcgttttgaaggtcgacatgcattgtgaaggttgtgcttctcgaatcgtcaaatgtgttcgatctttccaaggtgttgagactgtgaaatcggagtcggctacagggaaacttacggtgaccggagcattagatccggtgaagttaagggagaaacttgaagagaagacaaagaagaaagtcgatttggtttctcctcaaccaaaaaaggaaaaagagaaagagaacaaaaacaaaaacgatgaagacaaaaaaaaatcagaggagaagaagaaaccagacaacaatgacaaaaaacccaaagagactccggtaacaacggcggtgttgaagctgaacttccattgtcaaggttgtatcgggaaaatccaaaagactgtcacaaaaaccaaaggtgttaatggtttaacaatggacaaagagaagaatttgctgacggttaaaggaacaatggatgttaaaaagctcgttgagattttgagtgagaagctcaaacgtgcggtggagattgtgccgccgaagaaagagaaagataaagagaatggtaacgaaaatggcgagaagaagaaaggtggcggcggagacggtggtgggaaagagaaaaccggtaacaaaggcggtggtgagggagtgaatatgatggagtacatggcggctcagccagcttacggttatgggtattacccgggtgggccttatggatatccgattcaggcccacgcgccgcagatttttagcgatgagaatccgaatgcttgtgttgttatgtga

SEQ ID NO: 46813 - protein, 307 aa, Arabidopsis thaliana
  peptide (1)..(307): Ceres Seq. ID no. 13646863
  misc_feature (286)..(307): Homolog of NCBI NO: 37534752 NR Description: putative metal-binding protein
  misc_feature (29)..(261): Homolog of NCBI NO: 37534752 NR Description: putative metal-binding protein
  misc_feature (27)..(306): Homolog of NCBI NO: 37532382 NR Description: putative ATFP3 [Oryza sativa (japonica
  misc_feature (58)..(260): Homolog of NCBI NO: 25408515 NR Description: probable farnesylated protein [imported] -
  misc_feature (100)..(261): Homolog of NCBI NO: 27529838 NR Description: hypothetical protein [Nicotiana tabacum]
  misc_feature (31)..(260): Homolog of NCBI NO: 18404283 NR Description: heavy-metal-associated domain-containing protein
  misc_feature (272)..(307): Homolog of NCBI NO: 38344582 NR Description: OSJNBa0053B21.14 [Oryza sativa (japonica
  misc_feature (27)..(260): Homolog of NCBI NO: 38344582 NR Description: OSJNBa0053B21.14 [Oryza sativa (japonica
  misc_feature (42)..(242): Homolog of NCBI NO: 15226333 NR Description: heavy-metal-associated domain-containing protein
  misc_feature (25)..(307): Homolog of NCBI NO: 22327990 NR Description: heavy-metal-associated domain-containing protein
SHFLRLCLYPLPSFSHYSLTNRFIMGEKKNEGDNKKKGGDNKKKNETPSITVVLKVDMHCEGCASRIVKCVRSFQGVETVKSESATGKLTVTGALDPVKLREKLEEKTKKKVDLVSPQPKKEKEKENKNKNDEDKKKSEEKKKPDNNDKKPKETPVTTAVLKLNFHCQGCIGKIQKTVTKTKGVNGLTMDKEKNLLTVKGTMDVKKLVEILSEKLKRAVEIVPPKKEKDKENGNENGEKKKGGGGDGGGKEKTGNKGGGEGVNMMEYMAAQPAYGYGYYPGGPYGYPIQAHAPQIFSDENPNACVVM

SEQ ID NO: 46814 - protein, 283 aa, Arabidopsis thaliana
  peptide (1)..(283): Ceres Seq. ID no. 13646864
  misc_feature (262)..(283): Homolog of NCBI NO: 37534752 NR Description: putative metal-binding protein
  misc_feature (5)..(237): Homolog of NCBI NO: 37534752 NR Description: putative metal-binding protein
  misc_feature (3)..(282): Homolog of NCBI NO: 37532382 NR Description: putative ATFP3 [Oryza sativa (japonica
  misc_feature (34)..(236): Homolog of NCBI NO: 25408515 NR Description: probable farnesylated protein [imported] -
  misc_feature (76)..(237): Homolog of NCBI NO: 27529838 NR Description: hypothetical protein [Nicotiana tabacum]
  misc_feature (7)..(236): Homolog of NCBI NO: 18404283 NR Description: heavy-metal-associated domain-containing protein
  misc_feature (248)..(283): Homolog of NCBI NO: 38344582 NR Description: OSJNBa0053B21.14 [Oryza sativa (japonica
  misc_feature (3)..(236): Homolog of NCBI NO: 38344582 NR Description: OSJNBa0053B21.14 [Oryza sativa (japonica
  misc_feature (18)..(218): Homolog of NCBI NO: 15226333 NR Description: heavy-metal-associated domain-containing protein
  misc_feature (1)..(283): Homolog of NCBI NO: 22327990 NR Description: heavy-metal-associated domain-containing protein
MGEKKNEGDNKKKGGDNKKKNETPSITVVLKVDMHCEGCASRIVKCVRSFQGVETVKSESATGKLTVTGALDPVKLREKLEEKTKKKVDLVSPQPKKEKEKENKNKNDEDKKKSEEKKKPDNNDKKPKETPVTTAVLKLNFHCQGCIGKIQKTVTKTKGVNGLTMDKEKNLLTVKGTMDVKKLVEILSEKLKRAVEIVPPKKEKDKENGNENGEKKKGGGGDGGGKEKTGNKGGGEGVNMMEYMAAQPAYGYGYYPGGPYGYPIQAHAPQIFSDENPNACVVM

SEQ ID NO: 46815 - protein, 250 aa, Arabidopsis thaliana
  peptide (1)..(250): Ceres Seq. ID no. 13646865
  misc_feature (229)..(250): Homolog of NCBI NO: 37534752 NR Description: putative metal-binding protein
  misc_feature (1)..(204): Homolog of NCBI NO: 37534752 NR Description: putative metal-binding protein
  misc_feature (1)..(249): Homolog of NCBI NO: 37532382 NR Description: putative ATFP3 [Oryza sativa (japonica
  misc_feature (1)..(203): Homolog of NCBI NO: 25408515 NR Description: probable farnesylated protein [imported] -
  misc_feature (43)..(204): Homolog of NCBI NO: 27529838 NR Description: hypothetical protein [Nicotiana tabacum]
  misc_feature (1)..(203): Homolog of NCBI NO: 18404283 NR Description: heavy-metal-associated domain-containing protein
  misc_feature (215)..(250): Homolog of NCBI NO: 38344582 NR Description: OSJNBa0053B21.14 [Oryza sativa (japonica
  misc_feature (1)..(203): Homolog of NCBI NO: 38344582 NR Description: OSJNBa0053B21.14 [Oryza sativa (japonica
  misc_feature (1)..(185): Homolog of NCBI NO: 15226333 NR Description: heavy-metal-associated domain-containing protein
  misc_feature (1)..(250): Homolog of NCBI NO: 22327990 NR Description: heavy-metal-associated domain-containing protein
MHCEGCASRIVKCVRSFQGVETVKSESATGKLTVTGALDPVKLREKLEEKTKKKVDLVSPQPKKEKEKENKNKNDEDKKKSEEKKKPDNNDKKPKETPVTTAVLKLNFHCQGCIGKIQKTVTKTKGVNGLTMDKEKNLLTVKGTMDVKKLVEILSEKLKRAVEIVPPKKEKDKENGNENGEKKKGGGGDGGGKEKTGNKGGGEGVNMMEYMAAQPAYGYGYYPGGPYGYPIQAHAPQIFSDENPNACVVM

SEQ ID NO: 46816 - DNA, 1117 bp, Arabidopsis thaliana
  misc_feature (1)..(1117): Ceres Seq. ID no. 12601085
  misc_feature: MA Experiment ID: 20000173 Result: Up-regulated in Transcription
  misc_feature: MA Experiment 20000173 PARAMETER Experiment Name: At_42deg_Heat_P Parameter: Age (day) Value: 14
  misc_feature: MA Experiment 20000173 PARAMETER Experiment Name: At_42deg_Heat_P Parameter: Organism Value: A. thaliana
  misc_feature: MA Experiment 20000173 PARAMETER Experiment Name: At_42deg_Heat_P Parameter: Plant Line Value: WS
  misc_feature: MA Experiment 20000173 PARAMETER Experiment Name: At_42deg_Heat_P Parameter: Temperature (deg C) Value: 42 vs. 22
  misc_feature: MA Experiment 20000173 PARAMETER Experiment Name: At_42deg_Heat_P Parameter: Timepoint (hr) Value: 6
  misc_feature: MA Experiment 20000173 PARAMETER Experiment Name: At_42deg_Heat_P Parameter: Tissue Value: Aerial
  misc_feature: MA Experiment ID: 20000180 Result: Up-regulated in Transcription
  misc_feature: MA Experiment 20000180 PARAMETER Experiment Name: At_Germinating_Seeds_P Parameter: Age (hr) Value: 24 vs. 0
  misc_feature: MA Experiment 20000180 PARAMETER Experiment Name: At_Germinating_Seeds_P Parameter: Tissue Value: Germinating Seeds
  misc_feature: MA Experiment ID: 20000184 Result: Up-regulated in Transcription
  misc_feature: MA Experiment 20000184 PARAMETER Experiment Name: At_Shoots__P Parameter: Age (day) Value: 7
  misc_feature: MA Experiment 20000184 PARAMETER Experiment Name: At_Shoots__P Parameter: Tissue Value: Shoots vs. Whole Plant
  misc_feature: MA Experiment ID: 20000185 Result: Down-regulated in Transcription
  misc_feature: MA Experiment 20000185 PARAMETER Experiment Name: At_Roots__P Parameter: Age (day) Value: 7 vs. 21
  misc_feature: MA Experiment 20000185 PARAMETER Experiment Name: At_Roots__P Parameter: Organism Value: A. thaliana
  misc_feature: MA Experiment 20000185 PARAMETER Experiment Name: At_Roots__P Parameter: Tissue Value: Roots vs. Whole Plant
  misc_feature: MA Experiment ID: 20000264 Result: Down-regulated in Transcription
  misc_feature: MA Experiment 20000264 PARAMETER Experiment Name: At_Open_Flower_P Parameter: Age (day) Value: 21
  misc_feature: MA Experiment 20000264 PARAMETER Experiment Name: At_Open_Flower_P Parameter: Plant Line Value: WS
  misc_feature: MA Experiment 20000264 PARAMETER Experiment Name: At_Open_Flower_P Parameter: Tissue Value: Open Flower vs. Whole Plant
  misc_feature: MA Experiment ID: 20000265 Result: Down-regulated in Transcription
  misc_feature: MA Experiment 20000265 PARAMETER Experiment Name: At_Open_Flower_P Parameter: Age (day) Value: 21
  misc_feature: MA Experiment 20000265 PARAMETER Experiment Name: At_Open_Flower_P Parameter: Plant Line Value: WS
  misc_feature: MA Experiment 20000265 PARAMETER Experiment Name: At_Open_Flower_P Parameter: Tissue Value: Closed Flower vs. Whole Plant
  misc_feature: MA Experiment ID: 20000286 Result: Down-regulated in Transcription
  misc_feature: MA Experiment 20000286 PARAMETER Experiment Name: At_Open_Flower_P Parameter: Age (day) Value: 21
  misc_feature: MA Experiment 20000286 PARAMETER Experiment Name: At_Open_Flower_P Parameter: Plant Line Value: WS
  misc_feature: MA Experiment 20000286 PARAMETER Experiment Name: At_Open_Flower_P Parameter: Tissue Value: Half Open vs. Whole Plant
  misc_feature: MA Experiment ID: 20000436 Result: Down-regulated in Transcription
  misc_feature: MA Experiment 20000436 PARAMETER Experiment Name: At_Drought_P Parameter: Age (day) Value: 7
  misc_feature: MA Experiment 20000436 PARAMETER Experiment Name: At_Drought_P Parameter: Organism Value: A. thaliana
  misc_feature: MA Experiment 20000436 PARAMETER Experiment Name: At_Drought_P Parameter: Plant Line Value: WS
  misc_feature: MA Experiment 20000436 PARAMETER Experiment Name: At_Drought_P Parameter: Timepoint (hr) Value: 12
  misc_feature: MA Experiment 20000436 PARAMETER Experiment Name: At_Drought_P Parameter: Tissue Value: Whole Plant
  misc_feature: MA Experiment 20000436 PARAMETER Experiment Name: At_Drought_P Parameter: Treatment Value: Drought vs. No Drought
  misc_feature: MA Experiment ID: 20000437 Result: Down-regulated in Transcription
  misc_feature: MA Experiment 20000437 PARAMETER Experiment Name: At_Drought_P Parameter: Age (day) Value: 8
  misc_feature: MA Experiment 20000437 PARAMETER Experiment Name: At_Drought_P Parameter: Organism Value: A. thaliana
  misc_feature: MA Experiment 20000437 PARAMETER Experiment Name: At_Drought_P Parameter: Plant Line Value: WS
  misc_feature: MA Experiment 20000437 PARAMETER Experiment Name: At_Drought_P Parameter: Timepoint (hr) Value: 24
  misc_feature: MA Experiment 20000437 PARAMETER Experiment Name: At_Drought_P Parameter: Tissue Value: Whole Plant
  misc_feature: MA Experiment 20000437 PARAMETER Experiment Name: At_Drought_P Parameter: Treatment Value: Drought vs. No Drought
  misc_feature: MA Experiment ID: 20000438 Result: Up-regulated in Transcription
  misc_feature: MA Experiment 20000438 PARAMETER Experiment Name: At_Shoots__P Parameter: Age (day) Value: 14
  misc_feature: MA Experiment 20000438 PARAMETER Experiment Name: At_Shoots__P Parameter: Tissue Value: Shoots vs. Whole Plant
  misc_feature: MA Experiment ID: 20000439 Result: Down-regulated in Transcription
  misc_feature: MA Experiment 20000439 PARAMETER Experiment Name: At_Roots__P Parameter: Age (day) Value: 14 vs. 21
  misc_feature: MA Experiment 20000439 PARAMETER Experiment Name: At_Roots__P Parameter: Organism Value: A. thaliana
  misc_feature: MA Experiment 20000439 PARAMETER Experiment Name: At_Roots__P Parameter: Tissue Value: Roots vs. Whole Plant
  misc_feature: MA Experiment ID: 20000527 Result: Up-regulated in Transcription
  misc_feature: MA Experiment 20000527 PARAMETER Experiment Name: At_10percent_PEG_P Parameter: Age (day) Value: 20
  misc_feature: MA Experiment 20000527 PARAMETER Experiment Name: At_10percent_PEG_P Parameter: Organism Value: A. thaliana
  misc_feature: MA Experiment 20000527 PARAMETER Experiment Name: At_10percent_PEG_P Parameter: Plant Line Value: WS
  misc_feature: MA Experiment 20000527 PARAMETER Experiment Name: At_10percent_PEG_P Parameter: Timepoint (day) Value: 20
  misc_feature: MA Experiment 20000527 PARAMETER Experiment Name: At_10percent_PEG_P Parameter: Tissue Value: Whole Plant
  misc_feature: MA Experiment 20000527 PARAMETER Experiment Name: At_10percent_PEG_P Parameter: Treatment Value: 10percent PEG vs. No Treatment
  misc_feature: MA Experiment ID: 20000709 Result: Up-regulated in Transcription
  misc_feature: MA Experiment 20000709 PARAMETER Experiment Name: At_15mM_NH4NO3_L-to-H_P Parameter: Age (hr) Value: 14
  misc_feature: MA Experiment 20000709 PARAMETER Experiment Name: At_15mM_NH4NO3_L-to-H_P Parameter: Organism Value: A. thaliana
  misc_feature: MA Experiment 20000709 PARAMETER Experiment Name: At_15mM_NH4NO3_L-to-H_P Parameter: Plant Line Value: WS
  misc_feature: MA Experiment 20000709 PARAMETER Experiment Name: At_15mM_NH4NO3_L-to-H_P Parameter: Timepoint (hr) Value: 4
  misc_feature: MA Experiment 20000709 PARAMETER Experiment Name: At_15mM_NH4NO3_L-to-H_P Parameter: Tissue Value: Aerial
  misc_feature: MA Experiment 20000709 PARAMETER Experiment Name: At_15mM_NH4NO3_L-to-H_P Parameter: Treatment Value: 15mM NH4NO3 vs. 30mM Mannitol
  misc_feature: MA Experiment ID: 20000794 Result: Down-regulated in Transcription
  misc_feature: MA Experiment 20000794 PARAMETER Experiment Name: At_Petals_P Parameter: Age (day) Value: 23-25 days
  misc_feature: MA Experiment 20000794 PARAMETER Experiment Name: At_Petals_P Parameter: Plant Line Value: WS
  misc_feature: MA Experiment 20000794 PARAMETER Experiment Name: At_Petals_P Parameter: Tissue Value: Petals vs. Whole plant
  misc_feature: MA Experiment ID: 20001557 Result: Down-regulated in Transcription
  misc_feature: MA Experiment 20001557 PARAMETER Experiment Name: At_Drought_Soil_Dry_P Parameter: Age (day) Value: 27
  misc_feature: MA Experiment 20001557 PARAMETER Experiment Name: At_Drought_Soil_Dry_P Parameter: Organism Value: A. thaliana
  misc_feature: MA Experiment 20001557 PARAMETER Experiment Name: At_Drought_Soil_Dry_P Parameter: Plant Line Value: WS
  misc_feature: MA Experiment 20001557 PARAMETER Experiment Name: At_Drought_Soil_Dry_P Parameter: Post Timepoint (hr) Value: 3
  misc_feature: MA Experiment 20001557 PARAMETER Experiment Name: At_Drought_Soil_Dry_P Parameter: Post-Treatment Value: Re-Water vs. No Drought
  misc_feature: MA Experiment 20001557 PARAMETER Experiment Name: At_Drought_Soil_Dry_P Parameter: Timepoint (day) Value: 13
  misc_feature: MA Experiment 20001557 PARAMETER Experiment Name: At_Drought_Soil_Dry_P Parameter: Treatment Value: Drought vs. No Drought
  misc_feature: MA Experiment ID: 20001559 Result: Down-regulated in Transcription
  misc_feature: MA Experiment 20001559 PARAMETER Experiment Name: At_Drought_Soil_Dry_P Parameter: Age (day) Value: 28
  misc_feature: MA Experiment 20001559 PARAMETER Experiment Name: At_Drought_Soil_Dry_P Parameter: Organism Value: A. thaliana
  misc_feature: MA Experiment 20001559 PARAMETER Experiment Name: At_Drought_Soil_Dry_P Parameter: Plant Line Value: WS
  misc_feature: MA Experiment 20001559 PARAMETER Experiment Name: At_Drought_Soil_Dry_P Parameter: Post Timepoint (hr) Value: 29
  misc_feature: MA Experiment 20001559 PARAMETER Experiment Name: At_Drought_Soil_Dry_P Parameter: Post-Treatment Value: Re-Water vs. No Drought
  misc_feature: MA Experiment 20001559 PARAMETER Experiment Name: At_Drought_Soil_Dry_P Parameter: Timepoint (day) Value: 14
  misc_feature: MA Experiment 20001559 PARAMETER Experiment Name: At_Drought_Soil_Dry_P Parameter: Treatment Value: Drought vs. No Drought
  misc_feature: MA Experiment ID: 20001757 Result: Up-regulated in Transcription
  misc_feature: MA Experiment 20001757 PARAMETER Experiment Name: At_50mM_NH4NO3_L-to-H_P Parameter: Timepoint (hr) Value: 6
  misc_feature: MA Experiment 20001757 PARAMETER Experiment Name: At_50mM_NH4NO3_L-to-H_P Parameter: Tissue Value: Leaf
  misc_feature: MA Experiment 20001757 PARAMETER Experiment Name: At_50mM_NH4NO3_L-to-H_P Parameter: Treatment Value: 50mM NH4NO3 vs 100mM Mannitol
  misc_feature: MA Experiment ID: 20001904 Result: Down-regulated in Transcription
  misc_feature: MA Experiment 20001904 PARAMETER Experiment Name: At_Drought_Reproduction_P Parameter: Age (day) Value: 37
  misc_feature: MA Experiment 20001904 PARAMETER Experiment Name: At_Drought_Reproduction_P Parameter: Organism Value: A. thaliana
  misc_feature: MA Experiment 20001904 PARAMETER Experiment Name: At_Drought_Reproduction_P Parameter: Plant Line Value: WS
  misc_feature: MA Experiment 20001904 PARAMETER Experiment Name: At_Drought_Reproduction_P Parameter: Timepoint (day) Value: 7
  misc_feature: MA Experiment 20001904 PARAMETER Experiment Name: At_Drought_Reproduction_P Parameter: Tissue Value: Rosettes
  misc_feature: MA Experiment 20001904 PARAMETER Experiment Name: At_Drought_Reproduction_P Parameter: Treatment Value: Drought vs. No Drought
  misc_feature: MA Experiment ID: 20001905 Result: Down-regulated in Transcription
  misc_feature: MA Experiment 20001905 PARAMETER Experiment Name: At_Drought_Reproduction_P Parameter: Age (day) Value: 40
  misc_feature: MA Experiment 20001905 PARAMETER Experiment Name: At_Drought_Reproduction_P Parameter: Organism Value: A. thaliana
  misc_feature: MA Experiment 20001905 PARAMETER Experiment Name: At_Drought_Reproduction_P Parameter: Plant Line Value: WS
  misc_feature: MA Experiment 20001905 PARAMETER Experiment Name: At_Drought_Reproduction_P Parameter: Timepoint (day) Value: 10
  misc_feature: MA Experiment 20001905 PARAMETER Experiment Name: At_Drought_Reproduction_P Parameter: Tissue Value: Rosettes
  misc_feature: MA Experiment 20001905 PARAMETER Experiment Name: At_Drought_Reproduction_P Parameter: Treatment Value: Drought vs. No Drought
  misc_feature: MA Experiment ID: 20001906 Result: Down-regulated in Transcription
  misc_feature: MA Experiment 20001906 PARAMETER Experiment Name: At_Drought_Reproduction_P Parameter: Age (day) Value: 35
  misc_feature: MA Experiment 20001906 PARAMETER Experiment Name: At_Drought_Reproduction_P Parameter: Organism Value: A. thaliana
  misc_feature: MA Experiment 20001906 PARAMETER Experiment Name: At_Drought_Reproduction_P Parameter: Plant Line Value: WS
  misc_feature: MA Experiment 20001906 PARAMETER Experiment Name: At_Drought_Reproduction_P Parameter: Timepoint (day) Value: 5
  misc_feature: MA Experiment 20001906 PARAMETER Experiment Name: At_Drought_Reproduction_P Parameter: Tissue Value: Siliques
  misc_feature: MA Experiment 20001906 PARAMETER Experiment Name: At_Drought_Reproduction_P Parameter: Treatment Value: Drought vs. No Drought
  misc_feature: MA Experiment ID: 20001908 Result: Down-regulated in Transcription
  misc_feature: MA Experiment 20001908 PARAMETER Experiment Name: At_Drought_Reproduction_P Parameter: Age (day) Value: 40
  misc_feature: MA Experiment 20001908 PARAMETER Experiment Name: At_Drought_Reproduction_P Parameter: Organism Value: A. thaliana
  misc_feature: MA Experiment 20001908 PARAMETER Experiment Name: At_Drought_Reproduction_P Parameter: Plant Line Value: WS
  misc_feature: MA Experiment 20001908 PARAMETER Experiment Name: At_Drought_Reproduction_P Parameter: Timepoint (day) Value: 10
  misc_feature: MA Experiment 20001908 PARAMETER Experiment Name: At_Drought_Reproduction_P Parameter: Tissue Value: Siliques
  misc_feature: MA Experiment 20001908 PARAMETER Experiment Name: At_Drought_Reproduction_P Parameter: Treatment Value: Drought vs. No Drought
gtttgtagtataaatatccttctcttcgtccctctcatcgcctgtctctcctcttcctcttcccgttccatttatccgcaaacggagcttgttttcggtgcacctgcttcagccacttcaaacttgaactgagaaggatgggaaacgaatcatatgaagacgccatcgaagctctcaagaagcttctcattgagaaggatgatctgaaggatgtagctgcggccaaggtgaagaagatcacggcggagcttcaggcagcctcgtcatcggacagcaaatcttttgatcccgtcgaacgaattaaggaaggcttcgtcaccttcaagaaggagaaatacgagaccaatcctgctttgtatggtgagctcgccaaaggtcaaagcccaaagtacatggtgtttgcttgttcggactcacgagtgtgcccatcacacgtactagacttccatcctggagatgccttcgtggttcgtaatatcgccaatatggttcctccttttgacaaggtcaaatatgcaggagttggagccgccattgaatacgctgtcttgcaccttaaggtggaaaacattgtggtgatagggcacagtgcatgtggtggcatcaaggggcttatgtcatttcctcttgacggaaacaactctactgacttcatagaggattgggtcaaaatctgtttaccagcaaagtcaaaagttttggcagaaagtgaaagttcagcatttgaagaccaatgtggccgatgcgaaagggaggcagtgaatgtgtcactagcaaacctattgacatatccatttgtgagagaaggagttgtgaaaggaacacttgctttgaagggaggctactatgactttgttaatggctcctttgagctttgggagctccagtttggaatttcccccgttcattctatatgaactaacacatcaccatcaccatcgctaccaccaccatcacaaacatcatcatcgtcgtcatcatcatgatcagcatcttcatatataaatgttttactcttatttaattgctacttgtaatggtatacatttacttgcgatgagcttcttttccttcattatccagttataaaataaataaataaatcatgtttactttc

SEQ ID NO: 46817 - protein, 259 aa, Arabidopsis thaliana
  peptide (1)..(259): Ceres Seq. ID no. 12601086
  misc_feature (1)..(259): Homolog of NCBI NO: 4754915 NR Description: carbonic anhydrase isoform 2 [Gossypium hirsutum]
  misc_feature (1)..(259): Homolog of NCBI NO: 4754913 NR Description: carbonic anhydrase isoform 1 [Gossypium hirsutum]
  misc_feature (1)..(259): Homolog of NCBI NO: 7436819 NR Description: carbonate dehydratase (EC 4.2.1.1) 1a - Populus
  misc_feature (1)..(259): Homolog of NCBI NO: 7436820 NR Description: carbonate dehydratase (EC 4.2.1.1) 1b - Populus
  misc_feature (1)..(259): Homolog of NCBI NO: 30678353 NR Description: carbonic anhydrase, chloroplast precursor
  misc_feature (1)..(259): Homolog of NCBI NO: 30678350 NR Description: carbonic anhydrase, chloroplast precursor
  misc_feature (1)..(259): Homolog of NCBI NO: 30678347 NR Description: carbonic anhydrase, chloroplast precursor
  misc_feature (1)..(259): Homolog of NCBI NO: 438449 NR Description: carbonic anhydrase
  misc_feature (1)..(259): Homolog of NCBI NO: 21903379 NR Description: Carbonic anhydrase 2 (Carbonate dehydratase 2)
  misc_feature (1)..(259): Homolog of NCBI NO: 30685030 NR Description: CARBONIC ANHYDRASE 2 [Arabidopsis thaliana]
  misc_feature (1)..(259): Homolog of NCBI NO: 4754915 NR Description: carbonic anhydrase isoform 2 [Gossypium hirsutum]
  misc_feature (1)..(259): Homolog of NCBI NO: 4754913 NR Description: carbonic anhydrase isoform 1 [Gossypium hirsutum]
  misc_feature (1)..(259): Homolog of NCBI NO: 7436819 NR Description: carbonate dehydratase (EC 4.2.1.1) 1a - Populus
  misc_feature (1)..(259): Homolog of NCBI NO: 7436820 NR Description: carbonate dehydratase (EC 4.2.1.1) 1b - Populus
  misc_feature (1)..(259): Homolog of NCBI NO: 30678353 NR Description: carbonic anhydrase, chloroplast precursor
  misc_feature (1)..(259): Homolog of NCBI NO: 30678350 NR Description: carbonic anhydrase, chloroplast precursor
  misc_feature (1)..(259): Homolog of NCBI NO: 30678347 NR Description: carbonic anhydrase, chloroplast precursor
  misc_feature (1)..(259): Homolog of NCBI NO: 438449 NR Description: carbonic anhydrase
  misc_feature (1)..(259): Homolog of NCBI NO: 21903379 NR Description: Carbonic anhydrase 2 (Carbonate dehydratase 2)
  misc_feature (1)..(259): Homolog of NCBI NO: 30685030 NR Description: CARBONIC ANHYDRASE 2 [Arabidopsis thaliana]
MGNESYEDAIEALKKLLIEKDDLKDVAAAKVKKITAELQAASSSDSKSFDPVERIKEGFVTFKKEKYETNPALYGELAKGQSPKYMVFACSDSRVCPSHVLDFHPGDAFVVRNIANMVPPFDKVKYAGVGAAIEYAVLHLKVENIVVIGHSACGGIKGLMSFPLDGNNSTDFIEDWVKICLPAKSKVLAESESSAFEDQCGRCEREAVNVSLANLLTYPFVREGVVKGTLALKGGYYDFVNGSFELWELQFGISPVHSI

SEQ ID NO: 46818 - protein, 174 aa, Arabidopsis thaliana
  peptide (1)..(174): Ceres Seq. ID no. 12601087
  misc_feature (1)..(174): Homolog of NCBI NO: 20502881 NR Description: carbonic anhydrase [Gossypium hirsutum]
  misc_feature (1)..(174): Homolog of NCBI NO: 4754913 NR Description: carbonic anhydrase isoform 1 [Gossypium hirsutum]
  misc_feature (1)..(174): Homolog of NCBI NO: 7436819 NR Description: carbonate dehydratase (EC 4.2.1.1) 1a - Populus
  misc_feature (1)..(174): Homolog of NCBI NO: 7436820 NR Description: carbonate dehydratase (EC 4.2.1.1) 1b - Populus
  misc_feature (1)..(174): Homolog of NCBI NO: 30678350 NR Description: carbonic anhydrase, chloroplast precursor
  misc_feature (1)..(174): Homolog of NCBI NO: 30678353 NR Description: carbonic anhydrase, chloroplast precursor
  misc_feature (1)..(174): Homolog of NCBI NO: 30678347 NR Description: carbonic anhydrase, chloroplast precursor
  misc_feature (1)..(174): Homolog of NCBI NO: 438449 NR Description: carbonic anhydrase
  misc_feature (1)..(174): Homolog of NCBI NO: 21903379 NR Description: Carbonic anhydrase 2 (Carbonate dehydratase 2)
  misc_feature (1)..(174): Homolog of NCBI NO: 30685030 NR Description: CARBONIC ANHYDRASE 2 [Arabidopsis thaliana]
  misc_feature (1)..(174): Homolog of NCBI NO: 20502881 NR Description: carbonic anhydrase [Gossypium hirsutum]
  misc_feature (1)..(174): Homolog of NCBI NO: 4754913 NR Description: carbonic anhydrase isoform 1 [Gossypium hirsutum]
  misc_feature (1)..(174): Homolog of NCBI NO: 7436819 NR Description: carbonate dehydratase (EC 4.2.1.1) 1a - Populus
  misc_feature (1)..(174): Homolog of NCBI NO: 7436820 NR Description: carbonate dehydratase (EC 4.2.1.1) 1b - Populus
  misc_feature (1)..(174): Homolog of NCBI NO: 30678350 NR Description: carbonic anhydrase, chloroplast precursor
  misc_feature (1)..(174): Homolog of NCBI NO: 30678353 NR Description: carbonic anhydrase, chloroplast precursor
  misc_feature (1)..(174): Homolog of NCBI NO: 30678347 NR Description: carbonic anhydrase, chloroplast precursor
  misc_feature (1)..(174): Homolog of NCBI NO: 438449 NR Description: carbonic anhydrase
  misc_feature (1)..(174): Homolog of NCBI NO: 21903379 NR Description: Carbonic anhydrase 2 (Carbonate dehydratase 2)
  misc_feature (1)..(174): Homolog of NCBI NO: 30685030 NR Description: CARBONIC ANHYDRASE 2 [Arabidopsis thaliana]
MVFACSDSRVCPSHVLDFHPGDAFVVRNIANMVPPFDKVKYAGVGAAIEYAVLHLKVENIVVIGHSACGGIKGLMSFPLDGNNSTDFIEDWVKICLPAKSKVLAESESSAFEDQCGRCEREAVNVSLANLLTYPFVREGVVKGTLALKGGYYDFVNGSFELWELQFGISPVHSI

SEQ ID NO: 46819 - protein, 143 aa, Arabidopsis thaliana
  peptide (1)..(143): Ceres Seq. ID no. 12601088
  misc_feature (1)..(143): Homolog of NCBI NO: 20502881 NR Description: carbonic anhydrase [Gossypium hirsutum]
  misc_feature (1)..(143): Homolog of NCBI NO: 4754913 NR Description: carbonic anhydrase isoform 1 [Gossypium hirsutum]
  misc_feature (1)..(143): Homolog of NCBI NO: 7436819 NR Description: carbonate dehydratase (EC 4.2.1.1) 1a - Populus
  misc_feature (1)..(143): Homolog of NCBI NO: 7436820 NR Description: carbonate dehydratase (EC 4.2.1.1) 1b - Populus
  misc_feature (1)..(143): Homolog of NCBI NO: 30678350 NR Description: carbonic anhydrase, chloroplast precursor
  misc_feature (1)..(143): Homolog of NCBI NO: 30678353 NR Description: carbonic anhydrase, chloroplast precursor
  misc_feature (1)..(143): Homolog of NCBI NO: 30678347 NR Description: carbonic anhydrase, chloroplast precursor
  misc_feature (1)..(143): Homolog of NCBI NO: 438449 NR Description: carbonic anhydrase
  misc_feature (1)..(143): Homolog of NCBI NO: 21903379 NR Description: Carbonic anhydrase 2 (Carbonate dehydratase 2)
  misc_feature (1)..(143): Homolog of NCBI NO: 30685030 NR Description: CARBONIC ANHYDRASE 2 [Arabidopsis thaliana]
  misc_feature (1)..(143): Homolog of NCBI NO: 20502881 NR Description: carbonic anhydrase [Gossypium hirsutum]
  misc_feature (1)..(143): Homolog of NCBI NO: 4754913 NR Description: carbonic anhydrase isoform 1 [Gossypium hirsutum]
  misc_feature (1)..(143): Homolog of NCBI NO: 7436819 NR Description: carbonate dehydratase (EC 4.2.1.1) 1a - Populus
  misc_feature (1)..(143): Homolog of NCBI NO: 7436820 NR Description: carbonate dehydratase (EC 4.2.1.1) 1b - Populus
  misc_feature (1)..(143): Homolog of NCBI NO: 30678350 NR Description: carbonic anhydrase, chloroplast precursor
  misc_feature (1)..(143): Homolog of NCBI NO: 30678353 NR Description: carbonic anhydrase, chloroplast precursor
  misc_feature (1)..(143): Homolog of NCBI NO: 30678347 NR Description: carbonic anhydrase, chloroplast precursor
  misc_feature (1)..(143): Homolog of NCBI NO: 438449 NR Description: carbonic anhydrase
  misc_feature (1)..(143): Homolog of NCBI NO: 21903379 NR Description: Carbonic anhydrase 2 (Carbonate dehydratase 2)
  misc_feature (1)..(143): Homolog of NCBI NO: 30685030 NR Description: CARBONIC ANHYDRASE 2 [Arabidopsis thaliana]
MVPPFDKVKYAGVGAAIEYAVLHLKVENIVVIGHSACGGIKGLMSFPLDGNNSTDFIEDWVKICLPAKSKVLAESESSAFEDQCGRCEREAVNVSLANLLTYPFVREGVVKGTLALKGGYYDFVNGSFELWELQFGISPVHSI

SEQ ID NO: 46820 - DNA, 1586 bp, Arabidopsis thaliana; identical to SEQ ID NO: 45427
  misc_feature (1)..(1586): Ceres Seq. ID no. 13646588
  misc_feature: MA Experiment ID: 108434 Result: Down-regulated in Transcription
  misc_feature: MA Experiment 108434 PARAMETER Experiment Name: At_Root_Tips_cDNA_P Parameter: Tissue Value: Root Tips
  misc_feature: MA Experiment ID: 108488 Result: Down-regulated in Transcription
  misc_feature: MA Experiment ID: 108574 Result: Up-regulated in Transcription
  misc_feature: MA Experiment 108574 PARAMETER Experiment Name: At_Wounding__cDNA_P Parameter: Timepoint (hr) Value: 1
  misc_feature: MA Experiment 108574 PARAMETER Experiment Name: At_Wounding__cDNA_P Parameter: Tissue Value: Aerial
  misc_feature: MA Experiment 108574 PARAMETER Experiment Name: At_Wounding__cDNA_P Parameter: Treatment Value: Wounding vs. No Wounding
  misc_feature: MA Experiment ID: 108595 Result: Up-regulated in Transcription
  misc_feature: MA Experiment 108595 PARAMETER Experiment Name: At_Ler-pi_Ovule_cDNA_P Parameter: Plant Line Value: null
  misc_feature: MA Experiment ID: 20000069 Result: Up-regulated in Transcription
  misc_feature: MA Experiment 20000069 PARAMETER Experiment Name: At_100uM_ABA_Mutants_cDNA_P Parameter: Plant Line Value: CS23
  misc_feature: MA Experiment 20000069 PARAMETER Experiment Name: At_100uM_ABA_Mutants_cDNA_P Parameter: Timepoint (hr) Value: 6
  misc_feature: MA Experiment 20000069 PARAMETER Experiment Name: At_100uM_ABA_Mutants_cDNA_P Parameter: Tissue Value: Aerial
  misc_feature: MA Experiment 20000069 PARAMETER Experiment Name: At_100uM_ABA_Mutants_cDNA_P Parameter: Treatment Value: 100uM ABA vs. No Treatment
  misc_feature: MA Experiment ID: 20000185 Result: Up-regulated in Transcription
  misc_feature: MA Experiment 20000185 PARAMETER Experiment Name: At_Roots__P Parameter: Age (day) Value: 7 vs. 21
  misc_feature: MA Experiment 20000185 PARAMETER Experiment Name: At_Roots__P Parameter: Organism Value: A. thaliana
  misc_feature: MA Experiment 20000185 PARAMETER Experiment Name: At_Roots__P Parameter: Tissue Value: Roots vs. Whole Plant
  misc_feature: MA Experiment ID: 20000265 Result: Up-regulated in Transcription
  misc_feature: MA Experiment 20000265 PARAMETER Experiment Name: At_Open_Flower_P Parameter: Age (day) Value: 21
  misc_feature: MA Experiment 20000265 PARAMETER Experiment Name: At_Open_Flower_P Parameter: Plant Line Value: WS
  misc_feature: MA Experiment 20000265 PARAMETER Experiment Name: At_Open_Flower_P Parameter: Tissue Value: Closed Flower vs. Whole Plant
  misc_feature: MA Experiment ID: 20000286 Result: Up-regulated in Transcription
  misc_feature: MA Experiment 20000286 PARAMETER Experiment Name: At_Open_Flower_P Parameter: Age (day) Value: 21
  misc_feature: MA Experiment 20000286 PARAMETER Experiment Name: At_Open_Flower_P Parameter: Plant Line Value: WS
  misc_feature: MA Experiment 20000286 PARAMETER Experiment Name: At_Open_Flower_P Parameter: Tissue Value: Half Open vs. Whole Plant
  misc_feature: MA Experiment ID: 20000437 Result: Up-regulated in Transcription
  misc_feature: MA Experiment 20000437 PARAMETER Experiment Name: At_Drought_P Parameter: Age (day) Value: 8
  misc_feature: MA Experiment 20000437 PARAMETER Experiment Name: At_Drought_P Parameter: Organism Value: A. thaliana
  misc_feature: MA Experiment 20000437 PARAMETER Experiment Name: At_Drought_P Parameter: Plant Line Value: WS
  misc_feature: MA Experiment 20000437 PARAMETER Experiment Name: At_Drought_P Parameter: Timepoint (hr) Value: 24
  misc_feature: MA Experiment 20000437 PARAMETER Experiment Name: At_Drought_P Parameter: Tissue Value: Whole Plant
  misc_feature: MA Experiment 20000437 PARAMETER Experiment Name: At_Drought_P Parameter: Treatment Value: Drought vs. No Drought
  misc_feature: MA Experiment ID: 20000439 Result: Up-regulated in Transcription
  misc_feature: MA Experiment 20000439 PARAMETER Experiment Name: At_Roots__P Parameter: Age (day) Value: 14 vs. 21
  misc_feature: MA Experiment 20000439 PARAMETER Experiment Name: At_Roots__P Parameter: Organism Value: A. thaliana
  misc_feature: MA Experiment 20000439 PARAMETER Experiment Name: At_Roots__P Parameter: Tissue Value: Roots vs. Whole Plant
  misc_feature: MA Experiment ID: 20001556 Result: Up-regulated in Transcription
  misc_feature: MA Experiment 20001556 PARAMETER Experiment Name: At_Drought_Soil_Dry_P Parameter: Age (day) Value: 26
  misc_feature: MA Experiment 20001556 PARAMETER Experiment Name: At_Drought_Soil_Dry_P Parameter: Organism Value: A. thaliana
  misc_feature: MA Experiment 20001556 PARAMETER Experiment Name: At_Drought_Soil_Dry_P Parameter: Plant Line Value: WS
  misc_feature: MA Experiment 20001556 PARAMETER Experiment Name: At_Drought_Soil_Dry_P Parameter: Post Timepoint (hr) Value: None
  misc_feature: MA Experiment 20001556 PARAMETER Experiment Name: At_Drought_Soil_Dry_P Parameter: Post-Treatment Value: None
  misc_feature: MA Experiment 20001556 PARAMETER Experiment Name: At_Drought_Soil_Dry_P Parameter: Timepoint (day) Value: 12
  misc_feature: MA Experiment 20001556 PARAMETER Experiment Name: At_Drought_Soil_Dry_P Parameter: Treatment Value: Drought vs. No Drought
  misc_feature: MA Experiment ID: 20001757 Result: Down-regulated in Transcription
  misc_feature: MA Experiment 20001757 PARAMETER Experiment Name: At_50mM_NH4NO3_L-to-H_P Parameter: Timepoint (hr) Value: 6
  misc_feature: MA Experiment 20001757 PARAMETER Experiment Name: At_50mM_NH4NO3_L-to-H_P Parameter: Tissue Value: Leaf
  misc_feature: MA Experiment 20001757 PARAMETER Experiment Name: At_50mM_NH4NO3_L-to-H_P Parameter: Treatment Value: 50mM NH4NO3 vs 100mM Mannitol
  misc_feature: MA Experiment ID: 20001904 Result: Up-regulated in Transcription
  misc_feature: MA Experiment 20001904 PARAMETER Experiment Name: At_Drought_Reproduction_P Parameter: Age (day) Value: 37
  misc_feature: MA Experiment 20001904 PARAMETER Experiment Name: At_Drought_Reproduction_P Parameter: Organism Value: A. thaliana
  misc_feature: MA Experiment 20001904 PARAMETER Experiment Name: At_Drought_Reproduction_P Parameter: Plant Line Value: WS
  misc_feature: MA Experiment 20001904 PARAMETER Experiment Name: At_Drought_Reproduction_P Parameter: Timepoint (day) Value: 7
  misc_feature: MA Experiment 20001904 PARAMETER Experiment Name: At_Drought_Reproduction_P Parameter: Tissue Value: Rosettes
  misc_feature: MA Experiment 20001904 PARAMETER Experiment Name: At_Drought_Reproduction_P Parameter: Treatment Value: Drought vs. No Drought
  misc_feature: MA Experiment ID: 20001905 Result: Up-regulated in Transcription
  misc_feature: MA Experiment 20001905 PARAMETER Experiment Name: At_Drought_Reproduction_P Parameter: Age (day) Value: 40
  misc_feature: MA Experiment 20001905 PARAMETER Experiment Name: At_Drought_Reproduction_P Parameter: Organism Value: A. thaliana
  misc_feature: MA Experiment 20001905 PARAMETER Experiment Name: At_Drought_Reproduction_P Parameter: Plant Line Value: WS
  misc_feature: MA Experiment 20001905 PARAMETER Experiment Name: At_Drought_Reproduction_P Parameter: Timepoint (day) Value: 10
  misc_feature: MA Experiment 20001905 PARAMETER Experiment Name: At_Drought_Reproduction_P Parameter: Tissue Value: Rosettes
  misc_feature: MA Experiment 20001905 PARAMETER Experiment Name: At_Drought_Reproduction_P Parameter: Treatment Value: Drought vs. No Drought

SEQ ID NO: 46821 - protein, 433 aa, Arabidopsis thaliana; identical to SEQ ID NO: 45428
  peptide (1)..(433): Ceres Seq. ID no. 13646589
  misc_feature (56)..(433): Pfam Name: Lanthionine synthetase C-like protein Pfam Description: Lanthionine synthetase C-like protein
  misc_feature (56)..(433): Pfam Name: Lanthionine synthetase C-like protein Pfam Description: Lanthionine synthetase C-like protein
  misc_feature (81)..(433): Homolog of NCBI NO: 8923911 NR Description: LanC lantibiotic synthetase component C-like 2
  misc_feature (81)..(433): Homolog of NCBI NO: 19526936 NR Description: RIKEN cDNA 1700003F10 [Mus musculus]
  misc_feature (69)..(433): Homolog of NCBI NO: 25411993 NR Description: hypothetical protein At2g20770 [imported] -
  misc_feature (56)..(433): Homolog of NCBI NO: 30681129 NR Description: expressed protein [Arabidopsis thaliana]
  misc_feature (79)..(433): Homolog of NCBI NO: 37535720 NR Description: putative lanthionine synthetase
  misc_feature (81)..(433): Homolog of NCBI NO: 8923911 NR Description: LanC lantibiotic synthetase component C-like 2
  misc_feature (69)..(433): Homolog of NCBI NO: 25411993 NR Description: hypothetical protein At2g20770 [imported] -
  misc_feature (79)..(433): Homolog of NCBI NO: 37535720 NR Description: putative lanthionine synthetase
  misc_feature (1)..(433): Homolog of NCBI NO: 15238395 NR Description: G protein-coupled receptor-related protein
  misc_feature (1)..(433): Homolog of NCBI NO: 15451140 NR Description: G protein-coupled receptor-like protein
  misc_feature (2)..(433): Homolog of NCBI NO: 8489877 NR Description: putative 7-transmembrane G-protein-coupled
  misc_feature (42)..(433): Homolog of NCBI NO: 21742091 NR Description: OSJNBa0074L08.13 [Oryza sativa (japonica
  misc_feature (79)..(433): Homolog of NCBI NO: 15219126 NR Description: G protein-coupled receptor -related [Arabidopsis
  misc_feature (56)..(433): Homolog of NCBI NO: 30681129 NR Description: expressed protein [Arabidopsis thaliana]
  misc_feature (81)..(433): Homolog of NCBI NO: 19526936 NR Description: RIKEN cDNA 1700003F10 [Mus musculus]
  misc_feature (79)..(433): Homolog of NCBI NO: 15219126 NR Description: G protein-coupled receptor -related [Arabidopsis
  misc_feature (42)..(433): Homolog of NCBI NO: 21742091 NR Description: OSJNBa0074L08.13 [Oryza sativa (japonica
  misc_feature (2)..(433): Homolog of NCBI NO: 8489877 NR Description: putative 7-transmembrane G-protein-coupled
  misc_feature (1)..(433): Homolog of NCBI NO: 15451140 NR Description: G protein-coupled receptor-like protein
  misc_feature (1)..(433): Homolog of NCBI NO: 15238395 NR Description: G protein-coupled receptor-related protein

SEQ ID NO: 46822 - protein, 252 aa, Arabidopsis thaliana; identical to SEQ ID NO: 45429
  peptide (1)..(252): Ceres Seq. ID no. 13646590
  misc_feature (1)..(252): Pfam Name: Lanthionine synthetase C-like protein Pfam Description: Lanthionine synthetase C-like protein
  misc_feature (1)..(252): Pfam Name: Lanthionine synthetase C-like protein Pfam Description: Lanthionine synthetase C-like protein
  misc_feature (1)..(252): Homolog of NCBI NO: 8923911 NR Description: LanC lantibiotic synthetase component C-like 2
  misc_feature (1)..(252): Homolog of NCBI NO: 19526936 NR Description: RIKEN cDNA 1700003F10 [Mus musculus]
  misc_feature (1)..(252): Homolog of NCBI NO: 25411993 NR Description: hypothetical protein At2g20770 [imported] -
  misc_feature (1)..(252): Homolog of NCBI NO: 30681129 NR Description: expressed protein [Arabidopsis thaliana]
  misc_feature (1)..(252): Homolog of NCBI NO: 37535720 NR Description: putative lanthionine synthetase
  misc_feature (1)..(252): Homolog of NCBI NO: 8923911 NR Description: LanC lantibiotic synthetase component C-like 2
  misc_feature (1)..(252): Homolog of NCBI NO: 25411993 NR Description: hypothetical protein At2g20770 [imported] -
  misc_feature (1)..(252): Homolog of NCBI NO: 37535720 NR Description: putative lanthionine synthetase
  misc_feature (1)..(252): Homolog of NCBI NO: 15238395 NR Description: G protein-coupled receptor-related protein
  misc_feature (1)..(252): Homolog of NCBI NO: 15451140 NR Description: G protein-coupled receptor-like protein
  misc_feature (1)..(252): Homolog of NCBI NO: 8489877 NR Description: putative 7-transmembrane G-protein-coupled
  misc_feature (1)..(252): Homolog of NCBI NO: 21742091 NR Description: OSJNBa0074L08.13 [Oryza sativa (japonica
  misc_feature (1)..(252): Homolog of NCBI NO: 15219126 NR Description: G protein-coupled receptor -related [Arabidopsis
  misc_feature (1)..(252): Homolog of NCBI NO: 30681129 NR Description: expressed protein [Arabidopsis thaliana]
  misc_feature (1)..(252): Homolog of NCBI NO: 19526936 NR Description: RIKEN cDNA 1700003F10 [Mus musculus]
  misc_feature (1)..(252): Homolog of NCBI NO: 15219126 NR Description: G protein-coupled receptor -related [Arabidopsis
  misc_feature (1)..(252): Homolog of NCBI NO: 21742091 NR Description: OSJNBa0074L08.13 [Oryza sativa (japonica
  misc_feature (1)..(252): Homolog of NCBI NO: 8489877 NR Description: putative 7-transmembrane G-protein-coupled
  misc_feature (1)..(252): Homolog of NCBI NO: 15451140 NR Description: G protein-coupled receptor-like protein
  misc_feature (1)..(252): Homolog of NCBI NO: 15238395 NR Description: G protein-coupled receptor-related protein

SEQ ID NO: 46823 - DNA, 2700 bp, Arabidopsis thaliana
  misc_feature (1)..(2700): Ceres Seq. ID no. 12580744
  misc_feature: MA Experiment ID: 20000173 Result: Down-regulated in Transcription
  misc_feature: MA Experiment 20000173 PARAMETER Experiment Name: At_42deg_Heat_P Parameter: Age (day) Value: 14
  misc_feature: MA Experiment 20000173 PARAMETER Experiment Name: At_42deg_Heat_P Parameter: Organism Value: A. thaliana
  misc_feature: MA Experiment 20000173 PARAMETER Experiment Name: At_42deg_Heat_P Parameter: Plant Line Value: WS
  misc_feature: MA Experiment 20000173 PARAMETER Experiment Name: At_42deg_Heat_P Parameter: Temperature (deg C) Value: 42 vs. 22
  misc_feature: MA Experiment 20000173 PARAMETER Experiment Name: At_42deg_Heat_P Parameter: Timepoint (hr) Value: 6
  misc_feature: MA Experiment 20000173 PARAMETER Experiment Name: At_42deg_Heat_P Parameter: Tissue Value: Aerial
  misc_feature: MA Experiment ID: 20000184 Result: Down-regulated in Transcription
  misc_feature: MA Experiment 20000184 PARAMETER Experiment Name: At_Shoots__P Parameter: Age (day) Value: 7
  misc_feature: MA Experiment 20000184 PARAMETER Experiment Name: At_Shoots__P Parameter: Tissue Value: Shoots vs. Whole Plant
  misc_feature: MA Experiment ID: 20000227 Result: Down-regulated in Transcription
  misc_feature: MA Experiment 20000227 PARAMETER Experiment Name: At_Root-Tips-vs-Tops_P Parameter: Tissue Value: Root Tips vs. Root Tops
  misc_feature: MA Experiment ID: 20000437 Result: Up-regulated in Transcription
  misc_feature: MA Experiment 20000437 PARAMETER Experiment Name: At_Drought_P Parameter: Age (day) Value: 8
  misc_feature: MA Experiment 20000437 PARAMETER Experiment Name: At_Drought_P Parameter: Organism Value: A. thaliana
  misc_feature: MA Experiment 20000437 PARAMETER Experiment Name: At_Drought_P Parameter: Plant Line Value: WS
  misc_feature: MA Experiment 20000437 PARAMETER Experiment Name: At_Drought_P Parameter: Timepoint (hr) Value: 24
  misc_feature: MA Experiment 20000437 PARAMETER Experiment Name: At_Drought_P Parameter: Tissue Value: Whole Plant
  misc_feature: MA Experiment 20000437 PARAMETER Experiment Name: At_Drought_P Parameter: Treatment Value: Drought vs. No Drought
  misc_feature: MA Experiment ID: 20000794 Result: Up-regulated in Transcription
  misc_feature: MA Experiment 20000794 PARAMETER Experiment Name: At_Petals_P Parameter: Age (day) Value: 23-25 days
  misc_feature: MA Experiment 20000794 PARAMETER Experiment Name: At_Petals_P Parameter: Plant Line Value: WS
  misc_feature: MA Experiment 20000794 PARAMETER Experiment Name: At_Petals_P Parameter: Tissue Value: Petals vs. Whole plant
  misc_feature: MA Experiment ID: 20001559 Result: Up-regulated in Transcription
  misc_feature: MA Experiment 20001559 PARAMETER Experiment Name: At_Drought_Soil_Dry_P Parameter: Age (day) Value: 28
  misc_feature: MA Experiment 20001559 PARAMETER Experiment Name: At_Drought_Soil_Dry_P Parameter: Organism Value: A. thaliana
  misc_feature: MA Experiment 20001559 PARAMETER Experiment Name: At_Drought_Soil_Dry_P Parameter: Plant Line Value: WS
  misc_feature: MA Experiment 20001559 PARAMETER Experiment Name: At_Drought_Soil_Dry_P Parameter: Post Timepoint (hr) Value: 29
  misc_feature: MA Experiment 20001559 PARAMETER Experiment Name: At_Drought_Soil_Dry_P Parameter: Post-Treatment Value: Re-Water vs. No Drought
  misc_feature: MA Experiment 20001559 PARAMETER Experiment Name: At_Drought_Soil_Dry_P Parameter: Timepoint (day) Value: 14
  misc_feature: MA Experiment 20001559 PARAMETER Experiment Name: At_Drought_Soil_Dry_P Parameter: Treatment Value: Drought vs. No Drought
  misc_feature: MA Experiment ID: 20001904 Result: Up-regulated in Transcription
  misc_feature: MA Experiment 20001904 PARAMETER Experiment Name: At_Drought_Reproduction_P Parameter: Age (day) Value: 37
  misc_feature: MA Experiment 20001904 PARAMETER Experiment Name: At_Drought_Reproduction_P Parameter: Organism Value: A. thaliana
  misc_feature: MA Experiment 20001904 PARAMETER Experiment Name: At_Drought_Reproduction_P Parameter: Plant Line Value: WS
  misc_feature: MA Experiment 20001904 PARAMETER Experiment Name: At_Drought_Reproduction_P Parameter: Timepoint (day) Value: 7
  misc_feature: MA Experiment 20001904 PARAMETER Experiment Name: At_Drought_Reproduction_P Parameter: Tissue Value: Rosettes
  misc_feature: MA Experiment 20001904 PARAMETER Experiment Name: At_Drought_Reproduction_P Parameter: Treatment Value: Drought vs. No Drought
  misc_feature: MA Experiment ID: 20001905 Result: Up-regulated in Transcription
  misc_feature: MA Experiment 20001905 PARAMETER Experiment Name: At_Drought_Reproduction_P Parameter: Age (day) Value: 40
  misc_feature: MA Experiment 20001905 PARAMETER Experiment Name: At_Drought_Reproduction_P Parameter: Organism Value: A. thaliana
  misc_feature: MA Experiment 20001905 PARAMETER Experiment Name: At_Drought_Reproduction_P Parameter: Plant Line Value: WS
  misc_feature: MA Experiment 20001905 PARAMETER Experiment Name: At_Drought_Reproduction_P Parameter: Timepoint (day) Value: 10
  misc_feature: MA Experiment 20001905 PARAMETER Experiment Name: At_Drought_Reproduction_P Parameter: Tissue Value: Rosettes
  misc_feature: MA Experiment 20001905 PARAMETER Experiment Name: At_Drought_Reproduction_P Parameter: Treatment Value: Drought vs. No Drought
  misc_feature: MA Experiment ID: 20001906 Result: Up-regulated in Transcription
  misc_feature: MA Experiment 20001906 PARAMETER Experiment Name: At_Drought_Reproduction_P Parameter: Age (day) Value: 35
  misc_feature: MA Experiment 20001906 PARAMETER Experiment Name: At_Drought_Reproduction_P Parameter: Organism Value: A. thaliana
  misc_feature: MA Experiment 20001906 PARAMETER Experiment Name: At_Drought_Reproduction_P Parameter: Plant Line Value: WS
  misc_feature: MA Experiment 20001906 PARAMETER Experiment Name: At_Drought_Reproduction_P Parameter: Timepoint (day) Value: 5
  misc_feature: MA Experiment 20001906 PARAMETER Experiment Name: At_Drought_Reproduction_P Parameter: Tissue Value: Siliques
  misc_feature: MA Experiment 20001906 PARAMETER Experiment Name: At_Drought_Reproduction_P Parameter: Treatment Value: Drought vs. No Drought
  misc_feature: MA Experiment ID: 20001908 Result: Up-regulated in Transcription
  misc_feature: MA Experiment 20001908 PARAMETER Experiment Name: At_Drought_Reproduction_P Parameter: Age (day) Value: 40
  misc_feature: MA Experiment 20001908 PARAMETER Experiment Name: At_Drought_Reproduction_P Parameter: Organism Value: A. thaliana
  misc_feature: MA Experiment 20001908 PARAMETER Experiment Name: At_Drought_Reproduction_P Parameter: Plant Line Value: WS
  misc_feature: MA Experiment 20001908 PARAMETER Experiment Name: At_Drought_Reproduction_P Parameter: Timepoint (day) Value: 10
  misc_feature: MA Experiment 20001908 PARAMETER Experiment Name: At_Drought_Reproduction_P Parameter: Tissue Value: Siliques
  misc_feature: MA Experiment 20001908 PARAMETER Experiment Name: At_Drought_Reproduction_P Parameter: Treatment Value: Drought vs. No Drought
  misc_feature: MA Experiment ID: 20001911 Result: Up-regulated in Transcription
  misc_feature: MA Experiment 20001911 PARAMETER Experiment Name: At_Drought_Reproduction_P Parameter: Age (day) Value: 40
  misc_feature: MA Experiment 20001911 PARAMETER Experiment Name: At_Drought_Reproduction_P Parameter: Organism Value: A. thaliana
  misc_feature: MA Experiment 20001911 PARAMETER Experiment Name: At_Drought_Reproduction_P Parameter: Plant Line Value: WS
  misc_feature: MA Experiment 20001911 PARAMETER Experiment Name: At_Drought_Reproduction_P Parameter: Timepoint (day) Value: 10
  misc_feature: MA Experiment 20001911 PARAMETER Experiment Name: At_Drought_Reproduction_P Parameter: Tissue Value: Flowers
  misc_feature: MA Experiment 20001911 PARAMETER Experiment Name: At_Drought_Reproduction_P Parameter: Treatment Value: Drought vs. No Drought
gttgatgaatctctgaggagcagagcgagatagaggagagtgaaggaacatcatgggaagcagcacgggcgatcttgtgacacgtatccaatcagctcaccgtttcgatcacgatgccttgtttcgttttgccgccgacaacgtctctggctttccgaccaacccttcccaattcaaagtctcacagttcggacatgggcagtcgaatccaacgtttctgatagaggttggctcagggagttccttgaaacgatacgttttgaggaagaagcctcctggcaagcttcttcaatctgctcatgctgttgatcgagagtttcaggtgcttcgggctttaggtgaacatacacaggttcctgttcctaaagtcttctgcttatgcactgaccctgctgtcattgggactgctttttacattatggagtttatggaaggacgtattttcattgatccaaagttgccgaatgtagcacctgaaaggagaaatgcgatctatcgtgcaaccgccaaagccttggcatctcttcactctgctgatgtggatgccattggtcttgagaaatatggtcggcgaggcaattactgcaaaagacagatagataggtggttcaaacaatatttggcttcaacaagtgaaggtaaacctgaaaggaatccaaagatgtttgagcttgttgattggttacgcaaaaacatccccgcggaagattcaactggagcaacatcaggccttgtccatggagactttcgcattgacaatctcgtttttcatccttctgaggatcgagttattggaataattgactgggaattgtccacgcttgggaaccaaatgtgtgatgttgcatacagctgcatgcattacattgtgaatgttcagctcgataaggagcatgttagtgaaggttttgaaactactgggcttccagaaggaatgctttcgatgccagaatttctcttagaatactgttctgcatcgggaaaaccatggcctgctgcaaactggaagttctacgtagcgttctccttatttcgggctgcttcaatctacacaggggtgtacagtagatggttaatggggaatgcttctgccggtgaaagagcgcgaaatacaggggttcaagctaatgagcttgtagagtctgccttgggttatattgcacgtgaaaatgttcttccagaacaccctccatctgttcaaagagacgtgtctccgtcgtatgaaagccttgtggatggaagcgggagattcatccccaacagaaaagtattggagttaaggcagaagttgatcaagtttatggaaactcatatctacccaatggaaaacgagttctccaaacttgctcaatcagatatgcgatggaccgttcaccctcaggaggaaaagttaaaggaaatggcaaagagagaaggcctatggaacttatttgttcctgtagatagtgctgctagagctagaagagaactggcggctaccgagaataaacataacctctcgggcaagtcttttgatcaattgtttggtgagggcctcacgaacctggagtatggttacctttgtgagatcatgggtcgttctgtttgggctccacaggtgtttaactgtggtgcaccagatactggaaacatggaggtgatactgcggtatggtaacaaagaacaaatttctgaatggcttattccgttgctcgagggaagaattcgttctggatttgctatgactgagccacaagttgcatcgtctgatgcaaccaatattgaatgctctatccgaagacaaggtgattcatacgtcattaatggcacaaaatggtggacaagtggagctatggatcccaggtgcagagtccttattctcatgggaaaaactgatttcaacgccccaaaacataagcagcagtctatgatattagtggacatgcggactccaggtataagtgtgaagaggcctctcacagtgtttggttttgatgacgcacctcatggacatgctgaaatttcttttgaaaatgtggttgtcccggcgaagaacattctccttggagaaggccgaggattcgagattgctcagggtaggttaggccctggaagactgcaccattgcatgagactaataggtgcagcagagcgtggaatggagctaatggctcaaagagctctgagtagaaaaacttttgggaagttcattgcgcagcacggttctttcgtctctgatcttgcaaagttacgggtagagctagaaggaacccgattgttggttctagaagctgctgatcatcttgataaatttggaaacaaaaaagctcgaggaattctcgcaatggccaaggttgcagctccaaacatggcattgaaggtactagacacggcaatacaagttcatggagcagccggtgtatcctcggacacagttttagcgcatttgtgggctacagctagaacactgaggattgctgatggacctgatgaggttcatcttgggaccattggcaagttagaactgcaaagagcttcaaagctttaaagcgttttgggatatgcgaattcgattctcagaataagatatcagttttttttttttacatcattaataaagttgttcttgggtcttttagtacaaacagtaaatctgaataaatttactactagatcttatctgtttcataatgttaatactttataatattaaatcttact

SEQ ID NO: 46824 - protein, 824 aa, Arabidopsis thaliana
  peptide (1)..(824): Ceres Seq. ID no. 12580745
  misc_feature (667)..(818): Pfam Name: Acyl-CoA dehydrogenase, C-terminal domain Pfam Description: Acyl-CoA dehydrogenase, C-terminal domain
  misc_feature (494)..(823): Homolog of NCBI NO: 38505218 NR Description: hypothetical protein FLJ12592 [Homo sapiens]
  misc_feature (4)..(377): Homolog of NCBI NO: 38505218 NR Description: hypothetical protein FLJ12592 [Homo sapiens]
  misc_feature (494)..(823): Homolog of NCBI NO: 38490142 NR Description: putative acyl-CoA dehydrogenase [Homo sapiens]
  misc_feature (4)..(377): Homolog of NCBI NO: 38490142 NR Description: putative acyl-CoA dehydrogenase [Homo sapiens]
  misc_feature (495)..(823): Homolog of NCBI NO: 28277729 NR Description: Similar to RIKEN cDNA 2410021P16 gene [Danio
  misc_feature (10)..(420): Homolog of NCBI NO: 28277729 NR Description: Similar to RIKEN cDNA 2410021P16 gene [Danio
  misc_feature (10)..(824): Homolog of NCBI NO: 22137453 NR Description: Unknown (protein for IMAGE:4950406) [Mus musculus]
  misc_feature (10)..(824): Homolog of NCBI NO: 20379980 NR Description: 2410021P16Rik protein [Mus musculus]
  misc_feature (10)..(824): Homolog of NCBI NO: 30794396 NR Description: RIKEN cDNA 2410021P16 [Mus musculus]
  misc_feature (5)..(821): Homolog of NCBI NO: 34393862 NR Description: putative acyl-CoA dehydrogenase
MGSSTGDLVTRIQSAHRFDHDALFRFAADNVSGFPTNPSQFKVSQFGHGQSNPTFLIEVGSGSSLKRYVLRKKPPGKLLQSAHAVDREFQVLRALGEHTQVPVPKVFCLCTDPAVIGTAFYIMEFMEGRIFIDPKLPNVAPERRNAIYRATAKALASLHSADVDAIGLEKYGRRGNYCKRQIDRWFKQYLASTSEGKPERNPKMFELVDWLRKNIPAEDSTGATSGLVHGDFRIDNLVFHPSEDRVIGIIDWELSTLGNQMCDVAYSCMHYIVNVQLDKEHVSEGFETTGLPEGMLSMPEFLLEYCSASGKPWPAANWKFYVAFSLFRAASIYTGVYSRWLMGNASAGERARNTGVQANELVESALGYIARENVLPEHPPSVQRDVSPSYESLVDGSGRFIPNRKVLELRQKLIKFMETHIYPMENEFSKLAQSDMRWTVHPQEEKLKEMAKREGLWNLFVPVDSAARARRELAATENKHNLSGKSFDQLFGEGLTNLEYGYLCEIMGRSVWAPQVFNCGAPDTGNMEVILRYGNKEQISEWLIPLLEGRIRSGFAMTEPQVASSDATNIECSIRRQGDSYVINGTKWWTSGAMDPRCRVLILMGKTDFNAPKHKQQSMILVDMRTPGISVKRPLTVFGFDDAPHGHAEISFENVVVPAKNILLGEGRGFEIAQGRLGPGRLHHCMRLIGAAERGMELMAQRALSRKTFGKFIAQHGSFVSDLAKLRVELEGTRLLVLEAADHLDKFGNKKARGILAMAKVAAPNMALKVLDTAIQVHGAAGVSSDTVLAHLWATARTLRIADGPDEVHLGTIGKLELQRASKL

SEQ ID NO: 46825 - protein, 702 aa, Arabidopsis thaliana
  peptide (1)..(702): Ceres Seq. ID no. 12580746
  misc_feature (545)..(696): Pfam Name: Acyl-CoA dehydrogenase, C-terminal domain Pfam Description: Acyl-CoA dehydrogenase, C-terminal domain
  misc_feature (372)..(701): Homolog of NCBI NO: 38505218 NR Description: hypothetical protein FLJ12592 [Homo sapiens]
  misc_feature (1)..(255): Homolog of NCBI NO: 38505218 NR Description: hypothetical protein FLJ12592 [Homo sapiens]
  misc_feature (372)..(701): Homolog of NCBI NO: 38490142 NR Description: putative acyl-CoA dehydrogenase [Homo sapiens]
  misc_feature (1)..(255): Homolog of NCBI NO: 38490142 NR Description: putative acyl-CoA dehydrogenase [Homo sapiens]
  misc_feature (373)..(701): Homolog of NCBI NO: 28277729 NR Description: Similar to RIKEN cDNA 2410021P16 gene [Danio
  misc_feature (1)..(298): Homolog of NCBI NO: 28277729 NR Description: Similar to RIKEN cDNA 2410021P16 gene [Danio
  misc_feature (1)..(702): Homolog of NCBI NO: 22137453 NR Description: Unknown (protein for IMAGE:4950406) [Mus musculus]
  misc_feature (1)..(702): Homolog of NCBI NO: 20379980 NR Description: 2410021P16Rik protein [Mus musculus]
  misc_feature (1)..(702): Homolog of NCBI NO: 30794396 NR Description: RIKEN cDNA 2410021P16 [Mus musculus]
  misc_feature (1)..(699): Homolog of NCBI NO: 34393862 NR Description: putative acyl-CoA dehydrogenase
MEFMEGRIFIDPKLPNVAPERRNAIYRATAKALASLHSADVDAIGLEKYGRRGNYCKRQIDRWFKQYLASTSEGKPERNPKMFELVDWLRKNIPAEDSTGATSGLVHGDFRIDNLVFHPSEDRVIGIIDWELSTLGNQMCDVAYSCMHYIVNVQLDKEHVSEGFETTGLPEGMLSMPEFLLEYCSASGKPWPAANWKFYVAFSLFRAASIYTGVYSRWLMGNASAGERARNTGVQANELVESALGYIARENVLPEHPPSVQRDVSPSYESLVDGSGRFIPNRKVLELRQKLIKFMETHIYPMENEFSKLAQSDMRWTVHPQEEKLKEMAKREGLWNLFVPVDSAARARRELAATENKHNLSGKSFDQLFGEGLTNLEYGYLCEIMGRSVWAPQVFNCGAPDTGNMEVILRYGNKEQISEWLIPLLEGRIRSGFAMTEPQVASSDATNIECSIRRQGDSYVINGTKWWTSGAMDPRCRVLILMGKTDFNAPKHKQQSMILVDMRTPGISVKRPLTVFGFDDAPHGHAEISFENVVVPAKNILLGEGRGFEIAQGRLGPGRLHHCMRLIGAAERGMELMAQRALSRKTFGKFIAQHGSFVSDLAKLRVELEGTRLLVLEAADHLDKFGNKKARGILAMAKVAAPNMALKVLDTAIQVHGAAGVSSDTVLAHLWATARTLRIADGPDEVHLGTIGKLELQRASKL

SEQ ID NO: 46826 - protein, 699 aa, Arabidopsis thaliana
  peptide (1)..(699): Ceres Seq. ID no. 12580747
  misc_feature (542)..(693): Pfam Name: Acyl-CoA dehydrogenase, C-terminal domain Pfam Description: Acyl-CoA dehydrogenase, C-terminal domain
  misc_feature (369)..(698): Homolog of NCBI NO: 38505218 NR Description: hypothetical protein FLJ12592 [Homo sapiens]
  misc_feature (1)..(252): Homolog of NCBI NO: 38505218 NR Description: hypothetical protein FLJ12592 [Homo sapiens]
  misc_feature (369)..(698): Homolog of NCBI NO: 38490142 NR Description: putative acyl-CoA dehydrogenase [Homo sapiens]
  misc_feature (1)..(252): Homolog of NCBI NO: 38490142 NR Description: putative acyl-CoA dehydrogenase [Homo sapiens]
  misc_feature (370)..(698): Homolog of NCBI NO: 28277729 NR Description: Similar to RIKEN cDNA 2410021P16 gene [Danio
  misc_feature (1)..(295): Homolog of NCBI NO: 28277729 NR Description: Similar to RIKEN cDNA 2410021P16 gene [Danio
  misc_feature (1)..(699): Homolog of NCBI NO: 22137453 NR Description: Unknown (protein for IMAGE:4950406) [Mus musculus]
  misc_feature (1)..(699): Homolog of NCBI NO: 20379980 NR Description: 2410021P16Rik protein [Mus musculus]
  misc_feature (1)..(699): Homolog of NCBI NO: 30794396 NR Description: RIKEN cDNA 2410021P16 [Mus musculus]
  misc_feature (1)..(696): Homolog of NCBI NO: 34393862 NR Description: putative acyl-CoA dehydrogenase
MEGRIFIDPKLPNVAPERRNAIYRATAKALASLHSADVDAIGLEKYGRRGNYCKRQIDRWFKQYLASTSEGKPERNPKMFELVDWLRKNIPAEDSTGATSGLVHGDFRIDNLVFHPSEDRVIGIIDWELSTLGNQMCDVAYSCMHYIVNVQLDKEHVSEGFETTGLPEGMLSMPEFLLEYCSASGKPWPAANWKFYVAFSLFRAASIYTGVYSRWLMGNASAGERARNTGVQANELVESALGYIARENVLPEHPPSVQRDVSPSYESLVDGSGRFIPNRKVLELRQKLIKFMETHIYPMENEFSKLAQSDMRWTVHPQEEKLKEMAKREGLWNLFVPVDSAARARRELAATENKHNLSGKSFDQLFGEGLTNLEYGYLCEIMGRSVWAPQVFNCGAPDTGNMEVILRYGNKEQISEWLIPLLEGRIRSGFAMTEPQVASSDATNIECSIRRQGDSYVINGTKWWTSGAMDPRCRVLILMGKTDFNAPKHKQQSMILVDMRTPGISVKRPLTVFGFDDAPHGHAEISFENVVVPAKNILLGEGRGFEIAQGRLGPGRLHHCMRLIGAAERGMELMAQRALSRKTFGKFIAQHGSFVSDLAKLRVELEGTRLLVLEAADHLDKFGNKKARGILAMAKVAAPNMALKVLDTAIQVHGAAGVSSDTVLAHLWATARTLRIADGPDEVHLGTIGKLELQRASKL

SEQ ID NO: 46827 - DNA, 1174 bp, Arabidopsis thaliana
  misc_feature (1)..(1174): Ceres Seq. ID no. 12604593
  misc_feature: MA Experiment ID: 20000267 Result: Up-regulated in Transcription
  misc_feature: MA Experiment 20000267 PARAMETER Experiment Name: At_Drought_P Parameter: Age (day) Value: 7
  misc_feature: MA Experiment 20000267 PARAMETER Experiment Name: At_Drought_P Parameter: Organism Value: A. thaliana
  misc_feature: MA Experiment 20000267 PARAMETER Experiment Name: At_Drought_P Parameter: Plant Line Value: WS
  misc_feature: MA Experiment 20000267 PARAMETER Experiment Name: At_Drought_P Parameter: Timepoint (hr) Value: 6
  misc_feature: MA Experiment 20000267 PARAMETER Experiment Name: At_Drought_P Parameter: Tissue Value: Whole Plant
  misc_feature: MA Experiment 20000267 PARAMETER Experiment Name: At_Drought_P Parameter: Treatment Value: Drought vs. No Drought
  misc_feature: MA Experiment ID: 20000436 Result: Up-regulated in Transcription
  misc_feature: MA Experiment 20000436 PARAMETER Experiment Name: At_Drought_P Parameter: Age (day) Value: 7
  misc_feature: MA Experiment 20000436 PARAMETER Experiment Name: At_Drought_P Parameter: Organism Value: A. thaliana
  misc_feature: MA Experiment 20000436 PARAMETER Experiment Name: At_Drought_P Parameter: Plant Line Value: WS
  misc_feature: MA Experiment 20000436 PARAMETER Experiment Name: At_Drought_P Parameter: Timepoint (hr) Value: 12
  misc_feature: MA Experiment 20000436 PARAMETER Experiment Name: At_Drought_P Parameter: Tissue Value: Whole Plant
  misc_feature: MA Experiment 20000436 PARAMETER Experiment Name: At_Drought_P Parameter: Treatment Value: Drought vs. No Drought
  misc_feature: MA Experiment ID: 20000437 Result: Up-regulated in Transcription
  misc_feature: MA Experiment 20000437 PARAMETER Experiment Name: At_Drought_P Parameter: Age (day) Value: 8
  misc_feature: MA Experiment 20000437 PARAMETER Experiment Name: At_Drought_P Parameter: Organism Value: A. thaliana
  misc_feature: MA Experiment 20000437 PARAMETER Experiment Name: At_Drought_P Parameter: Plant Line Value: WS
  misc_feature: MA Experiment 20000437 PARAMETER Experiment Name: At_Drought_P Parameter: Timepoint (hr) Value: 24
  misc_feature: MA Experiment 20000437 PARAMETER Experiment Name: At_Drought_P Parameter: Tissue Value: Whole Plant
  misc_feature: MA Experiment 20000437 PARAMETER Experiment Name: At_Drought_P Parameter: Treatment Value: Drought vs. No Drought
  misc_feature: MA Experiment ID: 20000439 Result: Down-regulated in Transcription
  misc_feature: MA Experiment 20000439 PARAMETER Experiment Name: At_Roots__P Parameter: Age (day) Value: 14 vs. 21
  misc_feature: MA Experiment 20000439 PARAMETER Experiment Name: At_Roots__P Parameter: Organism Value: A. thaliana
  misc_feature: MA Experiment 20000439 PARAMETER Experiment Name: At_Roots__P Parameter: Tissue Value: Roots vs. Whole Plant
  misc_feature: MA Experiment ID: 20001247 Result: Down-regulated in Transcription
  misc_feature: MA Experiment 20001247 PARAMETER Experiment Name: At_Far-red-induction_P Parameter: Age (day) Value: 7
  misc_feature: MA Experiment 20001247 PARAMETER Experiment Name: At_Far-red-induction_P Parameter: Light Value: Far-red vs. White
  misc_feature: MA Experiment 20001247 PARAMETER Experiment Name: At_Far-red-induction_P Parameter: Organism Value: A. thaliana
  misc_feature: MA Experiment 20001247 PARAMETER Experiment Name: At_Far-red-induction_P Parameter: Plant Line Value: Columbia
  misc_feature: MA Experiment 20001247 PARAMETER Experiment Name: At_Far-red-induction_P Parameter: Timepoint (hr) Value: 1
  misc_feature: MA Experiment 20001247 PARAMETER Experiment Name: At_Far-red-induction_P Parameter: Tissue Value: Whole Plant
  misc_feature: MA Experiment ID: 20001558 Result: Down-regulated in Transcription
  misc_feature: MA Experiment 20001558 PARAMETER Experiment Name: At_Drought_Soil_Dry_P Parameter: Age (day) Value: 27
  misc_feature: MA Experiment 20001558 PARAMETER Experiment Name: At_Drought_Soil_Dry_P Parameter: Organism Value: A. thaliana
  misc_feature: MA Experiment 20001558 PARAMETER Experiment Name: At_Drought_Soil_Dry_P Parameter: Plant Line Value: WS
  misc_feature: MA Experiment 20001558 PARAMETER Experiment Name: At_Drought_Soil_Dry_P Parameter: Post Timepoint (hr) Value: 6
  misc_feature: MA Experiment 20001558 PARAMETER Experiment Name: At_Drought_Soil_Dry_P Parameter: Post-Treatment Value: Re-Water vs. No Drought
  misc_feature: MA Experiment 20001558 PARAMETER Experiment Name: At_Drought_Soil_Dry_P Parameter: Timepoint (day) Value: 13
  misc_feature: MA Experiment 20001558 PARAMETER Experiment Name: At_Drought_Soil_Dry_P Parameter: Treatment Value: Drought vs. No Drought
cagaggctcatttgtcagtaaccatttgatcaacggctaaatcctatatccactaaaattcaaccacgtcatcagacataccaatatacagcaacacttgatagcggcagataaaaagatcgtcaacagaattaactctttaaatcacttctctgttatacctctctgntttgctccctgaagaagaagaaacagagcgttcacatttctctgcaacaaaatcatggcattgaccttcttcttcttgttatcgaatttgttcttctccggagttatgtcaaggagcttcacattttcaaacaaatgcgattacacagtgtggccgggaattctatctaacgccggagtttctccattaccaaccaccggcttcgtcctcctgaaaggcgagacgcgtacaatcaacgcaccgtcatcatgggggggtcgtttctggggaagaacactctgctcaaccgattccgatggaaaattctcgtgtgccaccggagattgcggctccggaaaaatcgaatgctccggcgctggagctgctcctcctgcgactttagctgaattcactctcgatggctccggaggactcgatttctacgatgtcagtctcgtcgacggctacaatgtccagatgctggtggttcctcaaggcggctccggtcagaattgcagcagcaccggctgcgtcgtcgatttaaacggatcttgcccgtcggagctaagggtgaatagcgtcgacgggaaggaggcggtggcgatggcgtgtaaaagtgcgtgcgaggcgtttcggcagccggagtattgctgcagcggcgcgtttggatcgcctgacacgtgtaagccgtctacgtactcgcggatcttcaagagcgcgtgtccacgcgcctatagctacgcgtatgacgataagtctagtacatttacgtgcgcgaaatctcccaactacgtcatcactttctgtccttctcccaacaccagcctaaaatcagctgaggaacacagcacagagacaatgacgacgacaagtccaagttccggcagtacgacgtcgtcgcagatggtctacgaaggtgctctggacgaaagcagtggttcaccatctacgtatcacggcgtatcacgagcaatcacagtcgttcttctctcgcttgctttttgtcgtatgtggtggttcttctga

SEQ ID NO: 46828 - protein, 316 aa, Arabidopsis thaliana
  peptide (1)..(316): Ceres Seq. ID no. 12604594
  misc_feature (26)..(245): Pfam Name: Thaumatin family Pfam Description: Thaumatin family
  misc_feature (4)..(249): Homolog of NCBI NO: 4239765 NR Description: putative thaumatin-like protein precursor
  misc_feature (6)..(269): Homolog of NCBI NO: 1235680 NR Description: receptor serine/threonine kinase PR5K
  misc_feature (6)..(269): Homolog of NCBI NO: 15240873 NR Description: receptor serine/threonine kinase PR5K
  misc_feature (21)..(308): Homolog of NCBI NO: 37531042 NR Description: putative thaumatin-like protein
  misc_feature (8)..(307): Homolog of NCBI NO: 6273383 NR Description: SCUTL1 [Vitis vinifera]
  misc_feature (3)..(287): Homolog of NCBI NO: 15233437 NR Description: thaumatin-like protein
  misc_feature (6)..(249): Homolog of NCBI NO: 4105697 NR Description: thaumatin-like protein [Arabidopsis thaliana]
  misc_feature (6)..(316): Homolog of NCBI NO: 15222875 NR Description: thaumatin, putative
  misc_feature (18)..(316): Homolog of NCBI NO: 30686652 NR Description: thaumatin family [Arabidopsis thaliana]
  misc_feature (1)..(316): Homolog of NCBI NO: 25296204 NR Description: hypothetical protein T20H2.19 [imported] -
MALTFFFLLSNLFFSGVMSRSFTFSNKCDYTVWPGILSNAGVSPLPTTGFVLLKGETRTINAPSSWGGRFWGRTLCSTDSDGKFSCATGDCGSGKIECSGAGAAPPATLAEFTLDGSGGLDFYDVSLVDGYNVQMLVVPQGGSGQNCSSTGCVVDLNGSCPSELRVNSVDGKEAVAMACKSACEAFRQPEYCCSGAFGSPDTCKPSTYSRIFKSACPRAYSYAYDDKSSTFTCAKSPNYVITFCPSPNTSLKSAEEHSTETMTTTSPSSGSTTSSQMVYEGALDESSGSPSTYHGVSRAITVVLLSLAFCRMWWFF

SEQ ID NO: 46829 - protein, 299 aa, Arabidopsis thaliana
  peptide (1)..(299): Ceres Seq. ID no. 12604595
  misc_feature (9)..(228): Pfam Name: Thaumatin family Pfam Description: Thaumatin family
  misc_feature (1)..(232): Homolog of NCBI NO: 4239765 NR Description: putative thaumatin-like protein precursor
  misc_feature (1)..(252): Homolog of NCBI NO: 1235680 NR Description: receptor serine/threonine kinase PR5K
  misc_feature (1)..(252): Homolog of NCBI NO: 15240873 NR Description: receptor serine/threonine kinase PR5K
  misc_feature (4)..(291): Homolog of NCBI NO: 37531042 NR Description: putative thaumatin-like protein
  misc_feature (1)..(290): Homolog of NCBI NO: 6273383 NR Description: SCUTL1 [Vitis vinifera]
  misc_feature (1)..(270): Homolog of NCBI NO: 15233437 NR Description: thaumatin-like protein
  misc_feature (1)..(232): Homolog of NCBI NO: 4105697 NR Description: thaumatin-like protein [Arabidopsis thaliana]
  misc_feature (1)..(299): Homolog of NCBI NO: 15222875 NR Description: thaumatin, putative
  misc_feature (1)..(299): Homolog of NCBI NO: 30686652 NR Description: thaumatin family [Arabidopsis thaliana]
  misc_feature (1)..(299): Homolog of NCBI NO: 25296204 NR Description: hypothetical protein T20H2.19 [imported] -
MSRSFTFSNKCDYTVWPGILSNAGVSPLPTTGFVLLKGETRTINAPSSWGGRFWGRTLCSTDSDGKFSCATGDCGSGKIECSGAGAAPPATLAEFTLDGSGGLDFYDVSLVDGYNVQMLVVPQGGSGQNCSSTGCVVDLNGSCPSELRVNSVDGKEAVAMACKSACEAFRQPEYCCSGAFGSPDTCKPSTYSRIFKSACPRAYSYAYDDKSSTFTCAKSPNYVITFCPSPNTSLKSAEEHSTETMTTTSPSSGSTTSSQMVYEGALDESSGSPSTYHGVSRAITVVLLSLAFCRMWWFF

SEQ ID NO: 46830 - protein, 182 aa, Arabidopsis thaliana
  peptide (1)..(182): Ceres Seq. ID no. 12604596
  misc_feature (1)..(111): Pfam Name: Thaumatin family Pfam Description: Thaumatin family
  misc_feature (1)..(115): Homolog of NCBI NO: 4239765 NR Description: putative thaumatin-like protein precursor
  misc_feature (1)..(135): Homolog of NCBI NO: 1235680 NR Description: receptor serine/threonine kinase PR5K
  misc_feature (1)..(135): Homolog of NCBI NO: 15240873 NR Description: receptor serine/threonine kinase PR5K
  misc_feature (1)..(174): Homolog of NCBI NO: 37531042 NR Description: putative thaumatin-like protein
  misc_feature (1)..(173): Homolog of NCBI NO: 6273383 NR Description: SCUTL1 [Vitis vinifera]
  misc_feature (1)..(153): Homolog of NCBI NO: 15233437 NR Description: thaumatin-like protein
  misc_feature (1)..(115): Homolog of NCBI NO: 4105697 NR Description: thaumatin-like protein [Arabidopsis thaliana]
  misc_feature (1)..(182): Homolog of NCBI NO: 15222875 NR Description: thaumatin, putative
  misc_feature (1)..(182): Homolog of NCBI NO: 30686652 NR Description: thaumatin family [Arabidopsis thaliana]
  misc_feature (1)..(182): Homolog of NCBI NO: 25296204 NR Description: hypothetical protein T20H2.19 [imported] -
MLVVPQGGSGQNCSSTGCVVDLNGSCPSELRVNSVDGKEAVAMACKSACEAFRQPEYCCSGAFGSPDTCKPSTYSRIFKSACPRAYSYAYDDKSSTFTCAKSPNYVITFCPSPNTSLKSAEEHSTETMTTTSPSSGSTTSSQMVYEGALDESSGSPSTYHGVSRAITVVLLSLAFCRMWWFF

SEQ ID NO: 46831 - DNA, 2829 bp, Arabidopsis thaliana
  misc_feature (1)..(2829): Ceres Seq. ID no. 13646866
  misc_feature: MA Experiment ID: 20000169 Result: Down-regulated in Transcription
  misc_feature: MA Experiment 20000169 PARAMETER Experiment Name: At_100uM_ABA_P Parameter: Age (day) Value: 14
  misc_feature: MA Experiment 20000169 PARAMETER Experiment Name: At_100uM_ABA_P Parameter: Organism Value: A. thaliana
  misc_feature: MA Experiment 20000169 PARAMETER Experiment Name: At_100uM_ABA_P Parameter: Plant Line Value: WS
  misc_feature: MA Experiment 20000169 PARAMETER Experiment Name: At_100uM_ABA_P Parameter: Timepoint (hr) Value: 6
  misc_feature: MA Experiment 20000169 PARAMETER Experiment Name: At_100uM_ABA_P Parameter: Tissue Value: Aerial
  misc_feature: MA Experiment 20000169 PARAMETER Experiment Name: At_100uM_ABA_P Parameter: Treatment Value: 100uM ABA vs. No Treatment
  misc_feature: MA Experiment ID: 20000179 Result: Up-regulated in Transcription
  misc_feature: MA Experiment 20000179 PARAMETER Experiment Name: At_Germinating_Seeds_P Parameter: Age (hr) Value: 6 vs. 0
  misc_feature: MA Experiment 20000179 PARAMETER Experiment Name: At_Germinating_Seeds_P Parameter: Tissue Value: Germinating Seeds
  misc_feature: MA Experiment ID: 20000180 Result: Up-regulated in Transcription
  misc_feature: MA Experiment 20000180 PARAMETER Experiment Name: At_Germinating_Seeds_P Parameter: Age (hr) Value: 24 vs. 0
  misc_feature: MA Experiment 20000180 PARAMETER Experiment Name: At_Germinating_Seeds_P Parameter: Tissue Value: Germinating Seeds
  misc_feature: MA Experiment ID: 20000182 Result: Down-regulated in Transcription
  misc_feature: MA Experiment 20000182 PARAMETER Experiment Name: At_2mM_SA_P Parameter: Age (day) Value: 14
  misc_feature: MA Experiment 20000182 PARAMETER Experiment Name: At_2mM_SA_P Parameter: Organism Value: A. thaliana
  misc_feature: MA Experiment 20000182 PARAMETER Experiment Name: At_2mM_SA_P Parameter: Plant Line Value: WS
  misc_feature: MA Experiment 20000182 PARAMETER Experiment Name: At_2mM_SA_P Parameter: Timepoint (hr) Value: 6
  misc_feature: MA Experiment 20000182 PARAMETER Experiment Name: At_2mM_SA_P Parameter: Tissue Value: Aerial
  misc_feature: MA Experiment 20000182 PARAMETER Experiment Name: At_2mM_SA_P Parameter: Treatment Value: 2mM SA vs. No Treatment
  misc_feature: MA Experiment ID: 20000184 Result: Up-regulated in Transcription
  misc_feature: MA Experiment 20000184 PARAMETER Experiment Name: At_Shoots__P Parameter: Age (day) Value: 7
  misc_feature: MA Experiment 20000184 PARAMETER Experiment Name: At_Shoots__P Parameter: Tissue Value: Shoots vs. Whole Plant
  misc_feature: MA Experiment ID: 20000185 Result: Up-regulated in Transcription
  misc_feature: MA Experiment 20000185 PARAMETER Experiment Name: At_Roots__P Parameter: Age (day) Value: 7 vs. 21
  misc_feature: MA Experiment 20000185 PARAMETER Experiment Name: At_Roots__P Parameter: Organism Value: A. thaliana
  misc_feature: MA Experiment 20000185 PARAMETER Experiment Name: At_Roots__P Parameter: Tissue Value: Roots vs. Whole Plant
  misc_feature: MA Experiment ID: 20000234 Result: Up-regulated in Transcription
  misc_feature: MA Experiment 20000234 PARAMETER Experiment Name: At_Siliques_P Parameter: Age (day) Value: 21
  misc_feature: MA Experiment 20000234 PARAMETER Experiment Name: At_Siliques_P Parameter: Organism Value: A. thaliana
  misc_feature: MA Experiment 20000234 PARAMETER Experiment Name: At_Siliques_P Parameter: Plant Line Value: WS
  misc_feature: MA Experiment 20000234 PARAMETER Experiment Name: At_Siliques_P Parameter: Tissue Value: Less Than 5mm Siliques vs. Whole Plant
  misc_feature: MA Experiment ID: 20000264 Result: Up-regulated in Transcription
  misc_feature: MA Experiment 20000264 PARAMETER Experiment Name: At_Open_Flower_P Parameter: Age (day) Value: 21
  misc_feature: MA Experiment 20000264 PARAMETER Experiment Name: At_Open_Flower_P Parameter: Plant Line Value: WS
  misc_feature: MA Experiment 20000264 PARAMETER Experiment Name: At_Open_Flower_P Parameter: Tissue Value: Open Flower vs. Whole Plant
  misc_feature: MA Experiment ID: 20000265 Result: Up-regulated in Transcription
  misc_feature: MA Experiment 20000265 PARAMETER Experiment Name: At_Open_Flower_P Parameter: Age (day) Value: 21
  misc_feature: MA Experiment 20000265 PARAMETER Experiment Name: At_Open_Flower_P Parameter: Plant Line Value: WS
  misc_feature: MA Experiment 20000265 PARAMETER Experiment Name: At_Open_Flower_P Parameter: Tissue Value: Closed Flower vs. Whole Plant
  misc_feature: MA Experiment ID: 20000286 Result: Up-regulated in Transcription
  misc_feature: MA Experiment 20000286 PARAMETER Experiment Name: At_Open_Flower_P Parameter: Age (day) Value: 21
  misc_feature: MA Experiment 20000286 PARAMETER Experiment Name: At_Open_Flower_P Parameter: Plant Line Value: WS
  misc_feature: MA Experiment 20000286 PARAMETER Experiment Name: At_Open_Flower_P Parameter: Tissue Value: Half Open vs. Whole Plant
  misc_feature: MA Experiment ID: 20000438 Result: Up-regulated in Transcription
  misc_feature: MA Experiment 20000438 PARAMETER Experiment Name: At_Shoots__P Parameter: Age (day) Value: 14
  misc_feature: MA Experiment 20000438 PARAMETER Experiment Name: At_Shoots__P Parameter: Tissue Value: Shoots vs. Whole Plant
  misc_feature: MA Experiment ID: 20000439 Result: Up-regulated in Transcription
  misc_feature: MA Experiment 20000439 PARAMETER Experiment Name: At_Roots__P Parameter: Age (day) Value: 14 vs. 21
  misc_feature: MA Experiment 20000439 PARAMETER Experiment Name: At_Roots__P Parameter: Organism Value: A. thaliana
  misc_feature: MA Experiment 20000439 PARAMETER Experiment Name: At_Roots__P Parameter: Tissue Value: Roots vs. Whole Plant
  misc_feature: MA Experiment ID: 20000496 Result: Up-regulated in Transcription
  misc_feature: MA Experiment 20000496 PARAMETER Experiment Name: At_Guard_Cells_P Parameter: Harvest Date Value: 7/19/2002
  misc_feature: MA Experiment 20000496 PARAMETER Experiment Name: At_Guard_Cells_P Parameter: Organism Value: Canola
  misc_feature: MA Experiment 20000496 PARAMETER Experiment Name: At_Guard_Cells_P Parameter: Tissue Value: Guard Cells vs. Leaves
  misc_feature: MA Experiment ID: 20001247 Result: Down-regulated in Transcription
  misc_feature: MA Experiment 20001247 PARAMETER Experiment Name: At_Far-red-induction_P Parameter: Age (day) Value: 7
  misc_feature: MA Experiment 20001247 PARAMETER Experiment Name: At_Far-red-induction_P Parameter: Light Value: Far-red vs. White
  misc_feature: MA Experiment 20001247 PARAMETER Experiment Name: At_Far-red-induction_P Parameter: Organism Value: A. thaliana
  misc_feature: MA Experiment 20001247 PARAMETER Experiment Name: At_Far-red-induction_P Parameter: Plant Line Value: Columbia
  misc_feature: MA Experiment 20001247 PARAMETER Experiment Name: At_Far-red-induction_P Parameter: Timepoint (hr) Value: 1
  misc_feature: MA Experiment 20001247 PARAMETER Experiment Name: At_Far-red-induction_P Parameter: Tissue Value: Whole Plant
  misc_feature: MA Experiment ID: 20001248 Result: Down-regulated in Transcription
  misc_feature: MA Experiment 20001248 PARAMETER Experiment Name: At_Far-red-induction_P Parameter: Age (day) Value: 7
  misc_feature: MA Experiment 20001248 PARAMETER Experiment Name: At_Far-red-induction_P Parameter: Light Value: Far-red vs. White
  misc_feature: MA Experiment 20001248 PARAMETER Experiment Name: At_Far-red-induction_P Parameter: Organism Value: A. thaliana
  misc_feature: MA Experiment 20001248 PARAMETER Experiment Name: At_Far-red-induction_P Parameter: Plant Line Value: Columbia
  misc_feature: MA Experiment 20001248 PARAMETER Experiment Name: At_Far-red-induction_P Parameter: Timepoint (hr) Value: 4
  misc_feature: MA Experiment 20001248 PARAMETER Experiment Name: At_Far-red-induction_P Parameter: Tissue Value: Whole Plant
  misc_feature: MA Experiment ID: 20001450 Result: Down-regulated in Transcription
  misc_feature: MA Experiment 20001450 PARAMETER Experiment Name: At_Far-red-induction_P Parameter: Age (day) Value: 7
  misc_feature: MA Experiment 20001450 PARAMETER Experiment Name: At_Far-red-induction_P Parameter: Light Value: Far-red vs. White
  misc_feature: MA Experiment 20001450 PARAMETER Experiment Name: At_Far-red-induction_P Parameter: Organism Value: A. thaliana
  misc_feature: MA Experiment 20001450 PARAMETER Experiment Name: At_Far-red-induction_P Parameter: Plant Line Value: Columbia
  misc_feature: MA Experiment 20001450 PARAMETER Experiment Name: At_Far-red-induction_P Parameter: Timepoint (hr) Value: 8
  misc_feature: MA Experiment 20001450 PARAMETER Experiment Name: At_Far-red-induction_P Parameter: Tissue Value: Whole Plant
  misc_feature: MA Experiment ID: 20001451 Result: Down-regulated in Transcription
  misc_feature: MA Experiment 20001451 PARAMETER Experiment Name: At_Far-red-induction_P Parameter: Age (day) Value: 7
  misc_feature: MA Experiment 20001451 PARAMETER Experiment Name: At_Far-red-induction_P Parameter: Light Value: Far-red vs. White
  misc_feature: MA Experiment 20001451 PARAMETER Experiment Name: At_Far-red-induction_P Parameter: Organism Value: A. thaliana
  misc_feature: MA Experiment 20001451 PARAMETER Experiment Name: At_Far-red-induction_P Parameter: Plant Line Value: Columbia
  misc_feature: MA Experiment 20001451 PARAMETER Experiment Name: At_Far-red-induction_P Parameter: Timepoint (hr) Value: 24
  misc_feature: MA Experiment 20001451 PARAMETER Experiment Name: At_Far-red-induction_P Parameter: Tissue Value: Whole Plant
  misc_feature: MA Experiment ID: 20001911 Result: Down-regulated in Transcription
  misc_feature: MA Experiment 20001911 PARAMETER Experiment Name: At_Drought_Reproduction_P Parameter: Age (day) Value: 40
  misc_feature: MA Experiment 20001911 PARAMETER Experiment Name: At_Drought_Reproduction_P Parameter: Organism Value: A. thaliana
  misc_feature: MA Experiment 20001911 PARAMETER Experiment Name: At_Drought_Reproduction_P Parameter: Plant Line Value: WS
  misc_feature: MA Experiment 20001911 PARAMETER Experiment Name: At_Drought_Reproduction_P Parameter: Timepoint (day) Value: 10
  misc_feature: MA Experiment 20001911 PARAMETER Experiment Name: At_Drought_Reproduction_P Parameter: Tissue Value: Flowers
  misc_feature: MA Experiment 20001911 PARAMETER Experiment Name: At_Drought_Reproduction_P Parameter: Treatment Value: Drought vs. No Drought
aagccgctcgttcttcgagacaaaacacactacactctttctctctcactcactcttcatctcttttcttctttctctctctcctaaaaatccgacgaaattatgattcactttaccttttaatcaggaatatccctgtttcacccttcttcttcttcttcttcttcttcttcctcgtgttttttttccataacattccctctgaatcttcgttttttattggaaagaaacaatctaatccaagttcaagggttttctcatcttcagtggctgaagttatgagctttacaagatgggaagtgttctttggtctctctgttttagccttgacaatgcctttctcagctggagttactaatctacgagatgtttcggcgattaataacttgtatatcactttgggagcaccatctctacatcattggcttgcttttggaggagacccttgtggagaaaagtggcaaggtgtggtgtgtgactcctcaaacatcacagaaataaggatacctggcatgaaggtaggtggaggcttaagtgatactctggctgatttttcatctatccaagtcatggacttcagtagcaatcatatttcagggacaattccgcaggctttgccttcttccatccgaaacctatctctctcaagcaatcgcttcactgggaacattccctttacattgtcctttctatccgatttgtctgaactgtcattgggaagcaatcttctatcaggagagataccagattactttcagcagctatcaaaactgacaaaactggacttatcgtctaacatactggaggggcatttaccttcttccatgggagacttagcttctcttaagatattgtatttgcaggacaacaagctcacaggaacacttgatgttatagaggatcttttcttaaccgatttgaatgtagaaaacaacttattctcgggacctataccgccaaatctattgaaaattccaaacttcaaaaaagatggaactccgttcaatacatcgattataacaccaccgcctccgcctgtggttgatcctcctcccgctactcaccgtgctcctcctgttccccgtatccctcctgtttctggtgttcccccagcaccttttgctccttttgctccactgcaaccacaacaacatccaccaccatcaccacctctggtctggtcaccaccttcttctgataatggaggaggagatccctggaactctgtgtcagggcaacctaccttgcaaatatcacctccttcaggttcaggatcaggaaaattctggtccactcaaagaatcattctagtagtttcttcagtggccataattgttcttgtatccggtttgtgtgttacactttggagatgttgcagaagtaaaatatataaccgatattacagtggagctcgtaaagatttacaacgaccatacttcaataagcctccatctcaaccaacccccactatgggaaaagtttctcgggagcctatggttaagcctttcgatggatatggagctggagacaggaaatatgggtatccaatgccacagcgggctgaagagagccggagagcaatgcctcctacttcatattataataaggatgttaatacacctcaaaagccgctgcaacaaccaccgaggcagttccagtccaatgatactgcttcaaagagagcggctcatttccccccgggcttgaattcctcatcttctgctactgttttcaccattgcttcacttcagcaatacacaaataatttctcagaagagaatataatcggggaagggtcgattggtaatgtctacagagctgagcttcgtcatggaaagtttcttgcggtgaagaagctgagcaataccatcaacagaacacagagtgacggcgaattcctcaatctagtctccaatgtgttgaagcttaaacgcggtcatatattggagcttcttggttactgtaacgagtttggtcaaaggttacttgtgtatgagtactgtcctaatggatcacttcaagatgcactacatttggatcgcaagttgcacaagaagctcacttggaatgtacgtataaatattgcattaggagcttcaaaggcattgcagtttcttcatgaggtatgtcaaccgccggttgttcaccagaatttcaagtcttccaaggttcttcttgatggaaagctctcagtacgtgttgcagacagcggtttggcttatatgttaccaccacgcccaacgagtcagatggcgggttatgccgctcctgaggttgagtatggaagctacacttgtcagagcgacgtatttagccttggggttgtaatgttagaactgctcactggacgcagaccatttgacaggacaaggccgaggggacatcaaacactagctcagtgggcgattcctcggcttcatgacatcgatgcgttgacaagaatggttgatccgtcattacacggagcgtatccaatgaaatcattgtcacgttttgcagatatcatatcacgttcactgcagatggaaccaggatttagaccgccgatatcagaaatagtccaagatcttcaacatatgatctaagatacacaaccttggactaagacgcagaagcaatagtttattgtcagattcttgttctttgtcctttgatgaatgaaagtatttcttttgtattataataacactttatgtatgttgttggctgtatgaaatgagctatgggatcatcattatgtaaccccaatcccattaccggctcaaacattattcaccaacctgatcatgtatttagattctattttctgaaaaggataaacatttttcg

SEQ ID NO: 46832 - protein, 860 aa, Arabidopsis thaliana
  peptide (1)..(860): Ceres Seq. ID no. 13646867
  misc_feature (500)..(860): Homolog of NCBI NO: 15217283 NR Description: Putative leucine-rich repeat transmembrane
  misc_feature (113)..(354): Homolog of NCBI NO: 7489784 NR Description: leucine-rich repeat transmembrane protein kinase
  misc_feature (537)..(860): Homolog of NCBI NO: 7489784 NR Description: leucine-rich repeat transmembrane protein kinase
  misc_feature (122)..(354): Homolog of NCBI NO: 7489783 NR Description: leucine-rich repeat transmembrane protein kinase
  misc_feature (537)..(860): Homolog of NCBI NO: 7489783 NR Description: leucine-rich repeat transmembrane protein kinase
  misc_feature (115)..(355): Homolog of NCBI NO: 29367551 NR Description: putative leucine-rich repeat transmembrane
  misc_feature (500)..(860): Homolog of NCBI NO: 29367551 NR Description: putative leucine-rich repeat transmembrane
  misc_feature (577)..(860): Homolog of NCBI NO: 25411997 NR Description: probable LRR receptor protein kinase
  misc_feature (101)..(397): Homolog of NCBI NO: 25411997 NR Description: probable LRR receptor protein kinase
  misc_feature (326)..(860): Homolog of NCBI NO: 1931637 NR Description: receptor-associated kinase isolog; 3024-808
AARSSRQNTLHSFSLTHSSSLFFFLSLLKIRRNYDSLYLLIRNIPVSPFFFFFFFFFLVFFFHNIPSESSFFIGKKQSNPSSRVFSSSVAEVMSFTRWEVFFGLSVLALTMPFSAGVTNLRDVSAINNLYITLGAPSLHHWLAFGGDPCGEKWQGVVCDSSNITEIRIPGMKVGGGLSDTLADFSSIQVMDFSSNHISGTIPQALPSSIRNLSLSSNRFTGNIPFTLSFLSDLSELSLGSNLLSGEIPDYFQQLSKLTKLDLSSNILEGHLPSSMGDLASLKILYLQDNKLTGTLDVIEDLFLTDLNVENNLFSGPIPPNLLKIPNFKKDGTPFNTSIITPPPPPVVDPPPATHRAPPVPRIPPVSGVPPAPFAPFAPLQPQQHPPPSPPLVWSPPSSDNGGGDPWNSVSGQPTLQISPPSGSGSGKFWSTQRIILVVSSVAIIVLVSGLCVTLWRCCRSKIYNRYYSGARKDLQRPYFNKPPSQPTPTMGKVSREPMVKPFDGYGAGDRKYGYPMPQRAEESRRAMPPTSYYNKDVNTPQKPLQQPPRQFQSNDTASKRAAHFPPGLNSSSSATVFTIASLQQYTNNFSEENIIGEGSIGNVYRAELRHGKFLAVKKLSNTINRTQSDGEFLNLVSNVLKLKRGHILELLGYCNEFGQRLLVYEYCPNGSLQDALHLDRKLHKKLTWNVRINIALGASKALQFLHEVCQPPVVHQNFKSSKVLLDGKLSVRVADSGLAYMLPPRPTSQMAGYAAPEVEYGSYTCQSDVFSLGVVMLELLTGRRPFDRTRPRGHQTLAQWAIPRLHDIDALTRMVDPSLHGAYPMKSLSRFADIISRSLQMEPGFRPPISEIVQDLQHMI

SEQ ID NO: 46833 - protein, 768 aa, Arabidopsis thaliana
  peptide (1)..(768): Ceres Seq. ID no. 13646868
  misc_feature (408)..(768): Homolog of NCBI NO: 15217283 NR Description: Putative leucine-rich repeat transmembrane
  misc_feature (21)..(262): Homolog of NCBI NO: 7489784 NR Description: leucine-rich repeat transmembrane protein kinase
  misc_feature (445)..(768): Homolog of NCBI NO: 7489784 NR Description: leucine-rich repeat transmembrane protein kinase
  misc_feature (30)..(262): Homolog of NCBI NO: 7489783 NR Description: leucine-rich repeat transmembrane protein kinase
  misc_feature (445)..(768): Homolog of NCBI NO: 7489783 NR Description: leucine-rich repeat transmembrane protein kinase
  misc_feature (23)..(263): Homolog of NCBI NO: 29367551 NR Description: putative leucine-rich repeat transmembrane
  misc_feature (408)..(768): Homolog of NCBI NO: 29367551 NR Description: putative leucine-rich repeat transmembrane
  misc_feature (485)..(768): Homolog of NCBI NO: 25411997 NR Description: probable LRR receptor protein kinase
  misc_feature (9)..(305): Homolog of NCBI NO: 25411997 NR Description: probable LRR receptor protein kinase
  misc_feature (234)..(768): Homolog of NCBI NO: 1931637 NR Description: receptor-associated kinase isolog; 3024-808
MSFTRWEVFFGLSVLALTMPFSAGVTNLRDVSAINNLYITLGAPSLHHWLAFGGDPCGEKWQGVVCDSSNITEIRIPGMKVGGGLSDTLADFSSIQVMDFSSNHISGTIPQALPSSIRNLSLSSNRFTGNIPFTLSFLSDLSELSLGSNLLSGEIPDYFQQLSKLTKLDLSSNILEGHLPSSMGDLASLKILYLQDNKLTGTLDVIEDLFLTDLNVENNLFSGPIPPNLLKIPNFKKDGTPFNTSIITPPPPPVVDPPPATHRAPPVPRIPPVSGVPPAPFAPFAPLQPQQHPPPSPPLVWSPPSSDNGGGDPWNSVSGQPTLQISPPSGSGSGKFWSTQRIILVVSSVAIIVLVSGLCVTLWRCCRSKIYNRYYSGARKDLQRPYFNKPPSQPTPTMGKVSREPMVKPFDGYGAGDRKYGYPMPQRAEESRRAMPPTSYYNKDVNTPQKPLQQPPRQFQSNDTASKRAAHFPPGLNSSSSATVFTIASLQQYTNNFSEENIIGEGSIGNVYRAELRHGKFLAVKKLSNTINRTQSDGEFLNLVSNVLKLKRGHILELLGYCNEFGQRLLVYEYCPNGSLQDALHLDRKLHKKLTWNVRINIALGASKALQFLHEVCQPPVVHQNFKSSKVLLDGKLSVRVADSGLAYMLPPRPTSQMAGYAAPEVEYGSYTCQSDVFSLGVVMLELLTGRRPFDRTRPRGHQTLAQWAIPRLHDIDALTRMVDPSLHGAYPMKSLSRFADIISRSLQMEPGFRPPISEIVQDLQHMI

SEQ ID NO: 46834 - protein, 750 aa, Arabidopsis thaliana
  peptide (1)..(750): Ceres Seq. ID no. 13646869
  misc_feature (390)..(750): Homolog of NCBI NO: 15217283 NR Description: Putative leucine-rich repeat transmembrane
  misc_feature (3)..(244): Homolog of NCBI NO: 7489784 NR Description: leucine-rich repeat transmembrane protein kinase
  misc_feature (427)..(750): Homolog of NCBI NO: 7489784 NR Description: leucine-rich repeat transmembrane protein kinase
  misc_feature (12)..(244): Homolog of NCBI NO: 7489783 NR Description: leucine-rich repeat transmembrane protein kinase
  misc_feature (427)..(750): Homolog of NCBI NO: 7489783 NR Description: leucine-rich repeat transmembrane protein kinase
  misc_feature (5)..(245): Homolog of NCBI NO: 29367551 NR Description: putative leucine-rich repeat transmembrane
  misc_feature (390)..(750): Homolog of NCBI NO: 29367551 NR Description: putative leucine-rich repeat transmembrane
  misc_feature (467)..(750): Homolog of NCBI NO: 25411997 NR Description: probable LRR receptor protein kinase
  misc_feature (1)..(287): Homolog of NCBI NO: 25411997 NR Description: probable LRR receptor protein kinase
  misc_feature (216)..(750): Homolog of NCBI NO: 1931637 NR Description: receptor-associated kinase isolog; 3024-808
MPFSAGVTNLRDVSAINNLYITLGAPSLHHWLAFGGDPCGEKWQGVVCDSSNITEIRIPGMKVGGGLSDTLADFSSIQVMDFSSNHISGTIPQALPSSIRNLSLSSNRFTGNIPFTLSFLSDLSELSLGSNLLSGEIPDYFQQLSKLTKLDLSSNILEGHLPSSMGDLASLKILYLQDNKLTGTLDVIEDLFLTDLNVENNLFSGPIPPNLLKIPNFKKDGTPFNTSIITPPPPPVVDPPPATHRAPPVPRIPPVSGVPPAPFAPFAPLQPQQHPPPSPPLVWSPPSSDNGGGDPWNSVSGQPTLQISPPSGSGSGKFWSTQRIILVVSSVAIIVLVSGLCVTLWRCCRSKIYNRYYSGARKDLQRPYFNKPPSQPTPTMGKVSREPMVKPFDGYGAGDRKYGYPMPQRAEESRRAMPPTSYYNKDVNTPQKPLQQPPRQFQSNDTASKRAAHFPPGLNSSSSATVFTIASLQQYTNNFSEENIIGEGSIGNVYRAELRHGKFLAVKKLSNTINRTQSDGEFLNLVSNVLKLKRGHILELLGYCNEFGQRLLVYEYCPNGSLQDALHLDRKLHKKLTWNVRINIALGASKALQFLHEVCQPPVVHQNFKSSKVLLDGKLSVRVADSGLAYMLPPRPTSQMAGYAAPEVEYGSYTCQSDVFSLGVVMLELLTGRRPFDRTRPRGHQTLAQWAIPRLHDIDALTRMVDPSLHGAYPMKSLSRFADIISRSLQMEPGFRPPISEIVQDLQHMI

SEQ ID NO: 46835 - DNA, 2045 bp, Arabidopsis thaliana; identical to SEQ ID NO: 44129
  misc_feature (1)..(2045): Ceres Seq. ID no. 13504748
  misc_feature: MA Experiment ID: 20000069 Result: Down-regulated in Transcription
  misc_feature: MA Experiment 20000069 PARAMETER Experiment Name: At_100uM_ABA_Mutants_cDNA_P Parameter: Plant Line Value: CS23
  misc_feature: MA Experiment 20000069 PARAMETER Experiment Name: At_100uM_ABA_Mutants_cDNA_P Parameter: Timepoint (hr) Value: 6
  misc_feature: MA Experiment 20000069 PARAMETER Experiment Name: At_100uM_ABA_Mutants_cDNA_P Parameter: Tissue Value: Aerial
  misc_feature: MA Experiment 20000069 PARAMETER Experiment Name: At_100uM_ABA_Mutants_cDNA_P Parameter: Treatment Value: 100uM ABA vs. No Treatment
  misc_feature: MA Experiment ID: 20000070 Result: Down-regulated in Transcription
  misc_feature: MA Experiment 20000070 PARAMETER Experiment Name: At_100uM_ABA_Mutants_cDNA_P Parameter: Plant Line Value: CS24
  misc_feature: MA Experiment 20000070 PARAMETER Experiment Name: At_100uM_ABA_Mutants_cDNA_P Parameter: Timepoint (hr) Value: 6
  misc_feature: MA Experiment 20000070 PARAMETER Experiment Name: At_100uM_ABA_Mutants_cDNA_P Parameter: Tissue Value: Aerial
  misc_feature: MA Experiment 20000070 PARAMETER Experiment Name: At_100uM_ABA_Mutants_cDNA_P Parameter: Treatment Value: 100uM ABA vs. No Treatment
  misc_feature: MA Experiment ID: 20000071 Result: Down-regulated in Transcription
  misc_feature: MA Experiment 20000071 PARAMETER Experiment Name: At_100uM_ABA_Mutants_cDNA_P Parameter: Plant Line Value: CS8104
  misc_feature: MA Experiment 20000071 PARAMETER Experiment Name: At_100uM_ABA_Mutants_cDNA_P Parameter: Timepoint (hr) Value: 6
  misc_feature: MA Experiment 20000071 PARAMETER Experiment Name: At_100uM_ABA_Mutants_cDNA_P Parameter: Tissue Value: Aerial
  misc_feature: MA Experiment 20000071 PARAMETER Experiment Name: At_100uM_ABA_Mutants_cDNA_P Parameter: Treatment Value: 100uM ABA vs. No Treatment
  misc_feature: MA Experiment ID: 20000086 Result: Down-regulated in Transcription
  misc_feature: MA Experiment 20000086 PARAMETER Experiment Name: At_100uM_ABA_Mutants_cDNA_P Parameter: Plant Line Value: CS22
  misc_feature: MA Experiment 20000086 PARAMETER Experiment Name: At_100uM_ABA_Mutants_cDNA_P Parameter: Timepoint (hr) Value: 6
  misc_feature: MA Experiment 20000086 PARAMETER Experiment Name: At_100uM_ABA_Mutants_cDNA_P Parameter: Tissue Value: Aerial
  misc_feature: MA Experiment 20000086 PARAMETER Experiment Name: At_100uM_ABA_Mutants_cDNA_P Parameter: Treatment Value: 100uM ABA vs. No Treatment
  misc_feature: MA Experiment ID: 20000089 Result: Down-regulated in Transcription
  misc_feature: MA Experiment ID: 20000090 Result: Down-regulated in Transcription
  misc_feature: MA Experiment ID: 20000117 Result: Down-regulated in Transcription
  misc_feature: MA Experiment 20000117 PARAMETER Experiment Name: At_100uM_ABA_Mutants_cDNA_P Parameter: Plant Line Value: Columbia
  misc_feature: MA Experiment 20000117 PARAMETER Experiment Name: At_100uM_ABA_Mutants_cDNA_P Parameter: Timepoint (hr) Value: 6
  misc_feature: MA Experiment 20000117 PARAMETER Experiment Name: At_100uM_ABA_Mutants_cDNA_P Parameter: Tissue Value: Aerial
  misc_feature: MA Experiment 20000117 PARAMETER Experiment Name: At_100uM_ABA_Mutants_cDNA_P Parameter: Treatment Value: 100uM ABA vs. No Treatment
  misc_feature: MA Experiment ID: 20000438 Result: Up-regulated in Transcription
  misc_feature: MA Experiment 20000438 PARAMETER Experiment Name: At_Shoots__P Parameter: Age (day) Value: 14
  misc_feature: MA Experiment 20000438 PARAMETER Experiment Name: At_Shoots__P Parameter: Tissue Value: Shoots vs. Whole Plant
  misc_feature: MA Experiment ID: 20001911 Result: Up-regulated in Transcription
  misc_feature: MA Experiment 20001911 PARAMETER Experiment Name: At_Drought_Reproduction_P Parameter: Age (day) Value: 40
  misc_feature: MA Experiment 20001911 PARAMETER Experiment Name: At_Drought_Reproduction_P Parameter: Organism Value: A. thaliana
  misc_feature: MA Experiment 20001911 PARAMETER Experiment Name: At_Drought_Reproduction_P Parameter: Plant Line Value: WS
  misc_feature: MA Experiment 20001911 PARAMETER Experiment Name: At_Drought_Reproduction_P Parameter: Timepoint (day) Value: 10
  misc_feature: MA Experiment 20001911 PARAMETER Experiment Name: At_Drought_Reproduction_P Parameter: Tissue Value: Flowers
  misc_feature: MA Experiment 20001911 PARAMETER Experiment Name: At_Drought_Reproduction_P Parameter: Treatment Value: Drought vs. No Drought

SEQ ID NO: 46836 - protein, 578 aa, Arabidopsis thaliana; identical to SEQ ID NO: 44130
  peptide (1)..(578): Ceres Seq. ID no. 13504749
  misc_feature (102)..(419): Pfam Name: Pyridine nucleotide-disulphide oxidoreductase Pfam Description: Pyridine nucleotide-disulphide oxidoreductase
  misc_feature (102)..(419): Pfam Name: Pyridine nucleotide-disulphide oxidoreductase Pfam Description: Pyridine nucleotide-disulphide oxidoreductase
  misc_feature (102)..(419): Pfam Name: Pyridine nucleotide-disulphide oxidoreductase Pfam Description: Pyridine nucleotide-disulphide oxidoreductase
  misc_feature (16)..(578): Homolog of NCBI NO: 1708059 NR Description: Glutathione reductase, chloroplast precursor (GR)
  misc_feature (16)..(578): Homolog of NCBI NO: 2425107 NR Description: glutathione reductase (NADPH) [Vitis vinifera]
  misc_feature (14)..(575): Homolog of NCBI NO: 4704611 NR Description: glutathione reductase [Brassica juncea]
  misc_feature (16)..(578): Homolog of NCBI NO: 1708059 NR Description: Glutathione reductase, chloroplast precursor (GR)
  misc_feature (14)..(575): Homolog of NCBI NO: 4704611 NR Description: glutathione reductase [Brassica juncea]
  misc_feature (14)..(578): Homolog of NCBI NO: 15451194 NR Description: Gluthatione reductase, chloroplast precursor
  misc_feature (16)..(578): Homolog of NCBI NO: 2425107 NR Description: glutathione reductase (NADPH) [Vitis vinifera]
  misc_feature (14)..(578): Homolog of NCBI NO: 15232559 NR Description: gluthatione reductase, chloroplast [Arabidopsis
  misc_feature (14)..(578): Homolog of NCBI NO: 15451194 NR Description: Gluthatione reductase, chloroplast precursor
  misc_feature (14)..(575): Homolog of NCBI NO: 13448672 NR Description: glutathione reductase [Brassica juncea]
  misc_feature (14)..(575): Homolog of NCBI NO: 4704611 NR Description: glutathione reductase [Brassica juncea]
  misc_feature (16)..(578): Homolog of NCBI NO: 1708059 NR Description: Glutathione reductase, chloroplast precursor (GR)
  misc_feature (14)..(578): Homolog of NCBI NO: 15232559 NR Description: gluthatione reductase, chloroplast [Arabidopsis
  misc_feature (14)..(575): Homolog of NCBI NO: 13448672 NR Description: glutathione reductase [Brassica juncea]
  misc_feature (16)..(578): Homolog of NCBI NO: 2425107 NR Description: glutathione reductase (NADPH) [Vitis vinifera]
  misc_feature (14)..(575): Homolog of NCBI NO: 13448672 NR Description: glutathione reductase [Brassica juncea]
  misc_feature (14)..(578): Homolog of NCBI NO: 15451194 NR Description: Gluthatione reductase, chloroplast precursor
  misc_feature (14)..(578): Homolog of NCBI NO: 15232559 NR Description: gluthatione reductase, chloroplast [Arabidopsis

SEQ ID NO: 46837 - protein, 565 aa, Arabidopsis thaliana; identical to SEQ ID NO: 44131
  peptide (1)..(565): Ceres Seq. ID no. 13504750
  misc_feature (89)..(406): Pfam Name: Pyridine nucleotide-disulphide oxidoreductase Pfam Description: Pyridine nucleotide-disulphide oxidoreductase
  misc_feature (89)..(406): Pfam Name: Pyridine nucleotide-disulphide oxidoreductase Pfam Description: Pyridine nucleotide-disulphide oxidoreductase
  misc_feature (89)..(406): Pfam Name: Pyridine nucleotide-disulphide oxidoreductase Pfam Description: Pyridine nucleotide-disulphide oxidoreductase
  misc_feature (3)..(565): Homolog of NCBI NO: 1708059 NR Description: Glutathione reductase, chloroplast precursor (GR)
  misc_feature (3)..(565): Homolog of NCBI NO: 2425107 NR Description: glutathione reductase (NADPH) [Vitis vinifera]
  misc_feature (1)..(562): Homolog of NCBI NO: 4704611 NR Description: glutathione reductase [Brassica juncea]
  misc_feature (3)..(565): Homolog of NCBI NO: 1708059 NR Description: Glutathione reductase, chloroplast precursor (GR)
  misc_feature (1)..(562): Homolog of NCBI NO: 4704611 NR Description: glutathione reductase [Brassica juncea]
  misc_feature (1)..(565): Homolog of NCBI NO: 15451194 NR Description: Gluthatione reductase, chloroplast precursor
  misc_feature (3)..(565): Homolog of NCBI NO: 2425107 NR Description: glutathione reductase (NADPH) [Vitis vinifera]
  misc_feature (1)..(565): Homolog of NCBI NO: 15232559 NR Description: gluthatione reductase, chloroplast [Arabidopsis
  misc_feature (1)..(565): Homolog of NCBI NO: 15451194 NR Description: Gluthatione reductase, chloroplast precursor
  misc_feature (1)..(562): Homolog of NCBI NO: 13448672 NR Description: glutathione reductase [Brassica juncea]
  misc_feature (1)..(562): Homolog of NCBI NO: 4704611 NR Description: glutathione reductase [Brassica juncea]
  misc_feature (3)..(565): Homolog of NCBI NO: 1708059 NR Description: Glutathione reductase, chloroplast precursor (GR)
  misc_feature (1)..(565): Homolog of NCBI NO: 15232559 NR Description: gluthatione reductase, chloroplast [Arabidopsis
  misc_feature (1)..(562): Homolog of NCBI NO: 13448672 NR Description: glutathione reductase [Brassica juncea]
  misc_feature (3)..(565): Homolog of NCBI NO: 2425107 NR Description: glutathione reductase (NADPH) [Vitis vinifera]
  misc_feature (1)..(562): Homolog of NCBI NO: 13448672 NR Description: glutathione reductase [Brassica juncea]
  misc_feature (1)..(565): Homolog of NCBI NO: 15451194 NR Description: Gluthatione reductase, chloroplast precursor
  misc_feature (1)..(565): Homolog of NCBI NO: 15232559 NR Description: gluthatione reductase, chloroplast [Arabidopsis

SEQ ID NO: 46838 - DNA, 2298 bp, Arabidopsis thaliana
  misc_feature (1)..(2298): Ceres Seq. ID no. 13646870
  misc_feature: MA Experiment ID: 20000185 Result: Down-regulated in Transcription
  misc_feature: MA Experiment 20000185 PARAMETER Experiment Name: At_Roots__P Parameter: Age (day) Value: 7 vs. 21
  misc_feature: MA Experiment 20000185 PARAMETER Experiment Name: At_Roots__P Parameter: Organism Value: A. thaliana
  misc_feature: MA Experiment 20000185 PARAMETER Experiment Name: At_Roots__P Parameter: Tissue Value: Roots vs. Whole Plant
  misc_feature: MA Experiment ID: 20000437 Result: Down-regulated in Transcription
  misc_feature: MA Experiment 20000437 PARAMETER Experiment Name: At_Drought_P Parameter: Age (day) Value: 8
  misc_feature: MA Experiment 20000437 PARAMETER Experiment Name: At_Drought_P Parameter: Organism Value: A. thaliana
  misc_feature: MA Experiment 20000437 PARAMETER Experiment Name: At_Drought_P Parameter: Plant Line Value: WS
  misc_feature: MA Experiment 20000437 PARAMETER Experiment Name: At_Drought_P Parameter: Timepoint (hr) Value: 24
  misc_feature: MA Experiment 20000437 PARAMETER Experiment Name: At_Drought_P Parameter: Tissue Value: Whole Plant
  misc_feature: MA Experiment 20000437 PARAMETER Experiment Name: At_Drought_P Parameter: Treatment Value: Drought vs. No Drought
  misc_feature: MA Experiment ID: 20000438 Result: Up-regulated in Transcription
  misc_feature: MA Experiment 20000438 PARAMETER Experiment Name: At_Shoots__P Parameter: Age (day) Value: 14
  misc_feature: MA Experiment 20000438 PARAMETER Experiment Name: At_Shoots__P Parameter: Tissue Value: Shoots vs. Whole Plant
  misc_feature: MA Experiment ID: 20000439 Result: Down-regulated in Transcription
  misc_feature: MA Experiment 20000439 PARAMETER Experiment Name: At_Roots__P Parameter: Age (day) Value: 14 vs. 21
  misc_feature: MA Experiment 20000439 PARAMETER Experiment Name: At_Roots__P Parameter: Organism Value: A. thaliana
  misc_feature: MA Experiment 20000439 PARAMETER Experiment Name: At_Roots__P Parameter: Tissue Value: Roots vs. Whole Plant
  misc_feature: MA Experiment ID: 20001451 Result: Down-regulated in Transcription
  misc_feature: MA Experiment 20001451 PARAMETER Experiment Name: At_Far-red-induction_P Parameter: Age (day) Value: 7
  misc_feature: MA Experiment 20001451 PARAMETER Experiment Name: At_Far-red-induction_P Parameter: Light Value: Far-red vs. White
  misc_feature: MA Experiment 20001451 PARAMETER Experiment Name: At_Far-red-induction_P Parameter: Organism Value: A. thaliana
  misc_feature: MA Experiment 20001451 PARAMETER Experiment Name: At_Far-red-induction_P Parameter: Plant Line Value: Columbia
  misc_feature: MA Experiment 20001451 PARAMETER Experiment Name: At_Far-red-induction_P Parameter: Timepoint (hr) Value: 24
  misc_feature: MA Experiment 20001451 PARAMETER Experiment Name: At_Far-red-induction_P Parameter: Tissue Value: Whole Plant
  misc_feature: MA Experiment ID: 20001905 Result: Down-regulated in Transcription
  misc_feature: MA Experiment 20001905 PARAMETER Experiment Name: At_Drought_Reproduction_P Parameter: Age (day) Value: 40
  misc_feature: MA Experiment 20001905 PARAMETER Experiment Name: At_Drought_Reproduction_P Parameter: Organism Value: A. thaliana
  misc_feature: MA Experiment 20001905 PARAMETER Experiment Name: At_Drought_Reproduction_P Parameter: Plant Line Value: WS
  misc_feature: MA Experiment 20001905 PARAMETER Experiment Name: At_Drought_Reproduction_P Parameter: Timepoint (day) Value: 10
  misc_feature: MA Experiment 20001905 PARAMETER Experiment Name: At_Drought_Reproduction_P Parameter: Tissue Value: Rosettes
  misc_feature: MA Experiment 20001905 PARAMETER Experiment Name: At_Drought_Reproduction_P Parameter: Treatment Value: Drought vs. No Drought
  misc_feature: MA Experiment ID: 20001906 Result: Down-regulated in Transcription
  misc_feature: MA Experiment 20001906 PARAMETER Experiment Name: At_Drought_Reproduction_P Parameter: Age (day) Value: 35
  misc_feature: MA Experiment 20001906 PARAMETER Experiment Name: At_Drought_Reproduction_P Parameter: Organism Value: A. thaliana
  misc_feature: MA Experiment 20001906 PARAMETER Experiment Name: At_Drought_Reproduction_P Parameter: Plant Line Value: WS
  misc_feature: MA Experiment 20001906 PARAMETER Experiment Name: At_Drought_Reproduction_P Parameter: Timepoint (day) Value: 5
  misc_feature: MA Experiment 20001906 PARAMETER Experiment Name: At_Drought_Reproduction_P Parameter: Tissue Value: Siliques
  misc_feature: MA Experiment 20001906 PARAMETER Experiment Name: At_Drought_Reproduction_P Parameter: Treatment Value: Drought vs. No Drought
gggataagaaaatcaaaaaaaggattctctttttctctctttcttctcacttctctctgtagttagtgtgtctctctcgccggccgatatggccgcctccgtagcaaactgctgcttctccgtcctcaatgcctccgttaaaattcaatcttcgtccatctcctcaccgtggtgtttcgtgtccgcatcgtcgttgactccccgagcttcctccaatattaagaggaaatcgtcgaggtctgattcaccatctcctatattaaacccagagaagaattacccaggtagagttcgagatgaaagttccaatcctcctcaaaaaatggctttcaaggcttttgggtcacccaaaaaggagaaaaaagagtctctttctgattttagtcgagaccaacagactgatcctgccaagattcacgatgcatcctttctcaacgctgttgtcaaggtttattgcactcatactgctcctgattactccctcccatggcagaagcaaaggcaatttactagtactggaagtgcttttatgattggagatggcaagctcttgaccaatgcccattgtgtcgaacacgatacacaggttaaagttaagagaaggggagatgatcgaaagtatgtggctaaggttttagttaggggtgtggactgtgacattgctttgctttccgtagaaagcgaggatttctggaaaggagctgaaccactacggctgggccatttaccccgccttcaggattcagttactgtcgtgggatatcctcttggaggagatacaatctctgttacaaaaggggttgtatcacgtatagaggtaacatcttacgctcatggatcatccgacttgcttggaattcaaatcgacgctgctataaatccagggaatagtggtggccctgcattcaacgaccagggggaatgtattggagtagcattccaggtttacagatccgaagaaactgaaaatattggatatgtgattccaacaaccgttgtttctcactttttgactgattatgagaggaacggaaagtacactggttacccttgccttggagtattgctgcagaaattagaaaatccagctctgcgggagtgcctcaaagttcctacaaatgagggggttctggtgcgaagagttgaacctacatctgatgcaagtaaagtcctgaaagagggagatgtgattgtaagttttgatgatctacatgtgggatgtgaaggaactgtacccttccgatctagtgaacgcattgcattccgttatctcatcagtcaaaaatttgcaggtgatatcgctgagattggtatcattagagcaggagaacataagaaagttcaagtagttctaaggccacgagtgcacctggtaccgtaccatattgatggaggtcagccatcatacattatagttgctggtttggtgtttactccgctctcagaacccctgatagaggaggagtgtgaggataccataggcttgaaattgttaacaaaggcacgctactctgtggcaaggttcagaggagaacaaatcgtcatcctatcacaggtattggcaaatgaagtaaacatcggctatgaggacatgaataaccagcaggtcctgaagttcaatggaattccaataagaaacatccatcacttggcacatctcattgatatgtgcaaagataagtatctagtttttgagttcgaagacaactatgttgctgtgttggagagagaagcttcaaattctgcttccttgtgcatcctcaaagattatggaattccctcggaaagatccgctgatctgctcgagccatatgttgatccaatagatgacacccaagcgcttgaccaaggtattggagacagccctgtgtcaaatctggaaatcggctttgatggactggtgtgggcataaaatattcgaaaaggcgtccgcagatggaaaccactgaaagctcatacagcttccccgaacatatgggaaagctttcagcttcatcctcattcataaggtcttgtgctgctcaaactcaaagtttagtgaattctttcttctttattcaaacctctatggattgagtttaatagaaagttggccatgagaatgctcggccattgtgttcagatgaatgtatactgctaaaagcattgccagaatctcgacaaaagtcaacaaattattcagtgtctgattttctatgagaaaatgaaatgcagcaatgtcttctgtgactgtaatatatatatatatatatatatatatatatatatatatcagtgaatcggtgcttcctttttacc

SEQ ID NO: 46839 - protein, 607 aa, Arabidopsis thaliana
  peptide (1)..(607): Ceres Seq. ID no. 13646871
  misc_feature (121)..(308): Pfam Name: Trypsin Pfam Description: Trypsin
  misc_feature (481)..(571): Homolog of NCBI NO: 2190559 NR Description: F5I14.16 [Arabidopsis thaliana]
  misc_feature (115)..(421): Homolog of NCBI NO: 2190559 NR Description: F5I14.16 [Arabidopsis thaliana]
  misc_feature (115)..(457): Homolog of NCBI NO: 2190549 NR Description: F5I14.17 gene product [Arabidopsis thaliana]
  misc_feature (481)..(572): Homolog of NCBI NO: 9758082 NR Description: contains similarity to serine
  misc_feature (113)..(451): Homolog of NCBI NO: 9758082 NR Description: contains similarity to serine
  misc_feature (115)..(571): Homolog of NCBI NO: 18408327 NR Description: DegP protease [Arabidopsis thaliana]
  misc_feature (115)..(570): Homolog of NCBI NO: 18408329 NR Description: DegP protease [Arabidopsis thaliana]
  misc_feature (31)..(572): Homolog of NCBI NO: 18421592 NR Description: DegP protease [Arabidopsis thaliana]
  misc_feature (2)..(571): Homolog of NCBI NO: 18421957 NR Description: DegP protease [Arabidopsis thaliana]
  misc_feature (14)..(607): Homolog of NCBI NO: 25409077 NR Description: probable serine proteinase [imported] -
MAASVANCCFSVLNASVKIQSSSISSPWCFVSASSLTPRASSNIKRKSSRSDSPSPILNPEKNYPGRVRDESSNPPQKMAFKAFGSPKKEKKESLSDFSRDQQTDPAKIHDASFLNAVVKVYCTHTAPDYSLPWQKQRQFTSTGSAFMIGDGKLLTNAHCVEHDTQVKVKRRGDDRKYVAKVLVRGVDCDIALLSVESEDFWKGAEPLRLGHLPRLQDSVTVVGYPLGGDTISVTKGVVSRIEVTSYAHGSSDLLGIQIDAAINPGNSGGPAFNDQGECIGVAFQVYRSEETENIGYVIPTTVVSHFLTDYERNGKYTGYPCLGVLLQKLENPALRECLKVPTNEGVLVRRVEPTSDASKVLKEGDVIVSFDDLHVGCEGTVPFRSSERIAFRYLISQKFAGDIAEIGIIRAGEHKKVQVVLRPRVHLVPYHIDGGQPSYIIVAGLVFTPLSEPLIEEECEDTIGLKLLTKARYSVARFRGEQIVILSQVLANEVNIGYEDMNNQQVLKFNGIPIRNIHHLAHLIDMCKDKYLVFEFEDNYVAVLEREASNSASLCILKDYGIPSERSADLLEPYVDPIDDTQALDQGIGDSPVSNLEIGFDGLVWA

SEQ ID NO: 46840 - protein, 529 aa, Arabidopsis thaliana
  peptide (1)..(529): Ceres Seq. ID no. 13646872
  misc_feature (43)..(230): Pfam Name: Trypsin Pfam Description: Trypsin
  misc_feature (403)..(493): Homolog of NCBI NO: 2190559 NR Description: F5I14.16 [Arabidopsis thaliana]
  misc_feature (37)..(343): Homolog of NCBI NO: 2190559 NR Description: F5I14.16 [Arabidopsis thaliana]
  misc_feature (37)..(379): Homolog of NCBI NO: 2190549 NR Description: F5I14.17 gene product [Arabidopsis thaliana]
  misc_feature (403)..(494): Homolog of NCBI NO: 9758082 NR Description: contains similarity to serine
  misc_feature (35)..(373): Homolog of NCBI NO: 9758082 NR Description: contains similarity to serine
  misc_feature (37)..(493): Homolog of NCBI NO: 18408327 NR Description: DegP protease [Arabidopsis thaliana]
  misc_feature (37)..(492): Homolog of NCBI NO: 18408329 NR Description: DegP protease [Arabidopsis thaliana]
  misc_feature (1)..(494): Homolog of NCBI NO: 18421592 NR Description: DegP protease [Arabidopsis thaliana]
  misc_feature (1)..(493): Homolog of NCBI NO: 18421957 NR Description: DegP protease [Arabidopsis thaliana]
  misc_feature (1)..(529): Homolog of NCBI NO: 25409077 NR Description: probable serine proteinase [imported] -
MAFKAFGSPKKEKKESLSDFSRDQQTDPAKIHDASFLNAVVKVYCTHTAPDYSLPWQKQRQFTSTGSAFMIGDGKLLTNAHCVEHDTQVKVKRRGDDRKYVAKVLVRGVDCDIALLSVESEDFWKGAEPLRLGHLPRLQDSVTVVGYPLGGDTISVTKGVVSRIEVTSYAHGSSDLLGIQIDAAINPGNSGGPAFNDQGECIGVAFQVYRSEETENIGYVIPTTVVSHFLTDYERNGKYTGYPCLGVLLQKLENPALRECLKVPTNEGVLVRRVEPTSDASKVLKEGDVIVSFDDLHVGCEGTVPFRSSERIAFRYLISQKFAGDIAEIGIIRAGEHKKVQVVLRPRVHLVPYHIDGGQPSYIIVAGLVFTPLSEPLIEEECEDTIGLKLLTKARYSVARFRGEQIVILSQVLANEVNIGYEDMNNQQVLKFNGIPIRNIHHLAHLIDMCKDKYLVFEFEDNYVAVLEREASNSASLCILKDYGIPSERSADLLEPYVDPIDDTQALDQGIGDSPVSNLEIGFDGLVWA

SEQ ID NO: 46841 - protein, 460 aa, Arabidopsis thaliana
  peptide (1)..(460): Ceres Seq. ID no. 13646873
  misc_feature (1)..(161): Pfam Name: Trypsin Pfam Description: Trypsin
  misc_feature (334)..(424): Homolog of NCBI NO: 2190559 NR Description: F5I14.16 [Arabidopsis thaliana]
  misc_feature (1)..(274): Homolog of NCBI NO: 2190559 NR Description: F5I14.16 [Arabidopsis thaliana]
  misc_feature (1)..(310): Homolog of NCBI NO: 2190549 NR Description: F5I14.17 gene product [Arabidopsis thaliana]
  misc_feature (334)..(425): Homolog of NCBI NO: 9758082 NR Description: contains similarity to serine
  misc_feature (1)..(304): Homolog of NCBI NO: 9758082 NR Description: contains similarity to serine
  misc_feature (1)..(424): Homolog of NCBI NO: 18408327 NR Description: DegP protease [Arabidopsis thaliana]
  misc_feature (1)..(423): Homolog of NCBI NO: 18408329 NR Description: DegP protease [Arabidopsis thaliana]
  misc_feature (1)..(425): Homolog of NCBI NO: 18421592 NR Description: DegP protease [Arabidopsis thaliana]
  misc_feature (1)..(424): Homolog of NCBI NO: 18421957 NR Description: DegP protease [Arabidopsis thaliana]
  misc_feature (1)..(460): Homolog of NCBI NO: 25409077 NR Description: probable serine proteinase [imported] -
MIGDGKLLTNAHCVEHDTQVKVKRRGDDRKYVAKVLVRGVDCDIALLSVESEDFWKGAEPLRLGHLPRLQDSVTVVGYPLGGDTISVTKGVVSRIEVTSYAHGSSDLLGIQIDAAINPGNSGGPAFNDQGECIGVAFQVYRSEETENIGYVIPTTVVSHFLTDYERNGKYTGYPCLGVLLQKLENPALRECLKVPTNEGVLVRRVEPTSDASKVLKEGDVIVSFDDLHVGCEGTVPFRSSERIAFRYLISQKFAGDIAEIGIIRAGEHKKVQVVLRPRVHLVPYHIDGGQPSYIIVAGLVFTPLSEPLIEEECEDTIGLKLLTKARYSVARFRGEQIVILSQVLANEVNIGYEDMNNQQVLKFNGIPIRNIHHLAHLIDMCKDKYLVFEFEDNYVAVLEREASNSASLCILKDYGIPSERSADLLEPYVDPIDDTQALDQGIGDSPVSNLEIGFDGLVWA

SEQ ID NO: 46842 - DNA, 1300 bp, Arabidopsis thaliana
  misc_feature (1)..(1300): Ceres Seq. ID no. 12574604
  misc_feature: MA Experiment ID: 20001451 Result: Down-regulated in Transcription
  misc_feature: MA Experiment 20001451 PARAMETER Experiment Name: At_Far-red-induction_P Parameter: Age (day) Value: 7
  misc_feature: MA Experiment 20001451 PARAMETER Experiment Name: At_Far-red-induction_P Parameter: Light Value: Far-red vs. White
  misc_feature: MA Experiment 20001451 PARAMETER Experiment Name: At_Far-red-induction_P Parameter: Organism Value: A. thaliana
  misc_feature: MA Experiment 20001451 PARAMETER Experiment Name: At_Far-red-induction_P Parameter: Plant Line Value: Columbia
  misc_feature: MA Experiment 20001451 PARAMETER Experiment Name: At_Far-red-induction_P Parameter: Timepoint (hr) Value: 24
  misc_feature: MA Experiment 20001451 PARAMETER Experiment Name: At_Far-red-induction_P Parameter: Tissue Value: Whole Plant
gatacttgtgtcttgttgtacttgttaaacttgaatcccgtgttcgcgactttgcgatagattctctcaaatccaattccaatggcggatccatcttctcaaaaccctaacctcgccactccccctcctccttcttctccttcaccaacccatcaaattcaatctggaacctcggaattatcgccaccgtctcgaccgccttgctctaccttgtcctttctcaagactgctaaccgaccaaaactccgtgtgacatctgaattcgacagcgatagtctccttttcttaaacaaagtgtcttgtaagctcttcgataaccttgccaagcttaaactctcgtttcagaacaattcccagcgcgagatttcacagcctcaggtctcttttacttccaaacacgtttctgttctctatgatgtcgaagagaagaatactttcattaagagcactctcgatgttcacccgcgtcttcagctccgagctcttcataatgttaaggcacaacaaggagaagttgctatggaggcaaatctgactgaacctggctactctctggagctttcatcacctgtgcctattggttacccaagagcaactcttaaattcccacttggcgaaatttcgttacaagaaaaagatgaggaggaggaggagaagcagaaaagaactttatctgttaatgggatcctcaaacgtcaagttatgaatggtgtttgtaccgctctatacacagatgaagagttgaggctgagatatgcttataaggatgatgcattgtctttcatcccaagtatttcccttccttccaatgctgcatcatttgcattcaaacggcggtttagcccttcagataagttgagctattggtacaactttgattcaaacatgtggagtgctgtgtacaaacgcacatatggtaaagactacaaattaaaagctggctatgattctgatgttcgccttggctgggcatctctctgggttggtgatgaagctggaaaagtgaaaacgacaccaatgaagatgaaagtccagttcatgcttcaagttccacaagatgacatcaaatcatcagtcttgatgttccgagtcaagaaaagatgggacatttgatgaaatctttgaataaatcatctcttagtttcactttctttaatctctctataaaacccataaaagttgtttgtttctccttatatatcaaatcttttgcaaagtagatacaaaagcttagagtgaataattgcaattgtatttctgtagcttttttttaaatgatctttttcacacgtgtgagact

SEQ ID NO: 46843 - protein, 343 aa, Arabidopsis thaliana
  peptide (1)..(343): Ceres Seq. ID no. 12574605
  misc_feature (1)..(279): Homolog of NCBI NO: 30689554 NR Description: expressed protein [Arabidopsis thaliana]
  misc_feature (225)..(343): Homolog of NCBI NO: 7486492 NR Description: hypothetical protein At2g43950 [imported] -
  misc_feature (1)..(238): Homolog of NCBI NO: 7486492 NR Description: hypothetical protein At2g43950 [imported] -
  misc_feature (1)..(343): Homolog of NCBI NO: 18406405 NR Description: expressed protein
MADPSSQNPNLATPPPPSSPSPTHQIQSGTSELSPPSRPPCSTLSFLKTANRPKLRVTSEFDSDSLLFLNKVSCKLFDNLAKLKLSFQNNSQREISQPQVSFTSKHVSVLYDVEEKNTFIKSTLDVHPRLQLRALHNVKAQQGEVAMEANLTEPGYSLELSSPVPIGYPRATLKFPLGEISLQEKDEEEEEKQKRTLSVNGILKRQVMNGVCTALYTDEELRLRYAYKDDALSFIPSISLPSNAASFAFKRRFSPSDKLSYWYNFDSNMWSAVYKRTYGKDYKLKAGYDSDVRLGWASLWVGDEAGKVKTTPMKMKVQFMLQVPQDDIKSSVLMFRVKKRWDI

SEQ ID NO: 46844 - protein, 197 aa, Arabidopsis thaliana
  peptide (1)..(197): Ceres Seq. ID no. 12574606
  misc_feature (1)..(133): Homolog of NCBI NO: 30689554 NR Description: expressed protein [Arabidopsis thaliana]
  misc_feature (79)..(197): Homolog of NCBI NO: 7486492 NR Description: hypothetical protein At2g43950 [imported] -
  misc_feature (1)..(92): Homolog of NCBI NO: 7486492 NR Description: hypothetical protein At2g43950 [imported] -
  misc_feature (1)..(197): Homolog of NCBI NO: 18406405 NR Description: expressed protein
MEANLTEPGYSLELSSPVPIGYPRATLKFPLGEISLQEKDEEEEEKQKRTLSVNGILKRQVMNGVCTALYTDEELRLRYAYKDDALSFIPSISLPSNAASFAFKRRFSPSDKLSYWYNFDSNMWSAVYKRTYGKDYKLKAGYDSDVRLGWASLWVGDEAGKVKTTPMKMKVQFMLQVPQDDIKSSVLMFRVKKRWDI

SEQ ID NO: 46845 - DNA, 1041 bp, Arabidopsis thaliana; identical to SEQ ID NO: 21211
  misc_feature (1)..(1041): Ceres Seq. ID no. 12600744
  misc_feature: MA Experiment ID: 108462 Result: Up-regulated in Transcription
  misc_feature: MA Experiment 108462 PARAMETER Experiment Name: At_Germinating_Seeds_cDNA_P Parameter: Age (day) Value: 2 vs. 0
  misc_feature: MA Experiment 108462 PARAMETER Experiment Name: At_Germinating_Seeds_cDNA_P Parameter: Tissue Value: Germinating Seeds
  misc_feature: MA Experiment ID: 108464 Result: Up-regulated in Transcription
  misc_feature: MA Experiment 108464 PARAMETER Experiment Name: At_Germinating_Seeds_cDNA_P Parameter: Age (day) Value: 4 vs. 0
  misc_feature: MA Experiment 108464 PARAMETER Experiment Name: At_Germinating_Seeds_cDNA_P Parameter: Tissue Value: Germinating Seeds
  misc_feature: MA Experiment ID: 108488 Result: Up-regulated in Transcription
  misc_feature: MA Experiment ID: 20000111 Result: Up-regulated in Transcription
  misc_feature: MA Experiment 20000111 PARAMETER Experiment Name: At_42deg_Heat_cDNA_P Parameter: Temperature (deg C) Value: 42 vs. 22
  misc_feature: MA Experiment 20000111 PARAMETER Experiment Name: At_42deg_Heat_cDNA_P Parameter: Timepoint (hr) Value: 6
  misc_feature: MA Experiment 20000111 PARAMETER Experiment Name: At_42deg_Heat_cDNA_P Parameter: Tissue Value: Aerial
  misc_feature: MA Experiment ID: 20000314 Result: Down-regulated in Transcription
  misc_feature: MA Experiment 20000314 PARAMETER Experiment Name: At_14day_Shoots-Roots_Sub_P Parameter: Age (day) Value: 14
  misc_feature: MA Experiment 20000314 PARAMETER Experiment Name: At_14day_Shoots-Roots_Sub_P Parameter: Organism Value: A. thaliana
  misc_feature: MA Experiment 20000314 PARAMETER Experiment Name: At_14day_Shoots-Roots_Sub_P Parameter: Plant Line Value: WS
  misc_feature: MA Experiment 20000314 PARAMETER Experiment Name: At_14day_Shoots-Roots_Sub_P Parameter: Tissue Value: Roots vs. Whole Plant
  misc_feature: MA Experiment ID: 20000315 Result: Up-regulated in Transcription
  misc_feature: MA Experiment 20000315 PARAMETER Experiment Name: At_14day_Shoots-Roots_Sub_P Parameter: Age (day) Value: 14
  misc_feature: MA Experiment 20000315 PARAMETER Experiment Name: At_14day_Shoots-Roots_Sub_P Parameter: Organism Value: A. thaliana
  misc_feature: MA Experiment 20000315 PARAMETER Experiment Name: At_14day_Shoots-Roots_Sub_P Parameter: Plant Line Value: WS
  misc_feature: MA Experiment 20000315 PARAMETER Experiment Name: At_14day_Shoots-Roots_Sub_P Parameter: Tissue Value: Shoots vs. Whole Plant
  misc_feature: MA Experiment ID: 20000328 Result: Up-regulated in Transcription
  misc_feature: MA Experiment 20000328 PARAMETER Experiment Name: At_42deg_Heat_Sub_P Parameter: Age (day) Value: 14
  misc_feature: MA Experiment 20000328 PARAMETER Experiment Name: At_42deg_Heat_Sub_P Parameter: Organism Value: A. thaliana
  misc_feature: MA Experiment 20000328 PARAMETER Experiment Name: At_42deg_Heat_Sub_P Parameter: Plant Line Value: WS
  misc_feature: MA Experiment 20000328 PARAMETER Experiment Name: At_42deg_Heat_Sub_P Parameter: Temperature (deg C) Value: 42 vs. 22
  misc_feature: MA Experiment 20000328 PARAMETER Experiment Name: At_42deg_Heat_Sub_P Parameter: Timepoint (hr) Value: 6
  misc_feature: MA Experiment 20000328 PARAMETER Experiment Name: At_42deg_Heat_Sub_P Parameter: Tissue Value: Aerial

SEQ ID NO: 46846 - protein, 267 aa, Arabidopsis thaliana; identical to SEQ ID NO: 21212
  peptide (1)..(267): Ceres Seq. ID no. 12600745
  misc_feature (65)..(234): Pfam Name: Chlorophyll A-B binding protein Pfam Description: Chlorophyll A-B binding protein
  misc_feature (65)..(234): Pfam Name: Chlorophyll A-B binding protein Pfam Description: Chlorophyll A-B binding protein
  misc_feature (20)..(267): Homolog of NCBI NO: 12324161 NR Description: chlorophyll A-B-binding protein 2 precursor, 5'
  misc_feature (1)..(267): Homolog of NCBI NO: 21592428 NR Description: putative photosystem II type I chlorophyll a b
  misc_feature (1)..(267): Homolog of NCBI NO: 18266039 NR Description: chlorophyll a/b binding protein [Brassica
  misc_feature (1)..(267): Homolog of NCBI NO: 18403549 NR Description: photosystem II type I chlorophyll a /b binding
  misc_feature (1)..(267): Homolog of NCBI NO: 115778 NR Description: Chlorophyll A-B binding protein 1, chloroplast
  misc_feature (20)..(267): Homolog of NCBI NO: 12324161 NR Description: chlorophyll A-B-binding protein 2 precursor, 5'
  misc_feature (1)..(267): Homolog of NCBI NO: 18266039 NR Description: chlorophyll a/b binding protein [Brassica
  misc_feature (1)..(267): Homolog of NCBI NO: 115778 NR Description: Chlorophyll A-B binding protein 1, chloroplast
  misc_feature (1)..(267): Homolog of NCBI NO: 18397286 NR Description: photosystem II type I chlorophyll a /b binding
  misc_feature (1)..(267): Homolog of NCBI NO: 15220615 NR Description: light-harvesting chlorophyll a/b binding protein
  misc_feature (1)..(267): Homolog of NCBI NO: 17473828 NR Description: chlorophyll a/b-binding protein [Arabidopsis
  misc_feature (1)..(267): Homolog of NCBI NO: 18403546 NR Description: photosystem II type I chlorophyll a /b binding
  misc_feature (1)..(267): Homolog of NCBI NO: 31323256 NR Description: chlorophyll a/b binding protein [Brassica
  misc_feature (1)..(267): Homolog of NCBI NO: 18403549 NR Description: photosystem II type I chlorophyll a /b binding
  misc_feature (1)..(267): Homolog of NCBI NO: 21592428 NR Description: putative photosystem II type I chlorophyll a b
  misc_feature (1)..(267): Homolog of NCBI NO: 31323256 NR Description: chlorophyll a/b binding protein [Brassica
  misc_feature (1)..(267): Homolog of NCBI NO: 18403546 NR Description: photosystem II type I chlorophyll a /b binding
  misc_feature (1)..(267): Homolog of NCBI NO: 17473828 NR Description: chlorophyll a/b-binding protein [Arabidopsis
  misc_feature (1)..(267): Homolog of NCBI NO: 15220615 NR Description: light-harvesting chlorophyll a/b binding protein
  misc_feature (1)..(267): Homolog of NCBI NO: 18397286 NR Description: photosystem II type I chlorophyll a /b binding

SEQ ID NO: 46847 - protein, 262 aa, Arabidopsis thaliana; identical to SEQ ID NO: 21213
  peptide (1)..(262): Ceres Seq. ID no. 12600746
  misc_feature (60)..(229): Pfam Name: Chlorophyll A-B binding protein Pfam Description: Chlorophyll A-B binding protein
  misc_feature (60)..(229): Pfam Name: Chlorophyll A-B binding protein Pfam Description: Chlorophyll A-B binding protein
  misc_feature (15)..(262): Homolog of NCBI NO: 12324161 NR Description: chlorophyll A-B-binding protein 2 precursor, 5'
  misc_feature (1)..(262): Homolog of NCBI NO: 21592428 NR Description: putative photosystem II type I chlorophyll a b
  misc_feature (1)..(262): Homolog of NCBI NO: 18266039 NR Description: chlorophyll a/b binding protein [Brassica
  misc_feature (1)..(262): Homolog of NCBI NO: 18403549 NR Description: photosystem II type I chlorophyll a /b binding
  misc_feature (1)..(262): Homolog of NCBI NO: 115778 NR Description: Chlorophyll A-B binding protein 1, chloroplast
  misc_feature (15)..(262): Homolog of NCBI NO: 12324161 NR Description: chlorophyll A-B-binding protein 2 precursor, 5'
  misc_feature (1)..(262): Homolog of NCBI NO: 18266039 NR Description: chlorophyll a/b binding protein [Brassica
  misc_feature (1)..(262): Homolog of NCBI NO: 115778 NR Description: Chlorophyll A-B binding protein 1, chloroplast
  misc_feature (1)..(262): Homolog of NCBI NO: 18397286 NR Description: photosystem II type I chlorophyll a /b binding
  misc_feature (1)..(262): Homolog of NCBI NO: 15220615 NR Description: light-harvesting chlorophyll a/b binding protein
  misc_feature (1)..(262): Homolog of NCBI NO: 17473828 NR Description: chlorophyll a/b-binding protein [Arabidopsis
  misc_feature (1)..(262): Homolog of NCBI NO: 18403546 NR Description: photosystem II type I chlorophyll a /b binding
  misc_feature (1)..(262): Homolog of NCBI NO: 31323256 NR Description: chlorophyll a/b binding protein [Brassica
  misc_feature (1)..(262): Homolog of NCBI NO: 18403549 NR Description: photosystem II type I chlorophyll a /b binding
  misc_feature (1)..(262): Homolog of NCBI NO: 21592428 NR Description: putative photosystem II type I chlorophyll a b
  misc_feature (1)..(262): Homolog of NCBI NO: 31323256 NR Description: chlorophyll a/b binding protein [Brassica
  misc_feature (1)..(262): Homolog of NCBI NO: 18403546 NR Description: photosystem II type I chlorophyll a /b binding
  misc_feature (1)..(262): Homolog of NCBI NO: 17473828 NR Description: chlorophyll a/b-binding protein [Arabidopsis
  misc_feature (1)..(262): Homolog of NCBI NO: 15220615 NR Description: light-harvesting chlorophyll a/b binding protein
  misc_feature (1)..(262): Homolog of NCBI NO: 18397286 NR Description: photosystem II type I chlorophyll a /b binding

SEQ ID NO: 46848 - protein, 233 aa, Arabidopsis thaliana; identical to SEQ ID NO: 21214
  peptide (1)..(233): Ceres Seq. ID no. 12600747
  misc_feature (31)..(200): Pfam Name: Chlorophyll A-B binding protein Pfam Description: Chlorophyll A-B binding protein
  misc_feature (31)..(200): Pfam Name: Chlorophyll A-B binding protein Pfam Description: Chlorophyll A-B binding protein
  misc_feature (1)..(233): Homolog of NCBI NO: 12324161 NR Description: chlorophyll A-B-binding protein 2 precursor, 5'
  misc_feature (1)..(233): Homolog of NCBI NO: 21592428 NR Description: putative photosystem II type I chlorophyll a b
  misc_feature (1)..(233): Homolog of NCBI NO: 18266039 NR Description: chlorophyll a/b binding protein [Brassica
  misc_feature (1)..(233): Homolog of NCBI NO: 18403549 NR Description: photosystem II type I chlorophyll a /b binding
  misc_feature (1)..(233): Homolog of NCBI NO: 115778 NR Description: Chlorophyll A-B binding protein 1, chloroplast
  misc_feature (1)..(233): Homolog of NCBI NO: 18403549 NR Description: photosystem II type I chlorophyll a /b binding
  misc_feature (1)..(233): Homolog of NCBI NO: 31323256 NR Description: chlorophyll a/b binding protein [Brassica
  misc_feature (1)..(233): Homolog of NCBI NO: 17473828 NR Description: chlorophyll a/b-binding protein [Arabidopsis
  misc_feature (1)..(233): Homolog of NCBI NO: 12324161 NR Description: chlorophyll A-B-binding protein 2 precursor, 5'
  misc_feature (1)..(233): Homolog of NCBI NO: 18266039 NR Description: chlorophyll a/b binding protein [Brassica
  misc_feature (1)..(233): Homolog of NCBI NO: 21592428 NR Description: putative photosystem II type I chlorophyll a b
  misc_feature (1)..(233): Homolog of NCBI NO: 18397286 NR Description: photosystem II type I chlorophyll a /b binding
  misc_feature (1)..(233): Homolog of NCBI NO: 15220615 NR Description: light-harvesting chlorophyll a/b binding protein
  misc_feature (1)..(233): Homolog of NCBI NO: 18403546 NR Description: photosystem II type I chlorophyll a /b binding
  misc_feature (1)..(233): Homolog of NCBI NO: 115778 NR Description: Chlorophyll A-B binding protein 1, chloroplast
  misc_feature (1)..(233): Homolog of NCBI NO: 31323256 NR Description: chlorophyll a/b binding protein [Brassica
  misc_feature (1)..(233): Homolog of NCBI NO: 18403546 NR Description: photosystem II type I chlorophyll a /b binding
  misc_feature (1)..(233): Homolog of NCBI NO: 17473828 NR Description: chlorophyll a/b-binding protein [Arabidopsis
  misc_feature (1)..(233): Homolog of NCBI NO: 15220615 NR Description: light-harvesting chlorophyll a/b binding protein
  misc_feature (1)..(233): Homolog of NCBI NO: 18397286 NR Description: photosystem II type I chlorophyll a /b binding

SEQ ID NO: 46849 - DNA, 3301 bp, Arabidopsis thaliana; identical to SEQ ID NO: 45683
  misc_feature (1)..(3301): Ceres Seq. ID no. 12600421
  misc_feature: MA Experiment ID: 20000169 Result: Down-regulated in Transcription
  misc_feature: MA Experiment 20000169 PARAMETER Experiment Name: At_100uM_ABA_P Parameter: Age (day) Value: 14
  misc_feature: MA Experiment 20000169 PARAMETER Experiment Name: At_100uM_ABA_P Parameter: Organism Value: A. thaliana
  misc_feature: MA Experiment 20000169 PARAMETER Experiment Name: At_100uM_ABA_P Parameter: Plant Line Value: WS
  misc_feature: MA Experiment 20000169 PARAMETER Experiment Name: At_100uM_ABA_P Parameter: Timepoint (hr) Value: 6
  misc_feature: MA Experiment 20000169 PARAMETER Experiment Name: At_100uM_ABA_P Parameter: Tissue Value: Aerial
  misc_feature: MA Experiment 20000169 PARAMETER Experiment Name: At_100uM_ABA_P Parameter: Treatment Value: 100uM ABA vs. No Treatment
  misc_feature: MA Experiment ID: 20000234 Result: Up-regulated in Transcription
  misc_feature: MA Experiment 20000234 PARAMETER Experiment Name: At_Siliques_P Parameter: Age (day) Value: 21
  misc_feature: MA Experiment 20000234 PARAMETER Experiment Name: At_Siliques_P Parameter: Organism Value: A. thaliana
  misc_feature: MA Experiment 20000234 PARAMETER Experiment Name: At_Siliques_P Parameter: Plant Line Value: WS
  misc_feature: MA Experiment 20000234 PARAMETER Experiment Name: At_Siliques_P Parameter: Tissue Value: Less Than 5mm Siliques vs. Whole Plant
  misc_feature: MA Experiment ID: 20000437 Result: Down-regulated in Transcription
  misc_feature: MA Experiment 20000437 PARAMETER Experiment Name: At_Drought_P Parameter: Age (day) Value: 8
  misc_feature: MA Experiment 20000437 PARAMETER Experiment Name: At_Drought_P Parameter: Organism Value: A. thaliana
  misc_feature: MA Experiment 20000437 PARAMETER Experiment Name: At_Drought_P Parameter: Plant Line Value: WS
  misc_feature: MA Experiment 20000437 PARAMETER Experiment Name: At_Drought_P Parameter: Timepoint (hr) Value: 24
  misc_feature: MA Experiment 20000437 PARAMETER Experiment Name: At_Drought_P Parameter: Tissue Value: Whole Plant
  misc_feature: MA Experiment 20000437 PARAMETER Experiment Name: At_Drought_P Parameter: Treatment Value: Drought vs. No Drought
  misc_feature: MA Experiment ID: 20001558 Result: Up-regulated in Transcription
  misc_feature: MA Experiment 20001558 PARAMETER Experiment Name: At_Drought_Soil_Dry_P Parameter: Age (day) Value: 27
  misc_feature: MA Experiment 20001558 PARAMETER Experiment Name: At_Drought_Soil_Dry_P Parameter: Organism Value: A. thaliana
  misc_feature: MA Experiment 20001558 PARAMETER Experiment Name: At_Drought_Soil_Dry_P Parameter: Plant Line Value: WS
  misc_feature: MA Experiment 20001558 PARAMETER Experiment Name: At_Drought_Soil_Dry_P Parameter: Post Timepoint (hr) Value: 6
  misc_feature: MA Experiment 20001558 PARAMETER Experiment Name: At_Drought_Soil_Dry_P Parameter: Post-Treatment Value: Re-Water vs. No Drought
  misc_feature: MA Experiment 20001558 PARAMETER Experiment Name: At_Drought_Soil_Dry_P Parameter: Timepoint (day) Value: 13
  misc_feature: MA Experiment 20001558 PARAMETER Experiment Name: At_Drought_Soil_Dry_P Parameter: Treatment Value: Drought vs. No Drought
  misc_feature: MA Experiment ID: 20001560 Result: Up-regulated in Transcription
  misc_feature: MA Experiment 20001560 PARAMETER Experiment Name: At_Drought_Soil_Dry_P Parameter: Age (day) Value: 28
  misc_feature: MA Experiment 20001560 PARAMETER Experiment Name: At_Drought_Soil_Dry_P Parameter: Organism Value: A. thaliana
  misc_feature: MA Experiment 20001560 PARAMETER Experiment Name: At_Drought_Soil_Dry_P Parameter: Plant Line Value: WS
  misc_feature: MA Experiment 20001560 PARAMETER Experiment Name: At_Drought_Soil_Dry_P Parameter: Post Timepoint (hr) Value: None
  misc_feature: MA Experiment 20001560 PARAMETER Experiment Name: At_Drought_Soil_Dry_P Parameter: Post-Treatment Value: None
  misc_feature: MA Experiment 20001560 PARAMETER Experiment Name: At_Drought_Soil_Dry_P Parameter: Timepoint (day) Value: 14
  misc_feature: MA Experiment 20001560 PARAMETER Experiment Name: At_Drought_Soil_Dry_P Parameter: Treatment Value: Drought vs. No Drought
  misc_feature: MA Experiment ID: 20001757 Result: Up-regulated in Transcription
  misc_feature: MA Experiment 20001757 PARAMETER Experiment Name: At_50mM_NH4NO3_L-to-H_P Parameter: Timepoint (hr) Value: 6
  misc_feature: MA Experiment 20001757 PARAMETER Experiment Name: At_50mM_NH4NO3_L-to-H_P Parameter: Tissue Value: Leaf
  misc_feature: MA Experiment 20001757 PARAMETER Experiment Name: At_50mM_NH4NO3_L-to-H_P Parameter: Treatment Value: 50mM NH4NO3 vs 100mM Mannitol

SEQ ID NO: 46850 - protein, 1050 aa, Arabidopsis thaliana; identical to SEQ ID NO: 45684
  peptide (1)..(1050): Ceres Seq. ID no. 12600422
  misc_feature (729)..(976): Homolog of NCBI NO: 13812316 NR Description: IAP100 protein [Guillardia theta]
  misc_feature (104)..(395): Homolog of NCBI NO: 37535630 NR Description: putative chloroplast inner envelope protein
  misc_feature (35)..(229): Homolog of NCBI NO: 25406948 NR Description: hypothetical protein [imported] - Arabidopsis
  misc_feature (35)..(284): Homolog of NCBI NO: 37535626 NR Description: putative chloroplast inner envelope protein
  misc_feature (276)..(1045): Homolog of NCBI NO: 37535626 NR Description: putative chloroplast inner envelope protein
  misc_feature (729)..(976): Homolog of NCBI NO: 13812316 NR Description: IAP100 protein [Guillardia theta]
  misc_feature (104)..(395): Homolog of NCBI NO: 37535630 NR Description: putative chloroplast inner envelope protein
  misc_feature (35)..(229): Homolog of NCBI NO: 25406948 NR Description: hypothetical protein [imported] - Arabidopsis
  misc_feature (35)..(284): Homolog of NCBI NO: 37535626 NR Description: putative chloroplast inner envelope protein
  misc_feature (276)..(1045): Homolog of NCBI NO: 37535626 NR Description: putative chloroplast inner envelope protein

SEQ ID NO: 46851 - protein, 1016 aa, Arabidopsis thaliana; identical to SEQ ID NO: 45685
  peptide (1)..(1016): Ceres Seq. ID no. 12600423
  misc_feature (695)..(942): Homolog of NCBI NO: 13812316 NR Description: IAP100 protein [Guillardia theta]
  misc_feature (70)..(361): Homolog of NCBI NO: 37535630 NR Description: putative chloroplast inner envelope protein
  misc_feature (1)..(195): Homolog of NCBI NO: 25406948 NR Description: hypothetical protein [imported] - Arabidopsis
  misc_feature (1)..(250): Homolog of NCBI NO: 37535626 NR Description: putative chloroplast inner envelope protein
  misc_feature (242)..(1011): Homolog of NCBI NO: 37535626 NR Description: putative chloroplast inner envelope protein
  misc_feature (695)..(942): Homolog of NCBI NO: 13812316 NR Description: IAP100 protein [Guillardia theta]
  misc_feature (70)..(361): Homolog of NCBI NO: 37535630 NR Description: putative chloroplast inner envelope protein
  misc_feature (1)..(195): Homolog of NCBI NO: 25406948 NR Description: hypothetical protein [imported] - Arabidopsis
  misc_feature (1)..(250): Homolog of NCBI NO: 37535626 NR Description: putative chloroplast inner envelope protein
  misc_feature (242)..(1011): Homolog of NCBI NO: 37535626 NR Description: putative chloroplast inner envelope protein

SEQ ID NO: 46852 - protein, 930 aa, Arabidopsis thaliana; identical to SEQ ID NO: 45686
  peptide (1)..(930): Ceres Seq. ID no. 12600424
  misc_feature (609)..(856): Homolog of NCBI NO: 13812316 NR Description: IAP100 protein [Guillardia theta]
  misc_feature (1)..(275): Homolog of NCBI NO: 37535630 NR Description: putative chloroplast inner envelope protein
  misc_feature (1)..(109): Homolog of NCBI NO: 25406948 NR Description: hypothetical protein [imported] - Arabidopsis
  misc_feature (1)..(164): Homolog of NCBI NO: 37535626 NR Description: putative chloroplast inner envelope protein
  misc_feature (156)..(925): Homolog of NCBI NO: 37535626 NR Description: putative chloroplast inner envelope protein
  misc_feature (609)..(856): Homolog of NCBI NO: 13812316 NR Description: IAP100 protein [Guillardia theta]
  misc_feature (1)..(275): Homolog of NCBI NO: 37535630 NR Description: putative chloroplast inner envelope protein
  misc_feature (1)..(109): Homolog of NCBI NO: 25406948 NR Description: hypothetical protein [imported] - Arabidopsis
  misc_feature (1)..(164): Homolog of NCBI NO: 37535626 NR Description: putative chloroplast inner envelope protein
  misc_feature (156)..(925): Homolog of NCBI NO: 37535626 NR Description: putative chloroplast inner envelope protein

SEQ ID NO: 46853 - DNA, 1509 bp, Arabidopsis thaliana
  misc_feature (1)..(1509): Ceres Seq. ID no. 12574785
  misc_feature: MA Experiment ID: 20000184 Result: Up-regulated in Transcription
  misc_feature: MA Experiment 20000184 PARAMETER Experiment Name: At_Shoots__P Parameter: Age (day) Value: 7
  misc_feature: MA Experiment 20000184 PARAMETER Experiment Name: At_Shoots__P Parameter: Tissue Value: Shoots vs. Whole Plant
  misc_feature: MA Experiment ID: 20000234 Result: Up-regulated in Transcription
  misc_feature: MA Experiment 20000234 PARAMETER Experiment Name: At_Siliques_P Parameter: Age (day) Value: 21
  misc_feature: MA Experiment 20000234 PARAMETER Experiment Name: At_Siliques_P Parameter: Organism Value: A. thaliana
  misc_feature: MA Experiment 20000234 PARAMETER Experiment Name: At_Siliques_P Parameter: Plant Line Value: WS
  misc_feature: MA Experiment 20000234 PARAMETER Experiment Name: At_Siliques_P Parameter: Tissue Value: Less Than 5mm Siliques vs. Whole Plant
  misc_feature: MA Experiment ID: 20000235 Result: Up-regulated in Transcription
  misc_feature: MA Experiment 20000235 PARAMETER Experiment Name: At_Siliques_P Parameter: Age (day) Value: 21
  misc_feature: MA Experiment 20000235 PARAMETER Experiment Name: At_Siliques_P Parameter: Organism Value: A. thaliana
  misc_feature: MA Experiment 20000235 PARAMETER Experiment Name: At_Siliques_P Parameter: Plant Line Value: WS
  misc_feature: MA Experiment 20000235 PARAMETER Experiment Name: At_Siliques_P Parameter: Tissue Value: 5-10mm Siliques vs. Whole Plant
  misc_feature: MA Experiment ID: 20000265 Result: Up-regulated in Transcription
  misc_feature: MA Experiment 20000265 PARAMETER Experiment Name: At_Open_Flower_P Parameter: Age (day) Value: 21
  misc_feature: MA Experiment 20000265 PARAMETER Experiment Name: At_Open_Flower_P Parameter: Plant Line Value: WS
  misc_feature: MA Experiment 20000265 PARAMETER Experiment Name: At_Open_Flower_P Parameter: Tissue Value: Closed Flower vs. Whole Plant
  misc_feature: MA Experiment ID: 20000286 Result: Up-regulated in Transcription
  misc_feature: MA Experiment 20000286 PARAMETER Experiment Name: At_Open_Flower_P Parameter: Age (day) Value: 21
  misc_feature: MA Experiment 20000286 PARAMETER Experiment Name: At_Open_Flower_P Parameter: Plant Line Value: WS
  misc_feature: MA Experiment 20000286 PARAMETER Experiment Name: At_Open_Flower_P Parameter: Tissue Value: Half Open vs. Whole Plant
  misc_feature: MA Experiment ID: 20000437 Result: Down-regulated in Transcription
  misc_feature: MA Experiment 20000437 PARAMETER Experiment Name: At_Drought_P Parameter: Age (day) Value: 8
  misc_feature: MA Experiment 20000437 PARAMETER Experiment Name: At_Drought_P Parameter: Organism Value: A. thaliana
  misc_feature: MA Experiment 20000437 PARAMETER Experiment Name: At_Drought_P Parameter: Plant Line Value: WS
  misc_feature: MA Experiment 20000437 PARAMETER Experiment Name: At_Drought_P Parameter: Timepoint (hr) Value: 24
  misc_feature: MA Experiment 20000437 PARAMETER Experiment Name: At_Drought_P Parameter: Tissue Value: Whole Plant
  misc_feature: MA Experiment 20000437 PARAMETER Experiment Name: At_Drought_P Parameter: Treatment Value: Drought vs. No Drought
  misc_feature: MA Experiment ID: 20001451 Result: Down-regulated in Transcription
  misc_feature: MA Experiment 20001451 PARAMETER Experiment Name: At_Far-red-induction_P Parameter: Age (day) Value: 7
  misc_feature: MA Experiment 20001451 PARAMETER Experiment Name: At_Far-red-induction_P Parameter: Light Value: Far-red vs. White
  misc_feature: MA Experiment 20001451 PARAMETER Experiment Name: At_Far-red-induction_P Parameter: Organism Value: A. thaliana
  misc_feature: MA Experiment 20001451 PARAMETER Experiment Name: At_Far-red-induction_P Parameter: Plant Line Value: Columbia
  misc_feature: MA Experiment 20001451 PARAMETER Experiment Name: At_Far-red-induction_P Parameter: Timepoint (hr) Value: 24
  misc_feature: MA Experiment 20001451 PARAMETER Experiment Name: At_Far-red-induction_P Parameter: Tissue Value: Whole Plant
atgcagtctgtttataaaaataaagctgtaacctttaaaaagttgctatctttgcacccgagagagagctcagtgaaaaagatgggaagcggtgtaggtgtagctctctttgccctctcccttcttctcgtctcccatgaggtggaatctgcaatcggcgtgaactggggaacgttgtcatttcacaagatgagaccttccacagtggtggatctcctcaaagcaaacaagatcaccaaggtgaagcttttcgatgcgaatccagatgcgcttcgagcgttaatgggtactggaatccaagtaatgatcggcattcctaacgagatgctctcaactttcaattctgatttgtttgtccagcaaaatctctctcgcttcataggcaaaaacggtgctgatattaggtatgttgcagtagggaatgagccgtttctgactggttacggtggtcagtttcagaactatgtagtcccaactatggttaacctgcaacaatctttggttagagcaaatctagctagctatgtgaagttggtggttccttgcaacgcagatgcgtatcagtctaatgttccctctcaggggatgttccggcctgagcttacacagattatgactcaattggtttcgtttctcaactccaatggctctccttttgtggttaatatctatcctttccttagtctctatgggaactcggattttccacaagactatgccttttttgaggggagtagtcatccggttccggatgggcctaacacttactataatgcatttgatgggaactttgacactcttgttgctgctctcaccaagcttggatatggtcaaatgcctatagttattggtgagattggttggcctacagatggagcagttggtgctaatctcacagcagcccgggtttttaatcaagggctcattagccatgtgttgagcaacaaaggaacaccgctcaggcctggatctcctcctgcggatgtatatcttttcggtttgcttgacgaaggagcgaaaagcacactgcctggtaactttgagaggcattggggaatcttctctttcgatggacaggccaagtatcgtctcaacttaggactaggcaacagaggactcaagaatgcaaaaaatgtgcagtaccttccttcaaggtggtgtgtggctcacccatcaagagacatgacccaagttggtgaccacctcaggcttgcttgcagtgaagcagattgcacaacgctcaacgacgggggctcgtgcagccagcttggtgaaaaagataatatctcatacgctttcaacagttactatcagatgcagatgcaacatgaaaagagctgtgactttgatggacttggcatggtcaccttcctagatccttcagttggtgactgtcgatttcttgtgggtgttactgatataggcttatcgtcaagtactgagccaatggcaaggtggtctatctaccacatttgcattggactattgatctggactctcacaatgtag

SEQ ID NO: 46854 - protein, 502 aa, Arabidopsis thaliana
  peptide (1)..(502): Ceres Seq. ID no. 12574786
  misc_feature (52)..(366): Pfam Name: Glycosyl hydrolases family 17 Pfam Description: Glycosyl hydrolases family 17
  misc_feature (52)..(498): Homolog of NCBI NO: 34395009 NR Description: putative 3-glucanase [Oryza sativa (japonica
  misc_feature (51)..(471): Homolog of NCBI NO: 28269434 NR Description: putative beta-1,3 glucanase
  misc_feature (32)..(472): Homolog of NCBI NO: 18483232 NR Description: 3-glucanase [Sorghum bicolor]
  misc_feature (52)..(471): Homolog of NCBI NO: 30060382 NR Description: putative glucan endo-1,3-beta-glucosidase
  misc_feature (28)..(467): Homolog of NCBI NO: 16604491 NR Description: AT5g58090/k21l19_70 [Arabidopsis thaliana]
  misc_feature (28)..(467): Homolog of NCBI NO: 22327934 NR Description: glycosyl hydrolase family 17
  misc_feature (31)..(498): Homolog of NCBI NO: 15235840 NR Description: glycosyl hydrolase family 17; protein id:
  misc_feature (50)..(496): Homolog of NCBI NO: 38423964 NR Description: putative glycosyl hydrolase
  misc_feature (28)..(502): Homolog of NCBI NO: 30683955 NR Description: glycosyl hydrolase family 17 [Arabidopsis
  misc_feature (1)..(502): Homolog of NCBI NO: 7488109 NR Description: probable glucanase - Arabidopsis thaliana
MQSVYKNKAVTFKKLLSLHPRESSVKKMGSGVGVALFALSLLLVSHEVESAIGVNWGTLSFHKMRPSTVVDLLKANKITKVKLFDANPDALRALMGTGIQVMIGIPNEMLSTFNSDLFVQQNLSRFIGKNGADIRYVAVGNEPFLTGYGGQFQNYVVPTMVNLQQSLVRANLASYVKLVVPCNADAYQSNVPSQGMFRPELTQIMTQLVSFLNSNGSPFVVNIYPFLSLYGNSDFPQDYAFFEGSSHPVPDGPNTYYNAFDGNFDTLVAALTKLGYGQMPIVIGEIGWPTDGAVGANLTAARVFNQGLISHVLSNKGTPLRPGSPPADVYLFGLLDEGAKSTLPGNFERHWGIFSFDGQAKYRLNLGLGNRGLKNAKNVQYLPSRWCVAHPSRDMTQVGDHLRLACSEADCTTLNDGGSCSQLGEKDNISYAFNSYYQMQMQHEKSCDFDGLGMVTFLDPSVGDCRFLVGVTDIGLSSSTEPMARWSIYHICIGLLIWTLTM

SEQ ID NO: 46855 - protein, 475 aa, Arabidopsis thaliana
  peptide (1)..(475): Ceres Seq. ID no. 12574787
  misc_feature (25)..(339): Pfam Name: Glycosyl hydrolases family 17 Pfam Description: Glycosyl hydrolases family 17
  misc_feature (25)..(471): Homolog of NCBI NO: 34395009 NR Description: putative 3-glucanase [Oryza sativa (japonica
  misc_feature (24)..(444): Homolog of NCBI NO: 28269434 NR Description: putative beta-1,3 glucanase
  misc_feature (5)..(445): Homolog of NCBI NO: 18483232 NR Description: 3-glucanase [Sorghum bicolor]
  misc_feature (25)..(444): Homolog of NCBI NO: 30060382 NR Description: putative glucan endo-1,3-beta-glucosidase
  misc_feature (1)..(440): Homolog of NCBI NO: 16604491 NR Description: AT5g58090/k21l19_70 [Arabidopsis thaliana]
  misc_feature (1)..(440): Homolog of NCBI NO: 22327934 NR Description: glycosyl hydrolase family 17
  misc_feature (4)..(471): Homolog of NCBI NO: 15235840 NR Description: glycosyl hydrolase family 17; protein id:
  misc_feature (23)..(469): Homolog of NCBI NO: 38423964 NR Description: putative glycosyl hydrolase
  misc_feature (1)..(475): Homolog of NCBI NO: 30683955 NR Description: glycosyl hydrolase family 17 [Arabidopsis
  misc_feature (1)..(475): Homolog of NCBI NO: 7488109 NR Description: probable glucanase - Arabidopsis thaliana
MGSGVGVALFALSLLLVSHEVESAIGVNWGTLSFHKMRPSTVVDLLKANKITKVKLFDANPDALRALMGTGIQVMIGIPNEMLSTFNSDLFVQQNLSRFIGKNGADIRYVAVGNEPFLTGYGGQFQNYVVPTMVNLQQSLVRANLASYVKLVVPCNADAYQSNVPSQGMFRPELTQIMTQLVSFLNSNGSPFVVNIYPFLSLYGNSDFPQDYAFFEGSSHPVPDGPNTYYNAFDGNFDTLVAALTKLGYGQMPIVIGEIGWPTDGAVGANLTAARVFNQGLISHVLSNKGTPLRPGSPPADVYLFGLLDEGAKSTLPGNFERHWGIFSFDGQAKYRLNLGLGNRGLKNAKNVQYLPSRWCVAHPSRDMTQVGDHLRLACSEADCTTLNDGGSCSQLGEKDNISYAFNSYYQMQMQHEKSCDFDGLGMVTFLDPSVGDCRFLVGVTDIGLSSSTEPMARWSIYHICIGLLIWTLTM

SEQ ID NO: 46856 - protein, 439 aa, Arabidopsis thaliana
  peptide (1)..(439): Ceres Seq. ID no. 12574788
  misc_feature (1)..(303): Pfam Name: Glycosyl hydrolases family 17 Pfam Description: Glycosyl hydrolases family 17
  misc_feature (1)..(435): Homolog of NCBI NO: 34395009 NR Description: putative 3-glucanase [Oryza sativa (japonica
  misc_feature (1)..(408): Homolog of NCBI NO: 28269434 NR Description: putative beta-1,3 glucanase
  misc_feature (1)..(409): Homolog of NCBI NO: 18483232 NR Description: 3-glucanase [Sorghum bicolor]
  misc_feature (1)..(408): Homolog of NCBI NO: 30060382 NR Description: putative glucan endo-1,3-beta-glucosidase
  misc_feature (1)..(404): Homolog of NCBI NO: 16604491 NR Description: AT5g58090/k21l19_70 [Arabidopsis thaliana]
  misc_feature (1)..(404): Homolog of NCBI NO: 22327934 NR Description: glycosyl hydrolase family 17
  misc_feature (1)..(435): Homolog of NCBI NO: 15235840 NR Description: glycosyl hydrolase family 17; protein id:
  misc_feature (1)..(433): Homolog of NCBI NO: 38423964 NR Description: putative glycosyl hydrolase
  misc_feature (1)..(439): Homolog of NCBI NO: 30683955 NR Description: glycosyl hydrolase family 17 [Arabidopsis
  misc_feature (1)..(439): Homolog of NCBI NO: 7488109 NR Description: probable glucanase - Arabidopsis thaliana
MRPSTVVDLLKANKITKVKLFDANPDALRALMGTGIQVMIGIPNEMLSTFNSDLFVQQNLSRFIGKNGADIRYVAVGNEPFLTGYGGQFQNYVVPTMVNLQQSLVRANLASYVKLVVPCNADAYQSNVPSQGMFRPELTQIMTQLVSFLNSNGSPFVVNIYPFLSLYGNSDFPQDYAFFEGSSHPVPDGPNTYYNAFDGNFDTLVAALTKLGYGQMPIVIGEIGWPTDGAVGANLTAARVFNQGLISHVLSNKGTPLRPGSPPADVYLFGLLDEGAKSTLPGNFERHWGIFSFDGQAKYRLNLGLGNRGLKNAKNVQYLPSRWCVAHPSRDMTQVGDHLRLACSEADCTTLNDGGSCSQLGEKDNISYAFNSYYQMQMQHEKSCDFDGLGMVTFLDPSVGDCRFLVGVTDIGLSSSTEPMARWSIYHICIGLLIWTLTM

SEQ ID NO: 46857 - DNA, 1483 bp, Arabidopsis thaliana
  misc_feature (1)..(1483): Ceres Seq. ID no. 13646901
  misc_feature: MA Experiment ID: 20000173 Result: Down-regulated in Transcription
  misc_feature: MA Experiment 20000173 PARAMETER Experiment Name: At_42deg_Heat_P Parameter: Age (day) Value: 14
  misc_feature: MA Experiment 20000173 PARAMETER Experiment Name: At_42deg_Heat_P Parameter: Organism Value: A. thaliana
  misc_feature: MA Experiment 20000173 PARAMETER Experiment Name: At_42deg_Heat_P Parameter: Plant Line Value: WS
  misc_feature: MA Experiment 20000173 PARAMETER Experiment Name: At_42deg_Heat_P Parameter: Temperature (deg C) Value: 42 vs. 22
  misc_feature: MA Experiment 20000173 PARAMETER Experiment Name: At_42deg_Heat_P Parameter: Timepoint (hr) Value: 6
  misc_feature: MA Experiment 20000173 PARAMETER Experiment Name: At_42deg_Heat_P Parameter: Tissue Value: Aerial
  misc_feature: MA Experiment ID: 20000182 Result: Up-regulated in Transcription
  misc_feature: MA Experiment 20000182 PARAMETER Experiment Name: At_2mM_SA_P Parameter: Age (day) Value: 14
  misc_feature: MA Experiment 20000182 PARAMETER Experiment Name: At_2mM_SA_P Parameter: Organism Value: A. thaliana
  misc_feature: MA Experiment 20000182 PARAMETER Experiment Name: At_2mM_SA_P Parameter: Plant Line Value: WS
  misc_feature: MA Experiment 20000182 PARAMETER Experiment Name: At_2mM_SA_P Parameter: Timepoint (hr) Value: 6
  misc_feature: MA Experiment 20000182 PARAMETER Experiment Name: At_2mM_SA_P Parameter: Tissue Value: Aerial
  misc_feature: MA Experiment 20000182 PARAMETER Experiment Name: At_2mM_SA_P Parameter: Treatment Value: 2mM SA vs. No Treatment
  misc_feature: MA Experiment ID: 20000184 Result: Down-regulated in Transcription
  misc_feature: MA Experiment 20000184 PARAMETER Experiment Name: At_Shoots__P Parameter: Age (day) Value: 7
  misc_feature: MA Experiment 20000184 PARAMETER Experiment Name: At_Shoots__P Parameter: Tissue Value: Shoots vs. Whole Plant
  misc_feature: MA Experiment ID: 20000185 Result: Down-regulated in Transcription
  misc_feature: MA Experiment 20000185 PARAMETER Experiment Name: At_Roots__P Parameter: Age (day) Value: 7 vs. 21
  misc_feature: MA Experiment 20000185 PARAMETER Experiment Name: At_Roots__P Parameter: Organism Value: A. thaliana
  misc_feature: MA Experiment 20000185 PARAMETER Experiment Name: At_Roots__P Parameter: Tissue Value: Roots vs. Whole Plant
  misc_feature: MA Experiment ID: 20000213 Result: Down-regulated in Transcription
  misc_feature: MA Experiment 20000213 PARAMETER Experiment Name: At_4deg_Cold_P Parameter: Timepoint (hr) Value: 2
  misc_feature: MA Experiment ID: 20000214 Result: Down-regulated in Transcription
  misc_feature: MA Experiment 20000214 PARAMETER Experiment Name: At_4deg_Cold_P Parameter: Timepoint (hr) Value: 6
  misc_feature: MA Experiment ID: 20000227 Result: Down-regulated in Transcription
  misc_feature: MA Experiment 20000227 PARAMETER Experiment Name: At_Root-Tips-vs-Tops_P Parameter: Tissue Value: Root Tips vs. Root Tops
  misc_feature: MA Experiment ID: 20000234 Result: Down-regulated in Transcription
  misc_feature: MA Experiment 20000234 PARAMETER Experiment Name: At_Siliques_P Parameter: Age (day) Value: 21
  misc_feature: MA Experiment 20000234 PARAMETER Experiment Name: At_Siliques_P Parameter: Organism Value: A. thaliana
  misc_feature: MA Experiment 20000234 PARAMETER Experiment Name: At_Siliques_P Parameter: Plant Line Value: WS
  misc_feature: MA Experiment 20000234 PARAMETER Experiment Name: At_Siliques_P Parameter: Tissue Value: Less Than 5mm Siliques vs. Whole Plant
  misc_feature: MA Experiment ID: 20000235 Result: Down-regulated in Transcription
  misc_feature: MA Experiment 20000235 PARAMETER Experiment Name: At_Siliques_P Parameter: Age (day) Value: 21
  misc_feature: MA Experiment 20000235 PARAMETER Experiment Name: At_Siliques_P Parameter: Organism Value: A. thaliana
  misc_feature: MA Experiment 20000235 PARAMETER Experiment Name: At_Siliques_P Parameter: Plant Line Value: WS
  misc_feature: MA Experiment 20000235 PARAMETER Experiment Name: At_Siliques_P Parameter: Tissue Value: 5-10mm Siliques vs. Whole Plant
  misc_feature: MA Experiment ID: 20000264 Result: Down-regulated in Transcription
  misc_feature: MA Experiment 20000264 PARAMETER Experiment Name: At_Open_Flower_P Parameter: Age (day) Value: 21
  misc_feature: MA Experiment 20000264 PARAMETER Experiment Name: At_Open_Flower_P Parameter: Plant Line Value: WS
  misc_feature: MA Experiment 20000264 PARAMETER Experiment Name: At_Open_Flower_P Parameter: Tissue Value: Open Flower vs. Whole Plant
  misc_feature: MA Experiment ID: 20000265 Result: Down-regulated in Transcription
  misc_feature: MA Experiment 20000265 PARAMETER Experiment Name: At_Open_Flower_P Parameter: Age (day) Value: 21
  misc_feature: MA Experiment 20000265 PARAMETER Experiment Name: At_Open_Flower_P Parameter: Plant Line Value: WS
  misc_feature: MA Experiment 20000265 PARAMETER Experiment Name: At_Open_Flower_P Parameter: Tissue Value: Closed Flower vs. Whole Plant
  misc_feature: MA Experiment ID: 20000286 Result: Down-regulated in Transcription
  misc_feature: MA Experiment 20000286 PARAMETER Experiment Name: At_Open_Flower_P Parameter: Age (day) Value: 21
  misc_feature: MA Experiment 20000286 PARAMETER Experiment Name: At_Open_Flower_P Parameter: Plant Line Value: WS
  misc_feature: MA Experiment 20000286 PARAMETER Experiment Name: At_Open_Flower_P Parameter: Tissue Value: Half Open vs. Whole Plant
  misc_feature: MA Experiment ID: 20000436 Result: Up-regulated in Transcription
  misc_feature: MA Experiment 20000436 PARAMETER Experiment Name: At_Drought_P Parameter: Age (day) Value: 7
  misc_feature: MA Experiment 20000436 PARAMETER Experiment Name: At_Drought_P Parameter: Organism Value: A. thaliana
  misc_feature: MA Experiment 20000436 PARAMETER Experiment Name: At_Drought_P Parameter: Plant Line Value: WS
  misc_feature: MA Experiment 20000436 PARAMETER Experiment Name: At_Drought_P Parameter: Timepoint (hr) Value: 12
  misc_feature: MA Experiment 20000436 PARAMETER Experiment Name: At_Drought_P Parameter: Tissue Value: Whole Plant
  misc_feature: MA Experiment 20000436 PARAMETER Experiment Name: At_Drought_P Parameter: Treatment Value: Drought vs. No Drought
  misc_feature: MA Experiment ID: 20000437 Result: Up-regulated in Transcription
  misc_feature: MA Experiment 20000437 PARAMETER Experiment Name: At_Drought_P Parameter: Age (day) Value: 8
  misc_feature: MA Experiment 20000437 PARAMETER Experiment Name: At_Drought_P Parameter: Organism Value: A. thaliana
  misc_feature: MA Experiment 20000437 PARAMETER Experiment Name: At_Drought_P Parameter: Plant Line Value: WS
  misc_feature: MA Experiment 20000437 PARAMETER Experiment Name: At_Drought_P Parameter: Timepoint (hr) Value: 24
  misc_feature: MA Experiment 20000437 PARAMETER Experiment Name: At_Drought_P Parameter: Tissue Value: Whole Plant
  misc_feature: MA Experiment 20000437 PARAMETER Experiment Name: At_Drought_P Parameter: Treatment Value: Drought vs. No Drought
  misc_feature: MA Experiment ID: 20000438 Result: Down-regulated in Transcription
  misc_feature: MA Experiment 20000438 PARAMETER Experiment Name: At_Shoots__P Parameter: Age (day) Value: 14
  misc_feature: MA Experiment 20000438 PARAMETER Experiment Name: At_Shoots__P Parameter: Tissue Value: Shoots vs. Whole Plant
  misc_feature: MA Experiment ID: 20000441 Result: Up-regulated in Transcription
  misc_feature: MA Experiment 20000441 PARAMETER Experiment Name: At_1uM_BR-BRZ__P Parameter: Tissue Value: Shoot Apices
  misc_feature: MA Experiment 20000441 PARAMETER Experiment Name: At_1uM_BR-BRZ__P Parameter: Treatment Value: 1uM BR vs. No Treatment
  misc_feature: MA Experiment ID: 20000495 Result: Up-regulated in Transcription
  misc_feature: MA Experiment 20000495 PARAMETER Experiment Name: At_Guard_Cells_P Parameter: Harvest Date Value: 8/2/2002
  misc_feature: MA Experiment 20000495 PARAMETER Experiment Name: At_Guard_Cells_P Parameter: Organism Value: A. thaliana
  misc_feature: MA Experiment 20000495 PARAMETER Experiment Name: At_Guard_Cells_P Parameter: Tissue Value: Guard Cells vs. Leaves
  misc_feature: MA Experiment ID: 20000573 Result: Up-regulated in Transcription
  misc_feature: MA Experiment 20000573 PARAMETER Experiment Name: At_100uM_ABA_Mutants__P Parameter: Organism Value: A. thaliana
  misc_feature: MA Experiment 20000573 PARAMETER Experiment Name: At_100uM_ABA_Mutants__P Parameter: Plant Line Value: CS22 vs. Ler wt
  misc_feature: MA Experiment 20000573 PARAMETER Experiment Name: At_100uM_ABA_Mutants__P Parameter: Timepoint (hr) Value: N/A
  misc_feature: MA Experiment 20000573 PARAMETER Experiment Name: At_100uM_ABA_Mutants__P Parameter: Tissue Value: Whole Plant
  misc_feature: MA Experiment 20000573 PARAMETER Experiment Name: At_100uM_ABA_Mutants__P Parameter: Treatment Value: None
  misc_feature: MA Experiment ID: 20000574 Result: Up-regulated in Transcription
  misc_feature: MA Experiment 20000574 PARAMETER Experiment Name: At_100uM_ABA_Mutants__P Parameter: Organism Value: A. thaliana
  misc_feature: MA Experiment 20000574 PARAMETER Experiment Name: At_100uM_ABA_Mutants__P Parameter: Plant Line Value: CS23 vs. Ler wt
  misc_feature: MA Experiment 20000574 PARAMETER Experiment Name: At_100uM_ABA_Mutants__P Parameter: Timepoint (hr) Value: N/A
  misc_feature: MA Experiment 20000574 PARAMETER Experiment Name: At_100uM_ABA_Mutants__P Parameter: Tissue Value: Whole Plant
  misc_feature: MA Experiment 20000574 PARAMETER Experiment Name: At_100uM_ABA_Mutants__P Parameter: Treatment Value: None
  misc_feature: MA Experiment ID: 20000575 Result: Down-regulated in Transcription
  misc_feature: MA Experiment 20000575 PARAMETER Experiment Name: At_100uM_ABA_Mutants__P Parameter: Organism Value: A. thaliana
  misc_feature: MA Experiment 20000575 PARAMETER Experiment Name: At_100uM_ABA_Mutants__P Parameter: Plant Line Value: CS22
  misc_feature: MA Experiment 20000575 PARAMETER Experiment Name: At_100uM_ABA_Mutants__P Parameter: Timepoint (hr) Value: 6
  misc_feature: MA Experiment 20000575 PARAMETER Experiment Name: At_100uM_ABA_Mutants__P Parameter: Tissue Value: Whole Plant
  misc_feature: MA Experiment 20000575 PARAMETER Experiment Name: At_100uM_ABA_Mutants__P Parameter: Treatment Value: 1uM ABA vs. No Treatment
  misc_feature: MA Experiment ID: 20000576 Result: Down-regulated in Transcription
  misc_feature: MA Experiment 20000576 PARAMETER Experiment Name: At_100uM_ABA_Mutants__P Parameter: Organism Value: A. thaliana
  misc_feature: MA Experiment 20000576 PARAMETER Experiment Name: At_100uM_ABA_Mutants__P Parameter: Plant Line Value: CS23
  misc_feature: MA Experiment 20000576 PARAMETER Experiment Name: At_100uM_ABA_Mutants__P Parameter: Timepoint (hr) Value: 6
  misc_feature: MA Experiment 20000576 PARAMETER Experiment Name: At_100uM_ABA_Mutants__P Parameter: Tissue Value: Whole Plant
  misc_feature: MA Experiment 20000576 PARAMETER Experiment Name: At_100uM_ABA_Mutants__P Parameter: Treatment Value: 1uM ABA vs. No Treatment
  misc_feature: MA Experiment ID: 20000709 Result: Down-regulated in Transcription
  misc_feature: MA Experiment 20000709 PARAMETER Experiment Name: At_15mM_NH4NO3_L-to-H_P Parameter: Age (hr) Value: 14
  misc_feature: MA Experiment 20000709 PARAMETER Experiment Name: At_15mM_NH4NO3_L-to-H_P Parameter: Organism Value: A. thaliana
  misc_feature: MA Experiment 20000709 PARAMETER Experiment Name: At_15mM_NH4NO3_L-to-H_P Parameter: Plant Line Value: WS
  misc_feature: MA Experiment 20000709 PARAMETER Experiment Name: At_15mM_NH4NO3_L-to-H_P Parameter: Timepoint (hr) Value: 4
  misc_feature: MA Experiment 20000709 PARAMETER Experiment Name: At_15mM_NH4NO3_L-to-H_P Parameter: Tissue Value: Aerial
  misc_feature: MA Experiment 20000709 PARAMETER Experiment Name: At_15mM_NH4NO3_L-to-H_P Parameter: Treatment Value: 15mM NH4NO3 vs. 30mM Mannitol
  misc_feature: MA Experiment ID: 20001247 Result: Up-regulated in Transcription
  misc_feature: MA Experiment 20001247 PARAMETER Experiment Name: At_Far-red-induction_P Parameter: Age (day) Value: 7
  misc_feature: MA Experiment 20001247 PARAMETER Experiment Name: At_Far-red-induction_P Parameter: Light Value: Far-red vs. White
  misc_feature: MA Experiment 20001247 PARAMETER Experiment Name: At_Far-red-induction_P Parameter: Organism Value: A. thaliana
  misc_feature: MA Experiment 20001247 PARAMETER Experiment Name: At_Far-red-induction_P Parameter: Plant Line Value: Columbia
  misc_feature: MA Experiment 20001247 PARAMETER Experiment Name: At_Far-red-induction_P Parameter: Timepoint (hr) Value: 1
  misc_feature: MA Experiment 20001247 PARAMETER Experiment Name: At_Far-red-induction_P Parameter: Tissue Value: Whole Plant
  misc_feature: MA Experiment ID: 20001248 Result: Up-regulated in Transcription
  misc_feature: MA Experiment 20001248 PARAMETER Experiment Name: At_Far-red-induction_P Parameter: Age (day) Value: 7
  misc_feature: MA Experiment 20001248 PARAMETER Experiment Name: At_Far-red-induction_P Parameter: Light Value: Far-red vs. White
  misc_feature: MA Experiment 20001248 PARAMETER Experiment Name: At_Far-red-induction_P Parameter: Organism Value: A. thaliana
  misc_feature: MA Experiment 20001248 PARAMETER Experiment Name: At_Far-red-induction_P Parameter: Plant Line Value: Columbia
  misc_feature: MA Experiment 20001248 PARAMETER Experiment Name: At_Far-red-induction_P Parameter: Timepoint (hr) Value: 4
  misc_feature: MA Experiment 20001248 PARAMETER Experiment Name: At_Far-red-induction_P Parameter: Tissue Value: Whole Plant
  misc_feature: MA Experiment ID: 20001450 Result: Up-regulated in Transcription
  misc_feature: MA Experiment 20001450 PARAMETER Experiment Name: At_Far-red-induction_P Parameter: Age (day) Value: 7
  misc_feature: MA Experiment 20001450 PARAMETER Experiment Name: At_Far-red-induction_P Parameter: Light Value: Far-red vs. White
  misc_feature: MA Experiment 20001450 PARAMETER Experiment Name: At_Far-red-induction_P Parameter: Organism Value: A. thaliana
  misc_feature: MA Experiment 20001450 PARAMETER Experiment Name: At_Far-red-induction_P Parameter: Plant Line Value: Columbia
  misc_feature: MA Experiment 20001450 PARAMETER Experiment Name: At_Far-red-induction_P Parameter: Timepoint (hr) Value: 8
  misc_feature: MA Experiment 20001450 PARAMETER Experiment Name: At_Far-red-induction_P Parameter: Tissue Value: Whole Plant
  misc_feature: MA Experiment ID: 20001451 Result: Up-regulated in Transcription
  misc_feature: MA Experiment 20001451 PARAMETER Experiment Name: At_Far-red-induction_P Parameter: Age (day) Value: 7
  misc_feature: MA Experiment 20001451 PARAMETER Experiment Name: At_Far-red-induction_P Parameter: Light Value: Far-red vs. White
  misc_feature: MA Experiment 20001451 PARAMETER Experiment Name: At_Far-red-induction_P Parameter: Organism Value: A. thaliana
  misc_feature: MA Experiment 20001451 PARAMETER Experiment Name: At_Far-red-induction_P Parameter: Plant Line Value: Columbia
  misc_feature: MA Experiment 20001451 PARAMETER Experiment Name: At_Far-red-induction_P Parameter: Timepoint (hr) Value: 24
  misc_feature: MA Experiment 20001451 PARAMETER Experiment Name: At_Far-red-induction_P Parameter: Tissue Value: Whole Plant
  misc_feature: MA Experiment ID: 20001554 Result: Up-regulated in Transcription
  misc_feature: MA Experiment 20001554 PARAMETER Experiment Name: At_Drought_Soil_Dry_P Parameter: Age (day) Value: 21
  misc_feature: MA Experiment 20001554 PARAMETER Experiment Name: At_Drought_Soil_Dry_P Parameter: Organism Value: A. thaliana
  misc_feature: MA Experiment 20001554 PARAMETER Experiment Name: At_Drought_Soil_Dry_P Parameter: Plant Line Value: WS
  misc_feature: MA Experiment 20001554 PARAMETER Experiment Name: At_Drought_Soil_Dry_P Parameter: Post Timepoint (hr) Value: None
  misc_feature: MA Experiment 20001554 PARAMETER Experiment Name: At_Drought_Soil_Dry_P Parameter: Post-Treatment Value: None
  misc_feature: MA Experiment 20001554 PARAMETER Experiment Name: At_Drought_Soil_Dry_P Parameter: Timepoint (day) Value: 7
  misc_feature: MA Experiment 20001554 PARAMETER Experiment Name: At_Drought_Soil_Dry_P Parameter: Treatment Value: Drought vs. No Drought
  misc_feature: MA Experiment ID: 20001555 Result: Up-regulated in Transcription
  misc_feature: MA Experiment 20001555 PARAMETER Experiment Name: At_Drought_Soil_Dry_P Parameter: Age (day) Value: 24
  misc_feature: MA Experiment 20001555 PARAMETER Experiment Name: At_Drought_Soil_Dry_P Parameter: Organism Value: A. thaliana
  misc_feature: MA Experiment 20001555 PARAMETER Experiment Name: At_Drought_Soil_Dry_P Parameter: Plant Line Value: WS
  misc_feature: MA Experiment 20001555 PARAMETER Experiment Name: At_Drought_Soil_Dry_P Parameter: Post Timepoint (hr) Value: None
  misc_feature: MA Experiment 20001555 PARAMETER Experiment Name: At_Drought_Soil_Dry_P Parameter: Post-Treatment Value: None
  misc_feature: MA Experiment 20001555 PARAMETER Experiment Name: At_Drought_Soil_Dry_P Parameter: Timepoint (day) Value: 10
  misc_feature: MA Experiment 20001555 PARAMETER Experiment Name: At_Drought_Soil_Dry_P Parameter: Treatment Value: Drought vs. No Drought
  misc_feature: MA Experiment ID: 20001757 Result: Down-regulated in Transcription
  misc_feature: MA Experiment 20001757 PARAMETER Experiment Name: At_50mM_NH4NO3_L-to-H_P Parameter: Timepoint (hr) Value: 6
  misc_feature: MA Experiment 20001757 PARAMETER Experiment Name: At_50mM_NH4NO3_L-to-H_P Parameter: Tissue Value: Leaf
  misc_feature: MA Experiment 20001757 PARAMETER Experiment Name: At_50mM_NH4NO3_L-to-H_P Parameter: Treatment Value: 50mM NH4NO3 vs 100mM Mannitol
  misc_feature: MA Experiment ID: 20001771 Result: Up-regulated in Transcription
  misc_feature: MA Experiment 20001771 PARAMETER Experiment Name: At_Far-red-enriched-adult_P Parameter: Age (day) Value: 28
  misc_feature: MA Experiment 20001771 PARAMETER Experiment Name: At_Far-red-enriched-adult_P Parameter: Light Value: Far-red enriched vs. White
  misc_feature: MA Experiment 20001771 PARAMETER Experiment Name: At_Far-red-enriched-adult_P Parameter: Organism Value: A. thaliana
  misc_feature: MA Experiment 20001771 PARAMETER Experiment Name: At_Far-red-enriched-adult_P Parameter: Plant Line Value: Columbia
  misc_feature: MA Experiment 20001771 PARAMETER Experiment Name: At_Far-red-enriched-adult_P Parameter: Timepoint (hr) Value: 16
  misc_feature: MA Experiment 20001771 PARAMETER Experiment Name: At_Far-red-enriched-adult_P Parameter: Tissue Value: Aerial
  misc_feature: MA Experiment ID: 20001773 Result: Up-regulated in Transcription
  misc_feature: MA Experiment 20001773 PARAMETER Experiment Name: At_Far-red-enriched-adult_P Parameter: Age (day) Value: 30
  misc_feature: MA Experiment 20001773 PARAMETER Experiment Name: At_Far-red-enriched-adult_P Parameter: Light Value: Far-red enriched vs. White
  misc_feature: MA Experiment 20001773 PARAMETER Experiment Name: At_Far-red-enriched-adult_P Parameter: Organism Value: A. thaliana
  misc_feature: MA Experiment 20001773 PARAMETER Experiment Name: At_Far-red-enriched-adult_P Parameter: Plant Line Value: Columbia
  misc_feature: MA Experiment 20001773 PARAMETER Experiment Name: At_Far-red-enriched-adult_P Parameter: Timepoint (hr) Value: 48
  misc_feature: MA Experiment 20001773 PARAMETER Experiment Name: At_Far-red-enriched-adult_P Parameter: Tissue Value: Aerial
ggttgttttttttattattattgaaatcaagagaattaaaacagaggctctgcaaaagaagatgatcaaaacaatcacatctctacgcaaaactctggttctacctcttcatttacatattcgtacgctacaaactttcgccaagtacaacgcacaagctgcatcggctttgcgagaagagcgtaagaaacctctttatcaaaatggagatgatgtatatgcggatttggattgggataatctcgggtttggtctaaatccagctgattacatgtatgtcatgaaatgctcaaaagacggcgaattcactcaaggagaacttagtccctatgggaatattcagctaagtccttctgctggagtcttaaactatggacaggcgatatacgaaggtacaaaagcatacaggaaagaaaatgggaagcttcttttgtttcgtccggatcacaacgctatccggatgaagcttggcgctgaacggatgctcatgccttctccttcggttgatcagtttgttaatgcagttaaacaaaccgctcttgcaaacaaacgttgggttcctcctgcagggaaagggactttgtacattaggcctttgttgatgggaagtggtccaatacttggtttaggtcctgcacctgaatatacattcattgtctatgcatctccagttggtaactacttcaaggaagggatggctgctcttaacctctatgttgaggaagaatatgtccgagcggctcctggtggagctggaggcgtcaagagcatcacaaattatgcgccagttttgaaagcactgagcagagccaagagtcgggggttttcagacgttctttatctcgactctgtcaagaagaagtacttagaggaggcttcttcttgcaacgtctttgttgtcaagggtcggacaatctcaactcctgcaactaatggaacaattcttgaagggattacgcggaaaagtgtgatggagatcgcaagtgatcaaggttatcaggtagtagagaaggcagttcatgtggatgaagtaatggatgcagatgaagttttttgcaccggaactgctgtagtagttgctcccgtgggcactatcacatatcaggacaaaagagtagagtataaaaccggggatgaatctgtctgccagaaactgcgttcagtcctcgtaggtatccagacaggattgattgaagataacaagggatgggtcacagatatcaactgaagaataacaatcttcaatattttgccacaaaggagattactctgcattttaagctgtgtatacacgacaatgaagaacactataaacatatatatgagatagaaacagaaagctcttttgctcatttctatatcgtaaagtcaatgtctttcacaaaactatgacaaagaaaagaatcgtctattgtacttgtagacaagtgtttccaaggatagtttmawttccwcmwtaaagttggaackggaggggggaaag

SEQ ID NO: 46858 - protein, 408 aa, Arabidopsis thaliana
  peptide (1)..(408): Ceres Seq. ID no. 15219116
  misc_feature (21)..(403): Homolog of NCBI NO: 6319165 NR Description: branched-chain amino acid aminotransferase
  misc_feature (38)..(408): Homolog of NCBI NO: 26391655 NR Description: Branched-chain amino acid aminotransferase 5,
  misc_feature (74)..(408): Homolog of NCBI NO: 21593211 NR Description: branched-chain-amino-acid transaminase-like
  misc_feature (74)..(408): Homolog of NCBI NO: 18408919 NR Description: branched-chain-amino-acid transaminase -related
  misc_feature (74)..(408): Homolog of NCBI NO: 34902362 NR Description: Putative aminotransferase
  misc_feature (74)..(407): Homolog of NCBI NO: 6319167 NR Description: branched-chain amino acid aminotransferase
  misc_feature (75)..(408): Homolog of NCBI NO: 27311239 NR Description: Unknown protein [Oryza sativa (japonica
  misc_feature (49)..(407): Homolog of NCBI NO: 14280354 NR Description: branched-chain amino acid aminotransferase
  misc_feature (91)..(408): Homolog of NCBI NO: 7450517 NR Description: branched-chain amino acid aminotransferase
  misc_feature (21)..(408): Homolog of NCBI NO: 15218409 NR Description: tat-binding protein -related [Arabidopsis
VVFFIIIEIKRIKTEALQKKMIKTITSLRKTLVLPLHLHIRTLQTFAKYNAQAASALREERKKPLYQNGDDVYADLDWDNLGFGLNPADYMYVMKCSKDGEFTQGELSPYGNIQLSPSAGVLNYGQAIYEGTKAYRKENGKLLLFRPDHNAIRMKLGAERMLMPSPSVDQFVNAVKQTALANKRWVPPAGKGTLYIRPLLMGSGPILGLGPAPEYTFIVYASPVGNYFKEGMAALNLYVEEEYVRAAPGGAGGVKSITNYAPVLKALSRAKSRGFSDVLYLDSVKKKYLEEASSCNVFVVKGRTISTPATNGTILEGITRKSVMEIASDQGYQVVEKAVHVDEVMDADEVFCTGTAVVVAPVGTITYQDKRVEYKTGDESVCQKLRSVLVGIQTGLIEDNKGWVTDIN

SEQ ID NO: 46859 - protein, 388 aa, Arabidopsis thaliana
  peptide (1)..(388): Ceres Seq. ID no. 15219117
  misc_feature (1)..(383): Homolog of NCBI NO: 6319165 NR Description: branched-chain amino acid aminotransferase
  misc_feature (18)..(388): Homolog of NCBI NO: 26391655 NR Description: Branched-chain amino acid aminotransferase 5,
  misc_feature (54)..(388): Homolog of NCBI NO: 21593211 NR Description: branched-chain-amino-acid transaminase-like
  misc_feature (54)..(388): Homolog of NCBI NO: 18408919 NR Description: branched-chain-amino-acid transaminase -related
  misc_feature (54)..(388): Homolog of NCBI NO: 34902362 NR Description: Putative aminotransferase
  misc_feature (54)..(387): Homolog of NCBI NO: 6319167 NR Description: branched-chain amino acid aminotransferase
  misc_feature (55)..(388): Homolog of NCBI NO: 27311239 NR Description: Unknown protein [Oryza sativa (japonica
  misc_feature (29)..(387): Homolog of NCBI NO: 14280354 NR Description: branched-chain amino acid aminotransferase
  misc_feature (71)..(388): Homolog of NCBI NO: 7450517 NR Description: branched-chain amino acid aminotransferase
  misc_feature (1)..(388): Homolog of NCBI NO: 15218409 NR Description: tat-binding protein -related [Arabidopsis
MIKTITSLRKTLVLPLHLHIRTLQTFAKYNAQAASALREERKKPLYQNGDDVYADLDWDNLGFGLNPADYMYVMKCSKDGEFTQGELSPYGNIQLSPSAGVLNYGQAIYEGTKAYRKENGKLLLFRPDHNAIRMKLGAERMLMPSPSVDQFVNAVKQTALANKRWVPPAGKGTLYIRPLLMGSGPILGLGPAPEYTFIVYASPVGNYFKEGMAALNLYVEEEYVRAAPGGAGGVKSITNYAPVLKALSRAKSRGFSDVLYLDSVKKKYLEEASSCNVFVVKGRTISTPATNGTILEGITRKSVMEIASDQGYQVVEKAVHVDEVMDADEVFCTGTAVVVAPVGTITYQDKRVEYKTGDESVCQKLRSVLVGIQTGLIEDNKGWVTDIN

SEQ ID NO: 46860 - protein, 318 aa, Arabidopsis thaliana
  peptide (1)..(318): Ceres Seq. ID no. 15219118
  misc_feature (1)..(313): Homolog of NCBI NO: 6319165 NR Description: branched-chain amino acid aminotransferase
  misc_feature (1)..(318): Homolog of NCBI NO: 26391655 NR Description: Branched-chain amino acid aminotransferase 5,
  misc_feature (1)..(318): Homolog of NCBI NO: 21593211 NR Description: branched-chain-amino-acid transaminase-like
  misc_feature (1)..(318): Homolog of NCBI NO: 18408919 NR Description: branched-chain-amino-acid transaminase -related
  misc_feature (1)..(318): Homolog of NCBI NO: 34902362 NR Description: Putative aminotransferase
  misc_feature (1)..(317): Homolog of NCBI NO: 6319167 NR Description: branched-chain amino acid aminotransferase
  misc_feature (1)..(318): Homolog of NCBI NO: 27311239 NR Description: Unknown protein [Oryza sativa (japonica
  misc_feature (1)..(317): Homolog of NCBI NO: 14280354 NR Description: branched-chain amino acid aminotransferase
  misc_feature (1)..(318): Homolog of NCBI NO: 7450517 NR Description: branched-chain amino acid aminotransferase
  misc_feature (1)..(318): Homolog of NCBI NO: 15218409 NR Description: tat-binding protein -related [Arabidopsis
MYVMKCSKDGEFTQGELSPYGNIQLSPSAGVLNYGQAIYEGTKAYRKENGKLLLFRPDHNAIRMKLGAERMLMPSPSVDQFVNAVKQTALANKRWVPPAGKGTLYIRPLLMGSGPILGLGPAPEYTFIVYASPVGNYFKEGMAALNLYVEEEYVRAAPGGAGGVKSITNYAPVLKALSRAKSRGFSDVLYLDSVKKKYLEEASSCNVFVVKGRTISTPATNGTILEGITRKSVMEIASDQGYQVVEKAVHVDEVMDADEVFCTGTAVVVAPVGTITYQDKRVEYKTGDESVCQKLRSVLVGIQTGLIEDNKGWVTDIN

SEQ ID NO: 46861 - DNA, 1563 bp, Arabidopsis thaliana
  misc_feature (1)..(1563): Ceres Seq. ID no. 14309767
  misc_feature: MA Experiment ID: 20000184 Result: Up-regulated in Transcription
  misc_feature: MA Experiment 20000184 PARAMETER Experiment Name: At_Shoots__P Parameter: Age (day) Value: 7
  misc_feature: MA Experiment 20000184 PARAMETER Experiment Name: At_Shoots__P Parameter: Tissue Value: Shoots vs. Whole Plant
  misc_feature: MA Experiment ID: 20000265 Result: Up-regulated in Transcription
  misc_feature: MA Experiment 20000265 PARAMETER Experiment Name: At_Open_Flower_P Parameter: Age (day) Value: 21
  misc_feature: MA Experiment 20000265 PARAMETER Experiment Name: At_Open_Flower_P Parameter: Plant Line Value: WS
  misc_feature: MA Experiment 20000265 PARAMETER Experiment Name: At_Open_Flower_P Parameter: Tissue Value: Closed Flower vs. Whole Plant
  misc_feature: MA Experiment ID: 20000438 Result: Up-regulated in Transcription
  misc_feature: MA Experiment 20000438 PARAMETER Experiment Name: At_Shoots__P Parameter: Age (day) Value: 14
  misc_feature: MA Experiment 20000438 PARAMETER Experiment Name: At_Shoots__P Parameter: Tissue Value: Shoots vs. Whole Plant
  misc_feature: MA Experiment ID: 20000496 Result: Up-regulated in Transcription
  misc_feature: MA Experiment 20000496 PARAMETER Experiment Name: At_Guard_Cells_P Parameter: Harvest Date Value: 7/19/2002
  misc_feature: MA Experiment 20000496 PARAMETER Experiment Name: At_Guard_Cells_P Parameter: Organism Value: Canola
  misc_feature: MA Experiment 20000496 PARAMETER Experiment Name: At_Guard_Cells_P Parameter: Tissue Value: Guard Cells vs. Leaves
  misc_feature: MA Experiment ID: 20001247 Result: Up-regulated in Transcription
  misc_feature: MA Experiment 20001247 PARAMETER Experiment Name: At_Far-red-induction_P Parameter: Age (day) Value: 7
  misc_feature: MA Experiment 20001247 PARAMETER Experiment Name: At_Far-red-induction_P Parameter: Light Value: Far-red vs. White
  misc_feature: MA Experiment 20001247 PARAMETER Experiment Name: At_Far-red-induction_P Parameter: Organism Value: A. thaliana
  misc_feature: MA Experiment 20001247 PARAMETER Experiment Name: At_Far-red-induction_P Parameter: Plant Line Value: Columbia
  misc_feature: MA Experiment 20001247 PARAMETER Experiment Name: At_Far-red-induction_P Parameter: Timepoint (hr) Value: 1
  misc_feature: MA Experiment 20001247 PARAMETER Experiment Name: At_Far-red-induction_P Parameter: Tissue Value: Whole Plant
  misc_feature: MA Experiment ID: 20001248 Result: Up-regulated in Transcription
  misc_feature: MA Experiment 20001248 PARAMETER Experiment Name: At_Far-red-induction_P Parameter: Age (day) Value: 7
  misc_feature: MA Experiment 20001248 PARAMETER Experiment Name: At_Far-red-induction_P Parameter: Light Value: Far-red vs. White
  misc_feature: MA Experiment 20001248 PARAMETER Experiment Name: At_Far-red-induction_P Parameter: Organism Value: A. thaliana
  misc_feature: MA Experiment 20001248 PARAMETER Experiment Name: At_Far-red-induction_P Parameter: Plant Line Value: Columbia
  misc_feature: MA Experiment 20001248 PARAMETER Experiment Name: At_Far-red-induction_P Parameter: Timepoint (hr) Value: 4
  misc_feature: MA Experiment 20001248 PARAMETER Experiment Name: At_Far-red-induction_P Parameter: Tissue Value: Whole Plant
  misc_feature: MA Experiment ID: 20001757 Result: Up-regulated in Transcription
  misc_feature: MA Experiment 20001757 PARAMETER Experiment Name: At_50mM_NH4NO3_L-to-H_P Parameter: Timepoint (hr) Value: 6
  misc_feature: MA Experiment 20001757 PARAMETER Experiment Name: At_50mM_NH4NO3_L-to-H_P Parameter: Tissue Value: Leaf
  misc_feature: MA Experiment 20001757 PARAMETER Experiment Name: At_50mM_NH4NO3_L-to-H_P Parameter: Treatment Value: 50mM NH4NO3 vs 100mM Mannitol
gacacacactcttctctctcttcttcttcctcctctgtactctctctttctcacataaccagagcctctctctctctctctgtttctcttcagtctctgtgtatacccctttctctcctcctctgtccctctctctagcggcggactgatgcacatacctttgtattctccgccgtaactaacttacataatggggtgcatgttctctcacctcgccgccaaattcgccttcttcccaccctctcctcccacttaccacctcaccaaaacccccgacggcaaactctccgccgtatcctccgcttcctcctcctcctccacttttccctccgccggagacccatctctcgacgtcaaagtagtaaagacaagacgcggcaacaaagtcacagctttttaccttagaaaccctaacgcaagactcacacttctctactctcatggaaatgctgcagatttgggacaactcttcgatctctttgttcaactcaaagtcaatctccgagtcaatctcatggggtatgattattcaggctatggagcttctactggtaagccgagtgagtacgatacatatgcagatatagaggcggcgtatgagtgtttgcagacggattatggggtagggcaagaagatttgatcttgtatggtcaatctgttggcagcggtccaacgctgcaccttgcctctaagcttccacggcttagaggtgtcgttcttcatagcggcattctctctggtcttcgtgttctatgtcatgtcaagttcaagttttgttgtgacatttattcgaacgtaaacaagatcaagaaggtgaaatgcccggttcttgtcatacacggaacagaggatgatgtggtgaattggttacacggaaacaggctttggaaaatggcaaaggaaccgtatgaaccgctctggattaaaggcggtggacattgcaaccttgagatatatccggactacattagacacctataccggtttatacaagacatggaaaatacaaccactaagtctcgtctcaaaacgatttggcaagaaatccgtcggcgagatgaatccacaggatgttgttgttccggactgtgcagacctagctgcagttgtcccaaacctcggtgtcccaaacctagttgcagttgcggctgcggttgtggcgactgcggttgtttcaagtgttcgtgtccgactttgaagggatgtttctcttgctgcaagaaaccgagctgtgttagtagttgttgctgtcccacgttcaaatgcagcagctgctttgggaagccaaaatgtccgaaatgctcttgttggaaatgtctaaaatgccccgacaccgagtgttgccggagtagttgttgttgttccggttgttttagctggttgtgttgctgcggtggagggaggaggaaagagggggagaggagaggatctactacgttggagaagagtgaagggtgatattggtaatttgtatagattttgttcaaagatttggtaaaaaacattagaagattcatggaaagaaactgagattttgaagctaaaagttcatttattattcc

SEQ ID NO: 46862 - protein, 422 aa, Arabidopsis thaliana
  peptide (1)..(422): Ceres Seq. ID no. 14309768
  misc_feature (295)..(400): Pfam Name: Keratin, high sulfur B2 protein Pfam Description: Keratin, high sulfur B2 protein
  misc_feature (1)..(282): Homolog of NCBI NO: 34911338 NR Description: P0519D04.38 [Oryza sativa (japonica
  misc_feature (1)..(276): Homolog of NCBI NO: 15233975 NR Description: expressed protein [Arabidopsis thaliana]
  misc_feature (199)..(271): Homolog of NCBI NO: 15224121 NR Description: hypothetical protein [Arabidopsis thaliana]
  misc_feature (1)..(200): Homolog of NCBI NO: 15224121 NR Description: hypothetical protein [Arabidopsis thaliana]
  misc_feature (199)..(271): Homolog of NCBI NO: 30688887 NR Description: expressed protein [Arabidopsis thaliana]
  misc_feature (1)..(218): Homolog of NCBI NO: 30688887 NR Description: expressed protein [Arabidopsis thaliana]
  misc_feature (1)..(271): Homolog of NCBI NO: 28393521 NR Description: unknown protein [Arabidopsis thaliana]
  misc_feature (1)..(273): Homolog of NCBI NO: 15230760 NR Description: hypothetical protein [Arabidopsis thaliana]
  misc_feature (1)..(394): Homolog of NCBI NO: 34905260 NR Description: P0577B11.1 [Oryza sativa (japonica
  misc_feature (1)..(422): Homolog of NCBI NO: 15222598 NR Description: expressed protein [Arabidopsis thaliana]
MGCMFSHLAAKFAFFPPSPPTYHLTKTPDGKLSAVSSASSSSSTFPSAGDPSLDVKVVKTRRGNKVTAFYLRNPNARLTLLYSHGNAADLGQLFDLFVQLKVNLRVNLMGYDYSGYGASTGKPSEYDTYADIEAAYECLQTDYGVGQEDLILYGQSVGSGPTLHLASKLPRLRGVVLHSGILSGLRVLCHVKFKFCCDIYSNVNKIKKVKCPVLVIHGTEDDVVNWLHGNRLWKMAKEPYEPLWIKGGGHCNLEIYPDYIRHLYRFIQDMENTTTKSRLKTIWQEIRRRDESTGCCCSGLCRPSCSCPKPRCPKPSCSCGCGCGDCGCFKCSCPTLKGCFSCCKKPSCVSSCCCPTFKCSSCFGKPKCPKCSCWKCLKCPDTECCRSSCCCSGCFSWLCCCGGGRRKEGERRGSTTLEKSEG

SEQ ID NO: 46863 - protein, 419 aa, Arabidopsis thaliana
  peptide (1)..(419): Ceres Seq. ID no. 14309769
  misc_feature (292)..(397): Pfam Name: Keratin, high sulfur B2 protein Pfam Description: Keratin, high sulfur B2 protein
  misc_feature (1)..(279): Homolog of NCBI NO: 34911338 NR Description: P0519D04.38 [Oryza sativa (japonica
  misc_feature (1)..(273): Homolog of NCBI NO: 15233975 NR Description: expressed protein [Arabidopsis thaliana]
  misc_feature (196)..(268): Homolog of NCBI NO: 15224121 NR Description: hypothetical protein [Arabidopsis thaliana]
  misc_feature (1)..(197): Homolog of NCBI NO: 15224121 NR Description: hypothetical protein [Arabidopsis thaliana]
  misc_feature (196)..(268): Homolog of NCBI NO: 30688887 NR Description: expressed protein [Arabidopsis thaliana]
  misc_feature (1)..(215): Homolog of NCBI NO: 30688887 NR Description: expressed protein [Arabidopsis thaliana]
  misc_feature (1)..(268): Homolog of NCBI NO: 28393521 NR Description: unknown protein [Arabidopsis thaliana]
  misc_feature (1)..(270): Homolog of NCBI NO: 15230760 NR Description: hypothetical protein [Arabidopsis thaliana]
  misc_feature (1)..(391): Homolog of NCBI NO: 34905260 NR Description: P0577B11.1 [Oryza sativa (japonica
  misc_feature (1)..(419): Homolog of NCBI NO: 15222598 NR Description: expressed protein [Arabidopsis thaliana]
MFSHLAAKFAFFPPSPPTYHLTKTPDGKLSAVSSASSSSSTFPSAGDPSLDVKVVKTRRGNKVTAFYLRNPNARLTLLYSHGNAADLGQLFDLFVQLKVNLRVNLMGYDYSGYGASTGKPSEYDTYADIEAAYECLQTDYGVGQEDLILYGQSVGSGPTLHLASKLPRLRGVVLHSGILSGLRVLCHVKFKFCCDIYSNVNKIKKVKCPVLVIHGTEDDVVNWLHGNRLWKMAKEPYEPLWIKGGGHCNLEIYPDYIRHLYRFIQDMENTTTKSRLKTIWQEIRRRDESTGCCCSGLCRPSCSCPKPRCPKPSCSCGCGCGDCGCFKCSCPTLKGCFSCCKKPSCVSSCCCPTFKCSSCFGKPKCPKCSCWKCLKCPDTECCRSSCCCSGCFSWLCCCGGGRRKEGERRGSTTLEKSEG

SEQ ID NO: 46864 - protein, 314 aa, Arabidopsis thaliana
  peptide (1)..(314): Ceres Seq. ID no. 14309770
  misc_feature (187)..(292): Pfam Name: Keratin, high sulfur B2 protein Pfam Description: Keratin, high sulfur B2 protein
  misc_feature (1)..(174): Homolog of NCBI NO: 34911338 NR Description: P0519D04.38 [Oryza sativa (japonica
  misc_feature (1)..(168): Homolog of NCBI NO: 15233975 NR Description: expressed protein [Arabidopsis thaliana]
  misc_feature (91)..(163): Homolog of NCBI NO: 15224121 NR Description: hypothetical protein [Arabidopsis thaliana]
  misc_feature (1)..(92): Homolog of NCBI NO: 15224121 NR Description: hypothetical protein [Arabidopsis thaliana]
  misc_feature (91)..(163): Homolog of NCBI NO: 30688887 NR Description: expressed protein [Arabidopsis thaliana]
  misc_feature (1)..(110): Homolog of NCBI NO: 30688887 NR Description: expressed protein [Arabidopsis thaliana]
  misc_feature (1)..(163): Homolog of NCBI NO: 28393521 NR Description: unknown protein [Arabidopsis thaliana]
  misc_feature (1)..(165): Homolog of NCBI NO: 15230760 NR Description: hypothetical protein [Arabidopsis thaliana]
  misc_feature (1)..(286): Homolog of NCBI NO: 34905260 NR Description: P0577B11.1 [Oryza sativa (japonica
  misc_feature (1)..(314): Homolog of NCBI NO: 15222598 NR Description: expressed protein [Arabidopsis thaliana]
MGYDYSGYGASTGKPSEYDTYADIEAAYECLQTDYGVGQEDLILYGQSVGSGPTLHLASKLPRLRGVVLHSGILSGLRVLCHVKFKFCCDIYSNVNKIKKVKCPVLVIHGTEDDVVNWLHGNRLWKMAKEPYEPLWIKGGGHCNLEIYPDYIRHLYRFIQDMENTTTKSRLKTIWQEIRRRDESTGCCCSGLCRPSCSCPKPRCPKPSCSCGCGCGDCGCFKCSCPTLKGCFSCCKKPSCVSSCCCPTFKCSSCFGKPKCPKCSCWKCLKCPDTECCRSSCCCSGCFSWLCCCGGGRRKEGERRGSTTLEKSEG

SEQ ID NO: 46865 - DNA, 2533 bp, Arabidopsis thaliana
  misc_feature (1)..(2533): Ceres Seq. ID no. 12578004
  misc_feature: MA Experiment ID: 20000214 Result: Down-regulated in Transcription
  misc_feature: MA Experiment 20000214 PARAMETER Experiment Name: At_4deg_Cold_P Parameter: Timepoint (hr) Value: 6
  misc_feature: MA Experiment ID: 20000794 Result: Up-regulated in Transcription
  misc_feature: MA Experiment 20000794 PARAMETER Experiment Name: At_Petals_P Parameter: Age (day) Value: 23-25 days
  misc_feature: MA Experiment 20000794 PARAMETER Experiment Name: At_Petals_P Parameter: Plant Line Value: WS
  misc_feature: MA Experiment 20000794 PARAMETER Experiment Name: At_Petals_P Parameter: Tissue Value: Petals vs. Whole plant
  misc_feature: MA Experiment ID: 20001451 Result: Down-regulated in Transcription
  misc_feature: MA Experiment 20001451 PARAMETER Experiment Name: At_Far-red-induction_P Parameter: Age (day) Value: 7
  misc_feature: MA Experiment 20001451 PARAMETER Experiment Name: At_Far-red-induction_P Parameter: Light Value: Far-red vs. White
  misc_feature: MA Experiment 20001451 PARAMETER Experiment Name: At_Far-red-induction_P Parameter: Organism Value: A. thaliana
  misc_feature: MA Experiment 20001451 PARAMETER Experiment Name: At_Far-red-induction_P Parameter: Plant Line Value: Columbia
  misc_feature: MA Experiment 20001451 PARAMETER Experiment Name: At_Far-red-induction_P Parameter: Timepoint (hr) Value: 24
  misc_feature: MA Experiment 20001451 PARAMETER Experiment Name: At_Far-red-induction_P Parameter: Tissue Value: Whole Plant
  misc_feature: MA Experiment ID: 20001757 Result: Down-regulated in Transcription
  misc_feature: MA Experiment 20001757 PARAMETER Experiment Name: At_50mM_NH4NO3_L-to-H_P Parameter: Timepoint (hr) Value: 6
  misc_feature: MA Experiment 20001757 PARAMETER Experiment Name: At_50mM_NH4NO3_L-to-H_P Parameter: Tissue Value: Leaf
  misc_feature: MA Experiment 20001757 PARAMETER Experiment Name: At_50mM_NH4NO3_L-to-H_P Parameter: Treatment Value: 50mM NH4NO3 vs 100mM Mannitol
tctctttttcattaattccgaaaattttgactcgcaaaatctcaacgaagctcgaaaatggattcacgaaccaaggggaagacggtgatggaagttggtggcgatggcgttgccgtcataacactcatcaatcctcccgtcaattctctatccttcgacgtgctatacaatctcaaaagtaattacgaggaggccttgagcaggaatgatgttaaagctattgttattactggtgcaaaggggaggttctctggtggctttgatatatctggttttggtgaaatgcagaaggggaatgtcaaagagccaaaggctggttacatttcgattgacatcataaccgacttgcttgaagctgctaggaaaccgtctgtcgctgccattgatggacttgccttgggaggaggattagaacttgctatggcttgtcatgctaggatatcagctcctgctgcacagttaggcttgcctgagctgcaacttggtgttattcctggttttggaggaacgcagcgtctcccgcgtcttgttggtctcaccaaagcccttgaaatgattttgacatctaagccagttaaagctgaggaaggtcattctttgggtcttattgatgctgtggtgccacctgcggagttagtaaccactgctcgtcgctgggcccttgacatagtcgggaggagaaaaccatgggtatctagtgtttccaagactgataagttacctcctcttggagaggcaagggagatactgacgtttgccaaggcacagacactcaagcgtgcccccaatatgaaacaccctttaatgtgccttgacgctattgaagtaggtattgtttctggtccaagggctggtttagaaaaggaagctgaagtcgcctcacaagtggtaaaactggataccaccaaaggcttgatccacgtcttcttttctcagcgaggaactgctaaggttcctggagttactgatcgtgggttggtgccaaggaagattaagaaggtagccataattggaggcgggttgatgggatctggaatagctactgcgttgatcctaagtaactatccagtgattctcaaggaggtaaatgagaaattcctggaggctggaattggcagagttaaagctaatctccagagccgtgtaaggaagggaagcatgtctcaggaaaagtttgagaaaaccatgtctctccttaagggttctcttgattatgaaagctttagagatgtggacatggtcattgaggctgttattgagaatatatctttgaagcaacaaatttttgctgatctggagaaatactgtcctcagcattgtatccttgctagcaacacatcgaccattgacttgaacaaaattggggagcggaccaagtctcaggatcgaattgttggagcacattttttcagtccagcacatatcatgccgctacttgaaatagttcggaccaatcatacctctgcccaagtaattgttgacctgttagatgttgggaagaagattaagaaaacaccagttgtggtgggaaactgcacagggtttgcagtgaataggatgttcttcccttacacacaggcagctatgttccttgttgagtgtggagcagatccatatctaatcgacagggcaatcagcaagtttggaatgccaatgggtcccttcagactgtgtgacctggttggatttggtgtggcgattgcaaccgcaacgcagtttatcgagaacttctcagaacggacttacaaatcaatgattattccacttatgcaagaggacaagagagctggtgaagccactcgcaaaggtttctatttgtatgatgataagcgcaaggcgaaacctgatcctgagctaaagaaatatatcgaaaaggcaagaagcatatctggagtaaagcttgaccctaagttggcgaatttgtcggagaaggacattattgaaatgacattcttcccagtagtaaacgaggcgtgtagggtttttgctgaaggtatcgctgtcaaagcagcagaccttgacattgctggcataatgggaatgggttttccaccttacagaggaggaatcatgttctgggctgattccatcggatcgaaatacatttactcgaggctggatgagtggtcgaaggcttatggtgaattcttcaagccttgtgcttttttggctgagaggggatctaaaggagttcttttgagcgctcccgtgaaacaagccagctcacggttgtaaggtcagcgtttcagtggaaccatttctccattggtgcatcttctgtgttttctttatgttcacattttacttagccgggaagtgggtatcttttggcctcagaagcttttaaataaagtctcatctcagacatatgaatctgggaggaagtagggattaagttgtagtagcaataagatttgttttatgttgtgctttgtcatacaacaaagttgtcagatacatttgttgttataaagctatatggagtaagttctatgatttaatgataatgttgtcatttgacaaatcagttaaa

SEQ ID NO: 46866 - protein, 725 aa, Arabidopsis thaliana
  peptide (1)..(725): Ceres Seq. ID no. 12578005
  misc_feature (309)..(493): Pfam Name: 3-hydroxyacyl-CoA dehydrogenase, NAD binding domain Pfam Description: 3-hydroxyacyl-CoA dehydrogenase, NAD binding
  misc_feature (6)..(711): Homolog of NCBI NO: 23103221 NR Description: hypothetical protein [Azotobacter vinelandii]
  misc_feature (1)..(702): Homolog of NCBI NO: 15806500 NR Description: enoyl-CoA hydratase/3,2-trans-enoyl-CoA
  misc_feature (16)..(711): Homolog of NCBI NO: 17546478 NR Description: PROBABLE TRIFUNCTONAL: ENOYL-COA HYDRATASE AND ISOMERASE AND 3-HYDROXYACYL-COA DEHYDROGENASE OXIDOREDUCTASE
  misc_feature (1)..(404): Homolog of NCBI NO: 17065148 NR Description: fatty acid multifunctional protein (AtMFP2)
  misc_feature (8)..(724): Homolog of NCBI NO: 39931684 NR Description: Peroxisomal fatty acid beta-oxidation
  misc_feature (11)..(725): Homolog of NCBI NO: 15235527 NR Description: AIM1 protein
  misc_feature (11)..(725): Homolog of NCBI NO: 34897626 NR Description: putative tetrafunctional protein for glyoxysomal
  misc_feature (93)..(725): Homolog of NCBI NO: 551444 NR Description: protein MFP-b [Cucumis sativus]
  misc_feature (6)..(725): Homolog of NCBI NO: 34895142 NR Description: putative tetrafunctional protein of glyoxysomal
  misc_feature (1)..(725): Homolog of NCBI NO: 34922495 NR Description: Glyoxysomal fatty acid beta-oxidation
MDSRTKGKTVMEVGGDGVAVITLINPPVNSLSFDVLYNLKSNYEEALSRNDVKAIVITGAKGRFSGGFDISGFGEMQKGNVKEPKAGYISIDIITDLLEAARKPSVAAIDGLALGGGLELAMACHARISAPAAQLGLPELQLGVIPGFGGTQRLPRLVGLTKALEMILTSKPVKAEEGHSLGLIDAVVPPAELVTTARRWALDIVGRRKPWVSSVSKTDKLPPLGEAREILTFAKAQTLKRAPNMKHPLMCLDAIEVGIVSGPRAGLEKEAEVASQVVKLDTTKGLIHVFFSQRGTAKVPGVTDRGLVPRKIKKVAIIGGGLMGSGIATALILSNYPVILKEVNEKFLEAGIGRVKANLQSRVRKGSMSQEKFEKTMSLLKGSLDYESFRDVDMVIEAVIENISLKQQIFADLEKYCPQHCILASNTSTIDLNKIGERTKSQDRIVGAHFFSPAHIMPLLEIVRTNHTSAQVIVDLLDVGKKIKKTPVVVGNCTGFAVNRMFFPYTQAAMFLVECGADPYLIDRAISKFGMPMGPFRLCDLVGFGVAIATATQFIENFSERTYKSMIIPLMQEDKRAGEATRKGFYLYDDKRKAKPDPELKKYIEKARSISGVKLDPKLANLSEKDIIEMTFFPVVNEACRVFAEGIAVKAADLDIAGIMGMGFPPYRGGIMFWADSIGSKYIYSRLDEWSKAYGEFFKPCAFLAERGSKGVLLSAPVKQASSRL

SEQ ID NO: 46867 - protein, 715 aa, Arabidopsis thaliana
  peptide (1)..(715): Ceres Seq. ID no. 12578006
  misc_feature (299)..(483): Pfam Name: 3-hydroxyacyl-CoA dehydrogenase, NAD binding domain Pfam Description: 3-hydroxyacyl-CoA dehydrogenase, NAD binding
  misc_feature (1)..(701): Homolog of NCBI NO: 23103221 NR Description: hypothetical protein [Azotobacter vinelandii]
  misc_feature (1)..(692): Homolog of NCBI NO: 15806500 NR Description: enoyl-CoA hydratase/3,2-trans-enoyl-CoA
  misc_feature (6)..(701): Homolog of NCBI NO: 17546478 NR Description: PROBABLE TRIFUNCTONAL: ENOYL-COA HYDRATASE AND ISOMERASE AND 3-HYDROXYACYL-COA DEHYDROGENASE OXIDOREDUCTASE
  misc_feature (1)..(394): Homolog of NCBI NO: 17065148 NR Description: fatty acid multifunctional protein (AtMFP2)
  misc_feature (1)..(714): Homolog of NCBI NO: 39931684 NR Description: Peroxisomal fatty acid beta-oxidation
  misc_feature (1)..(715): Homolog of NCBI NO: 15235527 NR Description: AIM1 protein
  misc_feature (1)..(715): Homolog of NCBI NO: 34897626 NR Description: putative tetrafunctional protein for glyoxysomal
  misc_feature (83)..(715): Homolog of NCBI NO: 551444 NR Description: protein MFP-b [Cucumis sativus]
  misc_feature (1)..(715): Homolog of NCBI NO: 34895142 NR Description: putative tetrafunctional protein of glyoxysomal
  misc_feature (1)..(715): Homolog of NCBI NO: 34922495 NR Description: Glyoxysomal fatty acid beta-oxidation
MEVGGDGVAVITLINPPVNSLSFDVLYNLKSNYEEALSRNDVKAIVITGAKGRFSGGFDISGFGEMQKGNVKEPKAGYISIDIITDLLEAARKPSVAAIDGLALGGGLELAMACHARISAPAAQLGLPELQLGVIPGFGGTQRLPRLVGLTKALEMILTSKPVKAEEGHSLGLIDAVVPPAELVTTARRWALDIVGRRKPWVSSVSKTDKLPPLGEAREILTFAKAQTLKRAPNMKHPLMCLDAIEVGIVSGPRAGLEKEAEVASQVVKLDTTKGLIHVFFSQRGTAKVPGVTDRGLVPRKIKKVAIIGGGLMGSGIATALILSNYPVILKEVNEKFLEAGIGRVKANLQSRVRKGSMSQEKFEKTMSLLKGSLDYESFRDVDMVIEAVIENISLKQQIFADLEKYCPQHCILASNTSTIDLNKIGERTKSQDRIVGAHFFSPAHIMPLLEIVRTNHTSAQVIVDLLDVGKKIKKTPVVVGNCTGFAVNRMFFPYTQAAMFLVECGADPYLIDRAISKFGMPMGPFRLCDLVGFGVAIATATQFIENFSERTYKSMIIPLMQEDKRAGEATRKGFYLYDDKRKAKPDPELKKYIEKARSISGVKLDPKLANLSEKDIIEMTFFPVVNEACRVFAEGIAVKAADLDIAGIMGMGFPPYRGGIMFWADSIGSKYIYSRLDEWSKAYGEFFKPCAFLAERGSKGVLLSAPVKQASSRL

SEQ ID NO: 46868 - protein, 650 aa, Arabidopsis thaliana
  peptide (1)..(650): Ceres Seq. ID no. 12578007
  misc_feature (234)..(418): Pfam Name: 3-hydroxyacyl-CoA dehydrogenase, NAD binding domain Pfam Description: 3-hydroxyacyl-CoA dehydrogenase, NAD binding
  misc_feature (1)..(636): Homolog of NCBI NO: 23103221 NR Description: hypothetical protein [Azotobacter vinelandii]
  misc_feature (1)..(627): Homolog of NCBI NO: 15806500 NR Description: enoyl-CoA hydratase/3,2-trans-enoyl-CoA
  misc_feature (1)..(636): Homolog of NCBI NO: 17546478 NR Description: PROBABLE TRIFUNCTONAL: ENOYL-COA HYDRATASE AND ISOMERASE AND 3-HYDROXYACYL-COA DEHYDROGENASE OXIDOREDUCTASE
  misc_feature (1)..(329): Homolog of NCBI NO: 17065148 NR Description: fatty acid multifunctional protein (AtMFP2)
  misc_feature (1)..(649): Homolog of NCBI NO: 39931684 NR Description: Peroxisomal fatty acid beta-oxidation
  misc_feature (1)..(650): Homolog of NCBI NO: 15235527 NR Description: AIM1 protein
  misc_feature (1)..(650): Homolog of NCBI NO: 34897626 NR Description: putative tetrafunctional protein for glyoxysomal
  misc_feature (18)..(650): Homolog of NCBI NO: 551444 NR Description: protein MFP-b [Cucumis sativus]
  misc_feature (1)..(650): Homolog of NCBI NO: 34895142 NR Description: putative tetrafunctional protein of glyoxysomal
  misc_feature (1)..(650): Homolog of NCBI NO: 34922495 NR Description: Glyoxysomal fatty acid beta-oxidation
MQKGNVKEPKAGYISIDIITDLLEAARKPSVAAIDGLALGGGLELAMACHARISAPAAQLGLPELQLGVIPGFGGTQRLPRLVGLTKALEMILTSKPVKAEEGHSLGLIDAVVPPAELVTTARRWALDIVGRRKPWVSSVSKTDKLPPLGEAREILTFAKAQTLKRAPNMKHPLMCLDAIEVGIVSGPRAGLEKEAEVASQVVKLDTTKGLIHVFFSQRGTAKVPGVTDRGLVPRKIKKVAIIGGGLMGSGIATALILSNYPVILKEVNEKFLEAGIGRVKANLQSRVRKGSMSQEKFEKTMSLLKGSLDYESFRDVDMVIEAVIENISLKQQIFADLEKYCPQHCILASNTSTIDLNKIGERTKSQDRIVGAHFFSPAHIMPLLEIVRTNHTSAQVIVDLLDVGKKIKKTPVVVGNCTGFAVNRMFFPYTQAAMFLVECGADPYLIDRAISKFGMPMGPFRLCDLVGFGVAIATATQFIENFSERTYKSMIIPLMQEDKRAGEATRKGFYLYDDKRKAKPDPELKKYIEKARSISGVKLDPKLANLSEKDIIEMTFFPVVNEACRVFAEGIAVKAADLDIAGIMGMGFPPYRGGIMFWADSIGSKYIYSRLDEWSKAYGEFFKPCAFLAERGSKGVLLSAPVKQASSRL

SEQ ID NO: 46869 - DNA, 1173 bp, Arabidopsis thaliana
  misc_feature (1)..(1173): Ceres Seq. ID no. 13646906
  misc_feature: MA Experiment ID: 20000306 Result: Up-regulated in Transcription
  misc_feature: MA Experiment 20000306 PARAMETER Experiment Name: At_Germinating_Seeds_Sub_P Parameter: Age (hr) Value: 6 vs. 0
  misc_feature: MA Experiment 20000306 PARAMETER Experiment Name: At_Germinating_Seeds_Sub_P Parameter: Organism Value: A. thaliana
  misc_feature: MA Experiment 20000306 PARAMETER Experiment Name: At_Germinating_Seeds_Sub_P Parameter: Plant Line Value: WS
  misc_feature: MA Experiment 20000306 PARAMETER Experiment Name: At_Germinating_Seeds_Sub_P Parameter: Tissue Value: Germinating Seeds
  misc_feature: MA Experiment ID: 20000307 Result: Up-regulated in Transcription
  misc_feature: MA Experiment 20000307 PARAMETER Experiment Name: At_Germinating_Seeds_Sub_P Parameter: Age (hr) Value: 24 vs. 0
  misc_feature: MA Experiment 20000307 PARAMETER Experiment Name: At_Germinating_Seeds_Sub_P Parameter: Organism Value: A. thaliana
  misc_feature: MA Experiment 20000307 PARAMETER Experiment Name: At_Germinating_Seeds_Sub_P Parameter: Plant Line Value: WS
  misc_feature: MA Experiment 20000307 PARAMETER Experiment Name: At_Germinating_Seeds_Sub_P Parameter: Tissue Value: Germinating Seeds
  misc_feature: MA Experiment ID: 20000315 Result: Down-regulated in Transcription
  misc_feature: MA Experiment 20000315 PARAMETER Experiment Name: At_14day_Shoots-Roots_Sub_P Parameter: Age (day) Value: 14
  misc_feature: MA Experiment 20000315 PARAMETER Experiment Name: At_14day_Shoots-Roots_Sub_P Parameter: Organism Value: A. thaliana
  misc_feature: MA Experiment 20000315 PARAMETER Experiment Name: At_14day_Shoots-Roots_Sub_P Parameter: Plant Line Value: WS
  misc_feature: MA Experiment 20000315 PARAMETER Experiment Name: At_14day_Shoots-Roots_Sub_P Parameter: Tissue Value: Shoots vs. Whole Plant
ggaaagaaaaaaaatcaacacaccgagaaaaaaaatggaagatctatggaagagagcgaaatcgtttgcagaagaagcagcgaagaaatcacaaaccataacactacaatcatcttcaacaacattcgtcaatctcgtcaccgaaaccgctaaaaaatccaaagagttcgctctcgaagcttctaagaaagctgattcgatcaatgtctccgagttcgtcgccgagacggcgaagaagtcaaaggaattcgctgctgaggtttcaacgaaagcggatcagctcaaagtcgtagcattgaaacaagctgatcagatccagaatataaaatcgattgccgacattatacctggaggattaggaggatcaggatctggtggtggtggttctgagatttctgaatctgagcttgttagttttggtattactgatgatttgagagagtttgttaaaggtttgacatctgctacgttccaggcttttcctgaacaagatgaatcgtcggaagtttctgatttggaaacaagtgcgtcgaatgttcggaaggatctttctgagtggcaggagagacatgccactcttgttcttggttctgtcaagcaaatttcgaagttgagatatgaactatgcccacgagttatgaaagaaaggaggttctggaggatatactttaccttagtgagcactcatgttgcaccatatgaaaggaagtacatggaggaacttaggaacaaagcagagagtaaagatgaagaagctaagaagagtccagggcttggaaggacagaatcagctgaaaagaacagaatatctactgcatcgtctgagcaagatctcgatacattcctgctgggagatctagaagacagtgacgaagctcctgatgatggtgatggtgatgatggaggaagcctgggtgatgatgactttgacaagattggcaactctgatgttgaggaagagaaagaatcaaatgcagcaaaaaattagaaatattattaagttttgttacatacccaattgttgggaagtaaatgaggatggtatatgatctgtttcatcatcagtgattcagtgtatagcttttgatgcaaaagatgaagacacattttattcattcgaattcgcaaattataagaaaaaaaaaaaaaaaaaaactcgagggggggcccggt

SEQ ID NO: 46870 - protein, 328 aa, Arabidopsis thaliana
  peptide (1)..(328): Ceres Seq. ID no. 13646907
  misc_feature (180)..(226): Pfam Name: BSD domain Pfam Description: BSD domain
  misc_feature (121)..(271): Homolog of NCBI NO: 18404344 NR Description: expressed protein [Arabidopsis thaliana]
  misc_feature (238)..(326): Homolog of NCBI NO: 15222681 NR Description: expressed protein [Arabidopsis thaliana]
  misc_feature (12)..(163): Homolog of NCBI NO: 15222683 NR Description: hypothetical protein [Arabidopsis thaliana]
  misc_feature (12)..(163): Homolog of NCBI NO: 6730653 NR Description: F4N2.1 [Arabidopsis thaliana]
  misc_feature (12)..(326): Homolog of NCBI NO: 15450417 NR Description: At1g26300/F28B23_4 [Arabidopsis thaliana]
  misc_feature (12)..(315): Homolog of NCBI NO: 25404796 NR Description: hypothetical protein T6L1.21 [imported] -
  misc_feature (12)..(328): Homolog of NCBI NO: 30697787 NR Description: expressed protein [Arabidopsis thaliana]
ERKKINTPRKKMEDLWKRAKSFAEEAAKKSQTITLQSSSTTFVNLVTETAKKSKEFALEASKKADSINVSEFVAETAKKSKEFAAEVSTKADQLKVVALKQADQIQNIKSIADIIPGGLGGSGSGGGGSEISESELVSFGITDDLREFVKGLTSATFQAFPEQDESSEVSDLETSASNVRKDLSEWQERHATLVLGSVKQISKLRYELCPRVMKERRFWRIYFTLVSTHVAPYERKYMEELRNKAESKDEEAKKSPGLGRTESAEKNRISTASSEQDLDTFLLGDLEDSDEAPDDGDGDDGGSLGDDDFDKIGNSDVEEEKESNAAKN

SEQ ID NO: 46871 - protein, 317 aa, Arabidopsis thaliana
  peptide (1)..(317): Ceres Seq. ID no. 13646908
  misc_feature (169)..(215): Pfam Name: BSD domain Pfam Description: BSD domain
  misc_feature (110)..(260): Homolog of NCBI NO: 18404344 NR Description: expressed protein [Arabidopsis thaliana]
  misc_feature (227)..(315): Homolog of NCBI NO: 15222681 NR Description: expressed protein [Arabidopsis thaliana]
  misc_feature (1)..(152): Homolog of NCBI NO: 15222683 NR Description: hypothetical protein [Arabidopsis thaliana]
  misc_feature (1)..(152): Homolog of NCBI NO: 6730653 NR Description: F4N2.1 [Arabidopsis thaliana]
  misc_feature (1)..(315): Homolog of NCBI NO: 15450417 NR Description: At1g26300/F28B23_4 [Arabidopsis thaliana]
  misc_feature (1)..(304): Homolog of NCBI NO: 25404796 NR Description: hypothetical protein T6L1.21 [imported] -
  misc_feature (1)..(317): Homolog of NCBI NO: 30697787 NR Description: expressed protein [Arabidopsis thaliana]
MEDLWKRAKSFAEEAAKKSQTITLQSSSTTFVNLVTETAKKSKEFALEASKKADSINVSEFVAETAKKSKEFAAEVSTKADQLKVVALKQADQIQNIKSIADIIPGGLGGSGSGGGGSEISESELVSFGITDDLREFVKGLTSATFQAFPEQDESSEVSDLETSASNVRKDLSEWQERHATLVLGSVKQISKLRYELCPRVMKERRFWRIYFTLVSTHVAPYERKYMEELRNKAESKDEEAKKSPGLGRTESAEKNRISTASSEQDLDTFLLGDLEDSDEAPDDGDGDDGGSLGDDDFDKIGNSDVEEEKESNAAKN

SEQ ID NO: 46872 - DNA, 4254 bp, Arabidopsis thaliana
  misc_feature (1)..(4254): Ceres Seq. ID no. 13578712
  misc_feature: MA Experiment ID: 20000438 Result: Up-regulated in Transcription
  misc_feature: MA Experiment 20000438 PARAMETER Experiment Name: At_Shoots__P Parameter: Age (day) Value: 14
  misc_feature: MA Experiment 20000438 PARAMETER Experiment Name: At_Shoots__P Parameter: Tissue Value: Shoots vs. Whole Plant
  misc_feature: MA Experiment ID: 20000439 Result: Up-regulated in Transcription
  misc_feature: MA Experiment 20000439 PARAMETER Experiment Name: At_Roots__P Parameter: Age (day) Value: 14 vs. 21
  misc_feature: MA Experiment 20000439 PARAMETER Experiment Name: At_Roots__P Parameter: Organism Value: A. thaliana
  misc_feature: MA Experiment 20000439 PARAMETER Experiment Name: At_Roots__P Parameter: Tissue Value: Roots vs. Whole Plant
  misc_feature: MA Experiment ID: 20000495 Result: Up-regulated in Transcription
  misc_feature: MA Experiment 20000495 PARAMETER Experiment Name: At_Guard_Cells_P Parameter: Harvest Date Value: 8/2/2002
  misc_feature: MA Experiment 20000495 PARAMETER Experiment Name: At_Guard_Cells_P Parameter: Organism Value: A. thaliana
  misc_feature: MA Experiment 20000495 PARAMETER Experiment Name: At_Guard_Cells_P Parameter: Tissue Value: Guard Cells vs. Leaves
atggcctctgattccgccggagccacaatctccggcaacttctcaaactccgacaactcagaaaccctaaatctcaacactacgaaactctactcatcagcaatttcctctatctctccacaattcccctcaccgaaaccaacatcttcatgtccttcaatccctaattcaaaacgaatccctaatactaacttcatcgtcgatctcttccgcctcccacaccaatcatcctccgtcgctttcttcctctcacatttccactccgatcactactccggtctctcctcttcctggtccaaaggaataatctactgctcacacaaaaccgctcgtctcgttgcagaaatccttcaagttccttcacaattcgttttcgctttacctatgaaccaaatggttaagatcgatggctctgaagttgtgttgattgaagctaatcattgtccaggagcggtacagtttttgtttaaagtcaaattagagagcagtggatttgaaaagtatgttcatactggagattttagattctgtgatgagatgagatttgatccgtttcttaatggttttgttggttgtgatggtgtttttctcgatactacttattgtaatcctaagtttgtttttccgagtcaagaagagtctgttggttatgttgttagtgtgatagataagattagtgaggagaaggttttgtttcttgtagctacttatgttgttggtaaagagaagattttggttgagattgctaggagatgtaagaggaaaatcgttgtcgatgcgagaaagatgtcgatgttgtcggttttggggtgtggtgaggagggaatgtttactgaagatgagaatgagagtgatgttcatgttgtggggtggaatgtgttgggtgagacttggccgtattttaggccgaattttgtgaagatgaatgagattatggttgagaaagggtatgataaggttgtaggttttgtgcctacagggtggacttatgaagtgaagcggaataagtttgcggttaggtttaaagattcgatggagattcatcttgtaccgtatagtgagcattcgaattatgatgaacttagagagtttataaagttcctgaaacctaaaagagttattcctactgttggagttgatattgagaagtttgattgcaaggaggttaataagatgcagaagcatttctctggattggttgatgagatggcaaacaagaaagattttttattgggtttctatcgtcagtcttaccagaagaatgagaaaagtgatgtagatgttgtgtcacacagtgctgaggtttacgaagaggaagagaaaaatgcatgtgaagacggtggagagaatgttccatcatctagaggacccatattgcatgatacaactccaagtagtgattcaagattgctgataaaactacgtgattctttgcctgcttgggtcactgaagagcagatgttagatctgattaagaagcatgctggtaatcccgtggatatagtaagtaacttttatgaatatgaagcagagctttacaagcaagcctctcttcccacgccttccttgaataatcaggctgttttgtttgatgacgatgtaaccgacctccaacctaatcctgtgaaaggcatttgtccagatgttcaagcaattcaaaaaggttttgacttaccaagaaaaatgaatttaacaaagggtactatttctcctgggaagagaggcaaaagctcgggcagtaagtcaaacaagaaggccaagaaagatccaaaatcaaaaccagttggtccagggcagccaacactttttaagtttttcaataaggtcttagatggtggatctaattctgttagtgttggttcagagactgaagaatgcaatacagataaaaagatggtccacattgatgcttcagaagcatacaaagaagtgacagatcaatttattgatattgttaacggttctgaatctttaagagattatgctgcttccatcattgatgaggctaaaggagatataagtagggcactgaacatctattatagcaaaccccgtgaaatacctggtgaccatgcaggtgagagaggactctctagcaaaacaattcagtatccgaaatgttcagaagcatgctcctctcaggaggacaaaaaggcttcagaaaattcaggacatgcagtcaacatatgcgtgcagacatcagcagaggaaagtgtagacaagaattatgtatctctacctcctgaaaaatatcaacctaaagagcacgcttgttggagggagggacagcctgctccatatatccaccttgtccgaacatttgcttctgttgaaagtgaaaagggaaagatcaaagctatgtctatgctttgcaacatgtttagaagcttgtttgctctctctccagaagatgttctgcccgctgtttatctttgcacaaataagattgccgctgaccatgagaatattgagcttaacattggtggaagtctaatctcttctgcattggaagaagcatgtggaataagtcggtctactgtgagagatatgtataatagcttgggggatcttggggatgttgctcagctatgtcgacaaacgcaaaagctactggttcctccacctccacttctagttagagatgtgttttcaactctacgaaagataagtgtgcagacaggtactggaagtactaggctaaagaaaaatctcatcgtgaagctaatgcgctcttgtagagagaaagagatcaaatttcttgttagaacattggcccgtaatttaaggattggcgctatgttgagaactgttctacctgcacttgggcgagcaatcgttatgaattctttctggaatgaccataataaagaactatcagaaagctgtttcagggagaaacttgagggtgtttctgctgcagtagttgaggcttacaacattcttccatctctggacgtggttgttccttctctcatggacaaagacattgagttttcaacgtcaactctgtcaatggtcccagggatacctataaaacccatgcttgcaaaaattgctaagggggttcaagaattttttaacctctcccaagaaaaggcctttacttgtgaatacaaatatgatggccagcgcgcccagatccataagttacttgatggtactgtgtgtatcttttctcggaatggggacgaaacaacgtccagatttccggatctggttgatgtcataaaacagttttcttgccctgccgctgagacattcatgttggacgcagaggtggttgccactgatagaataaatggaaacaaactcatgtcattccaagagttatcaacaagagagagagggagcaaagatgctttgataactacagaaagtattaaggttgaagtctgcgtcttcgtgtttgatattatgtttgtcaatggagaacagctgttggctcttcccctccgtgagagacgaagacgtctaaaggaggtcttccctgagactaggccaggttatcttgagtatgctaaggaaataactgtaagtgctacggtgggagcagaagaagcgtctctgaataatcatgacacattgagtaggataaatgcttttcttgaagaagcatttcagtcatcttgtgaaggaatcatggtcaagtctttagatgtaaatgctggatactgccccacaaagcgctctgattcatggctcaaggttaagcgagattatgtagatggattgggcgatacattggatttagttcctattggtgcttggtatggcaatgggagaaaagcaggatggtatagtccattccttatggcctgcttcaaccctgagactgaagaattccagagtgtctgccgtgtcatgtctggtttttctgatgccttttacatcgaggtaatgaaaagctcaactctaacgttgttgtttaatgatgaaacagatgggatgaaagaattctactcggaggataagatccttgcgaaaaagccgccttactacagaacaggggagacacctgacatgtggttttccgcagaggtagtttgggaaatcagaggtgctgatttcacagtctcgcctgttcacagtgccagtttaggtctcgtccatccatcgcgaggcatctctgttaggtttccgagatttatcagtaaagtgacagatagaaatcctgaagaatgtagtacggctacagatatcgcagagatgtttcatgctcaaaccagaaaaatgaacatcacttctcaacattaa

SEQ ID NO: 46873 - protein, 1417 aa, Arabidopsis thaliana
  peptide (1)..(1417): Ceres Seq. ID no. 13578713
  misc_feature (1010)..(1237): Pfam Name: ATP dependent DNA ligase domain Pfam Description: ATP dependent DNA ligase domain
  misc_feature (1115)..(1407): Homolog of NCBI NO: 118774 NR Description: DNA ligase (Polydeoxyribonucleotide synthase
  misc_feature (708)..(1186): Homolog of NCBI NO: 118774 NR Description: DNA ligase (Polydeoxyribonucleotide synthase
  misc_feature (1122)..(1412): Homolog of NCBI NO: 24762424 NR Description: CG5602-PA [Drosophila melanogaster]
  misc_feature (716)..(1173): Homolog of NCBI NO: 24762424 NR Description: CG5602-PA [Drosophila melanogaster]
  misc_feature (1122)..(1407): Homolog of NCBI NO: 37535574 NR Description: putative DNA ligase [Oryza sativa (japonica
  misc_feature (710)..(1177): Homolog of NCBI NO: 37535574 NR Description: putative DNA ligase [Oryza sativa (japonica
  misc_feature (1122)..(1407): Homolog of NCBI NO: 2129574 NR Description: DNA ligase (ATP) (EC 6.5.1.1) - Arabidopsis
  misc_feature (708)..(1177): Homolog of NCBI NO: 2129574 NR Description: DNA ligase (ATP) (EC 6.5.1.1) - Arabidopsis
  misc_feature (1122)..(1407): Homolog of NCBI NO: 30680522 NR Description: ligase I -related [Arabidopsis thaliana]
  misc_feature (708)..(1177): Homolog of NCBI NO: 30680522 NR Description: ligase I -related [Arabidopsis thaliana]
MASDSAGATISGNFSNSDNSETLNLNTTKLYSSAISSISPQFPSPKPTSSCPSIPNSKRIPNTNFIVDLFRLPHQSSSVAFFLSHFHSDHYSGLSSSWSKGIIYCSHKTARLVAEILQVPSQFVFALPMNQMVKIDGSEVVLIEANHCPGAVQFLFKVKLESSGFEKYVHTGDFRFCDEMRFDPFLNGFVGCDGVFLDTTYCNPKFVFPSQEESVGYVVSVIDKISEEKVLFLVATYVVGKEKILVEIARRCKRKIVVDARKMSMLSVLGCGEEGMFTEDENESDVHVVGWNVLGETWPYFRPNFVKMNEIMVEKGYDKVVGFVPTGWTYEVKRNKFAVRFKDSMEIHLVPYSEHSNYDELREFIKFLKPKRVIPTVGVDIEKFDCKEVNKMQKHFSGLVDEMANKKDFLLGFYRQSYQKNEKSDVDVVSHSAEVYEEEEKNACEDGGENVPSSRGPILHDTTPSSDSRLLIKLRDSLPAWVTEEQMLDLIKKHAGNPVDIVSNFYEYEAELYKQASLPTPSLNNQAVLFDDDVTDLQPNPVKGICPDVQAIQKGFDLPRKMNLTKGTISPGKRGKSSGSKSNKKAKKDPKSKPVGPGQPTLFKFFNKVLDGGSNSVSVGSETEECNTDKKMVHIDASEAYKEVTDQFIDIVNGSESLRDYAASIIDEAKGDISRALNIYYSKPREIPGDHAGERGLSSKTIQYPKCSEACSSQEDKKASENSGHAVNICVQTSAEESVDKNYVSLPPEKYQPKEHACWREGQPAPYIHLVRTFASVESEKGKIKAMSMLCNMFRSLFALSPEDVLPAVYLCTNKIAADHENIELNIGGSLISSALEEACGISRSTVRDMYNSLGDLGDVAQLCRQTQKLLVPPPPLLVRDVFSTLRKISVQTGTGSTRLKKNLIVKLMRSCREKEIKFLVRTLARNLRIGAMLRTVLPALGRAIVMNSFWNDHNKELSESCFREKLEGVSAAVVEAYNILPSLDVVVPSLMDKDIEFSTSTLSMVPGIPIKPMLAKIAKGVQEFFNLSQEKAFTCEYKYDGQRAQIHKLLDGTVCIFSRNGDETTSRFPDLVDVIKQFSCPAAETFMLDAEVVATDRINGNKLMSFQELSTRERGSKDALITTESIKVEVCVFVFDIMFVNGEQLLALPLRERRRRLKEVFPETRPGYLEYAKEITVSATVGAEEASLNNHDTLSRINAFLEEAFQSSCEGIMVKSLDVNAGYCPTKRSDSWLKVKRDYVDGLGDTLDLVPIGAWYGNGRKAGWYSPFLMACFNPETEEFQSVCRVMSGFSDAFYIEVMKSSTLTLLFNDETDGMKEFYSEDKILAKKPPYYRTGETPDMWFSAEVVWEIRGADFTVSPVHSASLGLVHPSRGISVRFPRFISKVTDRNPEECSTATDIAEMFHAQTRKMNITSQH

SEQ ID NO: 46874 - protein, 1289 aa, Arabidopsis thaliana
  peptide (1)..(1289): Ceres Seq. ID no. 13578714
  misc_feature (882)..(1109): Pfam Name: ATP dependent DNA ligase domain Pfam Description: ATP dependent DNA ligase domain
  misc_feature (987)..(1279): Homolog of NCBI NO: 118774 NR Description: DNA ligase (Polydeoxyribonucleotide synthase
  misc_feature (580)..(1058): Homolog of NCBI NO: 118774 NR Description: DNA ligase (Polydeoxyribonucleotide synthase
  misc_feature (994)..(1284): Homolog of NCBI NO: 24762424 NR Description: CG5602-PA [Drosophila melanogaster]
  misc_feature (588)..(1045): Homolog of NCBI NO: 24762424 NR Description: CG5602-PA [Drosophila melanogaster]
  misc_feature (994)..(1279): Homolog of NCBI NO: 37535574 NR Description: putative DNA ligase [Oryza sativa (japonica
  misc_feature (582)..(1049): Homolog of NCBI NO: 37535574 NR Description: putative DNA ligase [Oryza sativa (japonica
  misc_feature (994)..(1279): Homolog of NCBI NO: 2129574 NR Description: DNA ligase (ATP) (EC 6.5.1.1) - Arabidopsis
  misc_feature (580)..(1049): Homolog of NCBI NO: 2129574 NR Description: DNA ligase (ATP) (EC 6.5.1.1) - Arabidopsis
  misc_feature (994)..(1279): Homolog of NCBI NO: 30680522 NR Description: ligase I -related [Arabidopsis thaliana]
  misc_feature (580)..(1049): Homolog of NCBI NO: 30680522 NR Description: ligase I -related [Arabidopsis thaliana]
MNQMVKIDGSEVVLIEANHCPGAVQFLFKVKLESSGFEKYVHTGDFRFCDEMRFDPFLNGFVGCDGVFLDTTYCNPKFVFPSQEESVGYVVSVIDKISEEKVLFLVATYVVGKEKILVEIARRCKRKIVVDARKMSMLSVLGCGEEGMFTEDENESDVHVVGWNVLGETWPYFRPNFVKMNEIMVEKGYDKVVGFVPTGWTYEVKRNKFAVRFKDSMEIHLVPYSEHSNYDELREFIKFLKPKRVIPTVGVDIEKFDCKEVNKMQKHFSGLVDEMANKKDFLLGFYRQSYQKNEKSDVDVVSHSAEVYEEEEKNACEDGGENVPSSRGPILHDTTPSSDSRLLIKLRDSLPAWVTEEQMLDLIKKHAGNPVDIVSNFYEYEAELYKQASLPTPSLNNQAVLFDDDVTDLQPNPVKGICPDVQAIQKGFDLPRKMNLTKGTISPGKRGKSSGSKSNKKAKKDPKSKPVGPGQPTLFKFFNKVLDGGSNSVSVGSETEECNTDKKMVHIDASEAYKEVTDQFIDIVNGSESLRDYAASIIDEAKGDISRALNIYYSKPREIPGDHAGERGLSSKTIQYPKCSEACSSQEDKKASENSGHAVNICVQTSAEESVDKNYVSLPPEKYQPKEHACWREGQPAPYIHLVRTFASVESEKGKIKAMSMLCNMFRSLFALSPEDVLPAVYLCTNKIAADHENIELNIGGSLISSALEEACGISRSTVRDMYNSLGDLGDVAQLCRQTQKLLVPPPPLLVRDVFSTLRKISVQTGTGSTRLKKNLIVKLMRSCREKEIKFLVRTLARNLRIGAMLRTVLPALGRAIVMNSFWNDHNKELSESCFREKLEGVSAAVVEAYNILPSLDVVVPSLMDKDIEFSTSTLSMVPGIPIKPMLAKIAKGVQEFFNLSQEKAFTCEYKYDGQRAQIHKLLDGTVCIFSRNGDETTSRFPDLVDVIKQFSCPAAETFMLDAEVVATDRINGNKLMSFQELSTRERGSKDALITTESIKVEVCVFVFDIMFVNGEQLLALPLRERRRRLKEVFPETRPGYLEYAKEITVSATVGAEEASLNNHDTLSRINAFLEEAFQSSCEGIMVKSLDVNAGYCPTKRSDSWLKVKRDYVDGLGDTLDLVPIGAWYGNGRKAGWYSPFLMACFNPETEEFQSVCRVMSGFSDAFYIEVMKSSTLTLLFNDETDGMKEFYSEDKILAKKPPYYRTGETPDMWFSAEVVWEIRGADFTVSPVHSASLGLVHPSRGISVRFPRFISKVTDRNPEECSTATDIAEMFHAQTRKMNITSQH

SEQ ID NO: 46875 - protein, 1286 aa, Arabidopsis thaliana
  peptide (1)..(1286): Ceres Seq. ID no. 13578715
  misc_feature (879)..(1106): Pfam Name: ATP dependent DNA ligase domain Pfam Description: ATP dependent DNA ligase domain
  misc_feature (984)..(1276): Homolog of NCBI NO: 118774 NR Description: DNA ligase (Polydeoxyribonucleotide synthase
  misc_feature (577)..(1055): Homolog of NCBI NO: 118774 NR Description: DNA ligase (Polydeoxyribonucleotide synthase
  misc_feature (991)..(1281): Homolog of NCBI NO: 24762424 NR Description: CG5602-PA [Drosophila melanogaster]
  misc_feature (585)..(1042): Homolog of NCBI NO: 24762424 NR Description: CG5602-PA [Drosophila melanogaster]
  misc_feature (991)..(1276): Homolog of NCBI NO: 37535574 NR Description: putative DNA ligase [Oryza sativa (japonica
  misc_feature (579)..(1046): Homolog of NCBI NO: 37535574 NR Description: putative DNA ligase [Oryza sativa (japonica
  misc_feature (991)..(1276): Homolog of NCBI NO: 2129574 NR Description: DNA ligase (ATP) (EC 6.5.1.1) - Arabidopsis
  misc_feature (577)..(1046): Homolog of NCBI NO: 2129574 NR Description: DNA ligase (ATP) (EC 6.5.1.1) - Arabidopsis
  misc_feature (991)..(1276): Homolog of NCBI NO: 30680522 NR Description: ligase I -related [Arabidopsis thaliana]
  misc_feature (577)..(1046): Homolog of NCBI NO: 30680522 NR Description: ligase I -related [Arabidopsis thaliana]
MVKIDGSEVVLIEANHCPGAVQFLFKVKLESSGFEKYVHTGDFRFCDEMRFDPFLNGFVGCDGVFLDTTYCNPKFVFPSQEESVGYVVSVIDKISEEKVLFLVATYVVGKEKILVEIARRCKRKIVVDARKMSMLSVLGCGEEGMFTEDENESDVHVVGWNVLGETWPYFRPNFVKMNEIMVEKGYDKVVGFVPTGWTYEVKRNKFAVRFKDSMEIHLVPYSEHSNYDELREFIKFLKPKRVIPTVGVDIEKFDCKEVNKMQKHFSGLVDEMANKKDFLLGFYRQSYQKNEKSDVDVVSHSAEVYEEEEKNACEDGGENVPSSRGPILHDTTPSSDSRLLIKLRDSLPAWVTEEQMLDLIKKHAGNPVDIVSNFYEYEAELYKQASLPTPSLNNQAVLFDDDVTDLQPNPVKGICPDVQAIQKGFDLPRKMNLTKGTISPGKRGKSSGSKSNKKAKKDPKSKPVGPGQPTLFKFFNKVLDGGSNSVSVGSETEECNTDKKMVHIDASEAYKEVTDQFIDIVNGSESLRDYAASIIDEAKGDISRALNIYYSKPREIPGDHAGERGLSSKTIQYPKCSEACSSQEDKKASENSGHAVNICVQTSAEESVDKNYVSLPPEKYQPKEHACWREGQPAPYIHLVRTFASVESEKGKIKAMSMLCNMFRSLFALSPEDVLPAVYLCTNKIAADHENIELNIGGSLISSALEEACGISRSTVRDMYNSLGDLGDVAQLCRQTQKLLVPPPPLLVRDVFSTLRKISVQTGTGSTRLKKNLIVKLMRSCREKEIKFLVRTLARNLRIGAMLRTVLPALGRAIVMNSFWNDHNKELSESCFREKLEGVSAAVVEAYNILPSLDVVVPSLMDKDIEFSTSTLSMVPGIPIKPMLAKIAKGVQEFFNLSQEKAFTCEYKYDGQRAQIHKLLDGTVCIFSRNGDETTSRFPDLVDVIKQFSCPAAETFMLDAEVVATDRINGNKLMSFQELSTRERGSKDALITTESIKVEVCVFVFDIMFVNGEQLLALPLRERRRRLKEVFPETRPGYLEYAKEITVSATVGAEEASLNNHDTLSRINAFLEEAFQSSCEGIMVKSLDVNAGYCPTKRSDSWLKVKRDYVDGLGDTLDLVPIGAWYGNGRKAGWYSPFLMACFNPETEEFQSVCRVMSGFSDAFYIEVMKSSTLTLLFNDETDGMKEFYSEDKILAKKPPYYRTGETPDMWFSAEVVWEIRGADFTVSPVHSASLGLVHPSRGISVRFPRFISKVTDRNPEECSTATDIAEMFHAQTRKMNITSQH

SEQ ID NO: 46876 - DNA, 2463 bp, Arabidopsis thaliana; identical to SEQ ID NO: 36172
  misc_feature (1)..(2463): Ceres Seq. ID no. 12601343
  misc_feature: MA Experiment ID: 108434 Result: Up-regulated in Transcription
  misc_feature: MA Experiment 108434 PARAMETER Experiment Name: At_Root_Tips_cDNA_P Parameter: Tissue Value: Root Tips
  misc_feature: MA Experiment ID: 108463 Result: Down-regulated in Transcription
  misc_feature: MA Experiment 108463 PARAMETER Experiment Name: At_Germinating_Seeds_cDNA_P Parameter: Age (day) Value: 3 vs. 0
  misc_feature: MA Experiment 108463 PARAMETER Experiment Name: At_Germinating_Seeds_cDNA_P Parameter: Tissue Value: Germinating Seeds
  misc_feature: MA Experiment ID: 108464 Result: Down-regulated in Transcription
  misc_feature: MA Experiment 108464 PARAMETER Experiment Name: At_Germinating_Seeds_cDNA_P Parameter: Age (day) Value: 4 vs. 0
  misc_feature: MA Experiment 108464 PARAMETER Experiment Name: At_Germinating_Seeds_cDNA_P Parameter: Tissue Value: Germinating Seeds
  misc_feature: MA Experiment ID: 108576 Result: Up-regulated in Transcription
  misc_feature: MA Experiment 108576 PARAMETER Experiment Name: At_42deg_Heat_cDNA_P Parameter: Temperature (deg C) Value: 42 vs. 22
  misc_feature: MA Experiment 108576 PARAMETER Experiment Name: At_42deg_Heat_cDNA_P Parameter: Timepoint (hr) Value: 1
  misc_feature: MA Experiment 108576 PARAMETER Experiment Name: At_42deg_Heat_cDNA_P Parameter: Tissue Value: Aerial
  misc_feature: MA Experiment ID: 108577 Result: Up-regulated in Transcription
  misc_feature: MA Experiment 108577 PARAMETER Experiment Name: At_42deg_Heat_cDNA_P Parameter: Temperature (deg C) Value: 42 vs. 22
  misc_feature: MA Experiment 108577 PARAMETER Experiment Name: At_42deg_Heat_cDNA_P Parameter: Timepoint (hr) Value: 6
  misc_feature: MA Experiment 108577 PARAMETER Experiment Name: At_42deg_Heat_cDNA_P Parameter: Tissue Value: Aerial
  misc_feature: MA Experiment ID: 108595 Result: Down-regulated in Transcription
  misc_feature: MA Experiment 108595 PARAMETER Experiment Name: At_Ler-pi_Ovule_cDNA_P Parameter: Plant Line Value: null
  misc_feature: MA Experiment ID: 20000070 Result: Down-regulated in Transcription
  misc_feature: MA Experiment 20000070 PARAMETER Experiment Name: At_100uM_ABA_Mutants_cDNA_P Parameter: Plant Line Value: CS24
  misc_feature: MA Experiment 20000070 PARAMETER Experiment Name: At_100uM_ABA_Mutants_cDNA_P Parameter: Timepoint (hr) Value: 6
  misc_feature: MA Experiment 20000070 PARAMETER Experiment Name: At_100uM_ABA_Mutants_cDNA_P Parameter: Tissue Value: Aerial
  misc_feature: MA Experiment 20000070 PARAMETER Experiment Name: At_100uM_ABA_Mutants_cDNA_P Parameter: Treatment Value: 100uM ABA vs. No Treatment
  misc_feature: MA Experiment ID: 20000071 Result: Down-regulated in Transcription
  misc_feature: MA Experiment 20000071 PARAMETER Experiment Name: At_100uM_ABA_Mutants_cDNA_P Parameter: Plant Line Value: CS8104
  misc_feature: MA Experiment 20000071 PARAMETER Experiment Name: At_100uM_ABA_Mutants_cDNA_P Parameter: Timepoint (hr) Value: 6
  misc_feature: MA Experiment 20000071 PARAMETER Experiment Name: At_100uM_ABA_Mutants_cDNA_P Parameter: Tissue Value: Aerial
  misc_feature: MA Experiment 20000071 PARAMETER Experiment Name: At_100uM_ABA_Mutants_cDNA_P Parameter: Treatment Value: 100uM ABA vs. No Treatment
  misc_feature: MA Experiment ID: 20000072 Result: Down-regulated in Transcription
  misc_feature: MA Experiment 20000072 PARAMETER Experiment Name: At_100uM_ABA_Mutants_cDNA_P Parameter: Plant Line Value: CS8105
  misc_feature: MA Experiment 20000072 PARAMETER Experiment Name: At_100uM_ABA_Mutants_cDNA_P Parameter: Timepoint (hr) Value: 6
  misc_feature: MA Experiment 20000072 PARAMETER Experiment Name: At_100uM_ABA_Mutants_cDNA_P Parameter: Tissue Value: Aerial
  misc_feature: MA Experiment 20000072 PARAMETER Experiment Name: At_100uM_ABA_Mutants_cDNA_P Parameter: Treatment Value: 100uM ABA vs. No Treatment
  misc_feature: MA Experiment ID: 20000087 Result: Down-regulated in Transcription
  misc_feature: MA Experiment 20000087 PARAMETER Experiment Name: At_100uM_ABA_Mutants_cDNA_P Parameter: Plant Line Value: WS
  misc_feature: MA Experiment 20000087 PARAMETER Experiment Name: At_100uM_ABA_Mutants_cDNA_P Parameter: Timepoint (hr) Value: 6
  misc_feature: MA Experiment 20000087 PARAMETER Experiment Name: At_100uM_ABA_Mutants_cDNA_P Parameter: Tissue Value: Aerial
  misc_feature: MA Experiment 20000087 PARAMETER Experiment Name: At_100uM_ABA_Mutants_cDNA_P Parameter: Treatment Value: 100uM ABA vs. No Treatment
  misc_feature: MA Experiment ID: 20000093 Result: Up-regulated in Transcription
  misc_feature: MA Experiment 20000093 PARAMETER Experiment Name: At_42deg_Heat_cDNA_P Parameter: Temperature (deg C) Value: 42 vs. 22
  misc_feature: MA Experiment 20000093 PARAMETER Experiment Name: At_42deg_Heat_cDNA_P Parameter: Timepoint (hr) Value: 0.5
  misc_feature: MA Experiment 20000093 PARAMETER Experiment Name: At_42deg_Heat_cDNA_P Parameter: Tissue Value: Aerial
  misc_feature: MA Experiment ID: 20000111 Result: Up-regulated in Transcription
  misc_feature: MA Experiment 20000111 PARAMETER Experiment Name: At_42deg_Heat_cDNA_P Parameter: Temperature (deg C) Value: 42 vs. 22
  misc_feature: MA Experiment 20000111 PARAMETER Experiment Name: At_42deg_Heat_cDNA_P Parameter: Timepoint (hr) Value: 6
  misc_feature: MA Experiment 20000111 PARAMETER Experiment Name: At_42deg_Heat_cDNA_P Parameter: Tissue Value: Aerial
  misc_feature: MA Experiment ID: 20000112 Result: Up-regulated in Transcription
  misc_feature: MA Experiment 20000112 PARAMETER Experiment Name: At_42deg_Heat_cDNA_P Parameter: Temperature (deg C) Value: 42 vs. 22
  misc_feature: MA Experiment 20000112 PARAMETER Experiment Name: At_42deg_Heat_cDNA_P Parameter: Timepoint (hr) Value: 2
  misc_feature: MA Experiment 20000112 PARAMETER Experiment Name: At_42deg_Heat_cDNA_P Parameter: Tissue Value: Aerial
  misc_feature: MA Experiment ID: 20000113 Result: Up-regulated in Transcription
  misc_feature: MA Experiment 20000113 PARAMETER Experiment Name: At_42deg_Heat_cDNA_P Parameter: Temperature (deg C) Value: 42 vs. 22
  misc_feature: MA Experiment 20000113 PARAMETER Experiment Name: At_42deg_Heat_cDNA_P Parameter: Timepoint (hr) Value: 8
  misc_feature: MA Experiment 20000113 PARAMETER Experiment Name: At_42deg_Heat_cDNA_P Parameter: Tissue Value: Aerial
  misc_feature: MA Experiment ID: 20000144 Result: Up-regulated in Transcription
  misc_feature: MA Experiment 20000144 PARAMETER Experiment Name: At_42deg_Heat_cDNA_P Parameter: Temperature (deg C) Value: 42 vs. 22
  misc_feature: MA Experiment 20000144 PARAMETER Experiment Name: At_42deg_Heat_cDNA_P Parameter: Timepoint (hr) Value: 1
  misc_feature: MA Experiment 20000144 PARAMETER Experiment Name: At_42deg_Heat_cDNA_P Parameter: Tissue Value: Aerial
  misc_feature: MA Experiment ID: 20000171 Result: Up-regulated in Transcription
  misc_feature: MA Experiment 20000171 PARAMETER Experiment Name: At_42deg_Heat_P Parameter: Age (day) Value: 14
  misc_feature: MA Experiment 20000171 PARAMETER Experiment Name: At_42deg_Heat_P Parameter: Organism Value: A. thaliana
  misc_feature: MA Experiment 20000171 PARAMETER Experiment Name: At_42deg_Heat_P Parameter: Plant Line Value: WS
  misc_feature: MA Experiment 20000171 PARAMETER Experiment Name: At_42deg_Heat_P Parameter: Temperature (deg C) Value: 42 vs. 22
  misc_feature: MA Experiment 20000171 PARAMETER Experiment Name: At_42deg_Heat_P Parameter: Timepoint (hr) Value: 1
  misc_feature: MA Experiment 20000171 PARAMETER Experiment Name: At_42deg_Heat_P Parameter: Tissue Value: Aerial
  misc_feature: MA Experiment ID: 20000173 Result: Up-regulated in Transcription
  misc_feature: MA Experiment 20000173 PARAMETER Experiment Name: At_42deg_Heat_P Parameter: Age (day) Value: 14
  misc_feature: MA Experiment 20000173 PARAMETER Experiment Name: At_42deg_Heat_P Parameter: Organism Value: A. thaliana
  misc_feature: MA Experiment 20000173 PARAMETER Experiment Name: At_42deg_Heat_P Parameter: Plant Line Value: WS
  misc_feature: MA Experiment 20000173 PARAMETER Experiment Name: At_42deg_Heat_P Parameter: Temperature (deg C) Value: 42 vs. 22
  misc_feature: MA Experiment 20000173 PARAMETER Experiment Name: At_42deg_Heat_P Parameter: Timepoint (hr) Value: 6
  misc_feature: MA Experiment 20000173 PARAMETER Experiment Name: At_42deg_Heat_P Parameter: Tissue Value: Aerial
  misc_feature: MA Experiment ID: 20000224 Result: Up-regulated in Transcription
  misc_feature: MA Experiment ID: 20001248 Result: Down-regulated in Transcription
  misc_feature: MA Experiment 20001248 PARAMETER Experiment Name: At_Far-red-induction_P Parameter: Age (day) Value: 7
  misc_feature: MA Experiment 20001248 PARAMETER Experiment Name: At_Far-red-induction_P Parameter: Light Value: Far-red vs. White
  misc_feature: MA Experiment 20001248 PARAMETER Experiment Name: At_Far-red-induction_P Parameter: Organism Value: A. thaliana
  misc_feature: MA Experiment 20001248 PARAMETER Experiment Name: At_Far-red-induction_P Parameter: Plant Line Value: Columbia
  misc_feature: MA Experiment 20001248 PARAMETER Experiment Name: At_Far-red-induction_P Parameter: Timepoint (hr) Value: 4
  misc_feature: MA Experiment 20001248 PARAMETER Experiment Name: At_Far-red-induction_P Parameter: Tissue Value: Whole Plant
  misc_feature: MA Experiment ID: 20001450 Result: Down-regulated in Transcription
  misc_feature: MA Experiment 20001450 PARAMETER Experiment Name: At_Far-red-induction_P Parameter: Age (day) Value: 7
  misc_feature: MA Experiment 20001450 PARAMETER Experiment Name: At_Far-red-induction_P Parameter: Light Value: Far-red vs. White
  misc_feature: MA Experiment 20001450 PARAMETER Experiment Name: At_Far-red-induction_P Parameter: Organism Value: A. thaliana
  misc_feature: MA Experiment 20001450 PARAMETER Experiment Name: At_Far-red-induction_P Parameter: Plant Line Value: Columbia
  misc_feature: MA Experiment 20001450 PARAMETER Experiment Name: At_Far-red-induction_P Parameter: Timepoint (hr) Value: 8
  misc_feature: MA Experiment 20001450 PARAMETER Experiment Name: At_Far-red-induction_P Parameter: Tissue Value: Whole Plant

SEQ ID NO: 46877 - protein, 718 aa, Arabidopsis thaliana; identical to SEQ ID NO: 36173
  peptide (1)..(718): Ceres Seq. ID no. 12601344
  misc_feature (80)..(675): Pfam Name: Hsp70 protein Pfam Description: Hsp70 protein
  misc_feature (80)..(675): Pfam Name: Hsp70 protein Pfam Description: Hsp70 protein
  misc_feature (80)..(675): Pfam Name: Hsp70 protein Pfam Description: Hsp70 protein
  misc_feature (79)..(666): Homolog of NCBI NO: 23040330 NR Description: hypothetical protein [Trichodesmium erythraeum
  misc_feature (79)..(668): Homolog of NCBI NO: 17230482 NR Description: DnaK-type molecular chaperone [Nostoc sp. PCC
  misc_feature (79)..(668): Homolog of NCBI NO: 3121997 NR Description: Chaperone protein dnaK (Heat shock protein 70)
  misc_feature (64)..(718): Homolog of NCBI NO: 7441862 NR Description: dnaK-type molecular chaperone hsp70b precursor,
  misc_feature (134)..(702): Homolog of NCBI NO: 1708311 NR Description: Stromal 70 kDa heat shock-related protein,
  misc_feature (79)..(666): Homolog of NCBI NO: 23040330 NR Description: hypothetical protein [Trichodesmium erythraeum
  misc_feature (79)..(668): Homolog of NCBI NO: 3121997 NR Description: Chaperone protein dnaK (Heat shock protein 70)
  misc_feature (134)..(702): Homolog of NCBI NO: 1708311 NR Description: Stromal 70 kDa heat shock-related protein,
  misc_feature (64)..(718): Homolog of NCBI NO: 7441862 NR Description: dnaK-type molecular chaperone hsp70b precursor,
  misc_feature (79)..(668): Homolog of NCBI NO: 3121997 NR Description: Chaperone protein dnaK (Heat shock protein 70)
  misc_feature (79)..(668): Homolog of NCBI NO: 17230482 NR Description: DnaK-type molecular chaperone [Nostoc sp. PCC
  misc_feature (79)..(666): Homolog of NCBI NO: 23040330 NR Description: hypothetical protein [Trichodesmium erythraeum
  misc_feature (1)..(718): Homolog of NCBI NO: 7441880 NR Description: dnaK-type molecular chaperone HSC70-9,
  misc_feature (1)..(718): Homolog of NCBI NO: 7441856 NR Description: heat shock protein, 70K, chloroplast - cucumber
  misc_feature (1)..(718): Homolog of NCBI NO: 1928991 NR Description: heat shock protein 70 precursor [Citrullus
  misc_feature (1)..(718): Homolog of NCBI NO: 399942 NR Description: Stromal 70 kDa heat shock-related protein,
  misc_feature (1)..(718): Homolog of NCBI NO: 445605 NR Description: heat shock protein hsp70
  misc_feature (1)..(718): Homolog of NCBI NO: 7441880 NR Description: dnaK-type molecular chaperone HSC70-9,
  misc_feature (1)..(718): Homolog of NCBI NO: 7441856 NR Description: heat shock protein, 70K, chloroplast - cucumber
  misc_feature (1)..(718): Homolog of NCBI NO: 1928991 NR Description: heat shock protein 70 precursor [Citrullus
  misc_feature (1)..(718): Homolog of NCBI NO: 399942 NR Description: Stromal 70 kDa heat shock-related protein,
  misc_feature (1)..(718): Homolog of NCBI NO: 445605 NR Description: heat shock protein hsp70
  misc_feature (134)..(702): Homolog of NCBI NO: 1708311 NR Description: Stromal 70 kDa heat shock-related protein,
  misc_feature (64)..(718): Homolog of NCBI NO: 7441862 NR Description: dnaK-type molecular chaperone hsp70b precursor,
  misc_feature (79)..(668): Homolog of NCBI NO: 17230482 NR Description: DnaK-type molecular chaperone [Nostoc sp. PCC
  misc_feature (1)..(718): Homolog of NCBI NO: 445605 NR Description: heat shock protein hsp70
  misc_feature (1)..(718): Homolog of NCBI NO: 399942 NR Description: Stromal 70 kDa heat shock-related protein,
  misc_feature (1)..(718): Homolog of NCBI NO: 1928991 NR Description: heat shock protein 70 precursor [Citrullus
  misc_feature (1)..(718): Homolog of NCBI NO: 7441856 NR Description: heat shock protein, 70K, chloroplast - cucumber
  misc_feature (1)..(718): Homolog of NCBI NO: 7441880 NR Description: dnaK-type molecular chaperone HSC70-9,

SEQ ID NO: 46878 - protein, 685 aa, Arabidopsis thaliana; identical to SEQ ID NO: 36174
  peptide (1)..(685): Ceres Seq. ID no. 12601345
  misc_feature (47)..(642): Pfam Name: Hsp70 protein Pfam Description: Hsp70 protein
  misc_feature (47)..(642): Pfam Name: Hsp70 protein Pfam Description: Hsp70 protein
  misc_feature (47)..(642): Pfam Name: Hsp70 protein Pfam Description: Hsp70 protein
  misc_feature (46)..(633): Homolog of NCBI NO: 23040330 NR Description: hypothetical protein [Trichodesmium erythraeum
  misc_feature (46)..(635): Homolog of NCBI NO: 17230482 NR Description: DnaK-type molecular chaperone [Nostoc sp. PCC
  misc_feature (46)..(635): Homolog of NCBI NO: 3121997 NR Description: Chaperone protein dnaK (Heat shock protein 70)
  misc_feature (31)..(685): Homolog of NCBI NO: 7441862 NR Description: dnaK-type molecular chaperone hsp70b precursor,
  misc_feature (101)..(669): Homolog of NCBI NO: 1708311 NR Description: Stromal 70 kDa heat shock-related protein,
  misc_feature (46)..(633): Homolog of NCBI NO: 23040330 NR Description: hypothetical protein [Trichodesmium erythraeum
  misc_feature (46)..(635): Homolog of NCBI NO: 3121997 NR Description: Chaperone protein dnaK (Heat shock protein 70)
  misc_feature (101)..(669): Homolog of NCBI NO: 1708311 NR Description: Stromal 70 kDa heat shock-related protein,
  misc_feature (31)..(685): Homolog of NCBI NO: 7441862 NR Description: dnaK-type molecular chaperone hsp70b precursor,
  misc_feature (46)..(635): Homolog of NCBI NO: 3121997 NR Description: Chaperone protein dnaK (Heat shock protein 70)
  misc_feature (46)..(635): Homolog of NCBI NO: 17230482 NR Description: DnaK-type molecular chaperone [Nostoc sp. PCC
  misc_feature (46)..(633): Homolog of NCBI NO: 23040330 NR Description: hypothetical protein [Trichodesmium erythraeum
  misc_feature (1)..(685): Homolog of NCBI NO: 7441880 NR Description: dnaK-type molecular chaperone HSC70-9,
  misc_feature (1)..(685): Homolog of NCBI NO: 7441856 NR Description: heat shock protein, 70K, chloroplast - cucumber
  misc_feature (1)..(685): Homolog of NCBI NO: 1928991 NR Description: heat shock protein 70 precursor [Citrullus
  misc_feature (1)..(685): Homolog of NCBI NO: 399942 NR Description: Stromal 70 kDa heat shock-related protein,
  misc_feature (1)..(685): Homolog of NCBI NO: 445605 NR Description: heat shock protein hsp70
  misc_feature (1)..(685): Homolog of NCBI NO: 7441880 NR Description: dnaK-type molecular chaperone HSC70-9,
  misc_feature (1)..(685): Homolog of NCBI NO: 7441856 NR Description: heat shock protein, 70K, chloroplast - cucumber
  misc_feature (1)..(685): Homolog of NCBI NO: 1928991 NR Description: heat shock protein 70 precursor [Citrullus
  misc_feature (1)..(685): Homolog of NCBI NO: 399942 NR Description: Stromal 70 kDa heat shock-related protein,
  misc_feature (1)..(685): Homolog of NCBI NO: 445605 NR Description: heat shock protein hsp70
  misc_feature (101)..(669): Homolog of NCBI NO: 1708311 NR Description: Stromal 70 kDa heat shock-related protein,
  misc_feature (31)..(685): Homolog of NCBI NO: 7441862 NR Description: dnaK-type molecular chaperone hsp70b precursor,
  misc_feature (46)..(635): Homolog of NCBI NO: 17230482 NR Description: DnaK-type molecular chaperone [Nostoc sp. PCC
  misc_feature (1)..(685): Homolog of NCBI NO: 445605 NR Description: heat shock protein hsp70
  misc_feature (1)..(685): Homolog of NCBI NO: 399942 NR Description: Stromal 70 kDa heat shock-related protein,
  misc_feature (1)..(685): Homolog of NCBI NO: 1928991 NR Description: heat shock protein 70 precursor [Citrullus
  misc_feature (1)..(685): Homolog of NCBI NO: 7441856 NR Description: heat shock protein, 70K, chloroplast - cucumber
  misc_feature (1)..(685): Homolog of NCBI NO: 7441880 NR Description: dnaK-type molecular chaperone HSC70-9,

SEQ ID NO: 46879 - protein, 662 aa, Arabidopsis thaliana; identical to SEQ ID NO: 36175
  peptide (1)..(662): Ceres Seq. ID no. 12601346
  misc_feature (24)..(619): Pfam Name: Hsp70 protein Pfam Description: Hsp70 protein
  misc_feature (24)..(619): Pfam Name: Hsp70 protein Pfam Description: Hsp70 protein
  misc_feature (24)..(619): Pfam Name: Hsp70 protein Pfam Description: Hsp70 protein
  misc_feature (23)..(610): Homolog of NCBI NO: 23040330 NR Description: hypothetical protein [Trichodesmium erythraeum
  misc_feature (23)..(612): Homolog of NCBI NO: 17230482 NR Description: DnaK-type molecular chaperone [Nostoc sp. PCC
  misc_feature (23)..(612): Homolog of NCBI NO: 3121997 NR Description: Chaperone protein dnaK (Heat shock protein 70)
  misc_feature (8)..(662): Homolog of NCBI NO: 7441862 NR Description: dnaK-type molecular chaperone hsp70b precursor,
  misc_feature (78)..(646): Homolog of NCBI NO: 1708311 NR Description: Stromal 70 kDa heat shock-related protein,
  misc_feature (23)..(610): Homolog of NCBI NO: 23040330 NR Description: hypothetical protein [Trichodesmium erythraeum
  misc_feature (23)..(612): Homolog of NCBI NO: 3121997 NR Description: Chaperone protein dnaK (Heat shock protein 70)
  misc_feature (78)..(646): Homolog of NCBI NO: 1708311 NR Description: Stromal 70 kDa heat shock-related protein,
  misc_feature (8)..(662): Homolog of NCBI NO: 7441862 NR Description: dnaK-type molecular chaperone hsp70b precursor,
  misc_feature (23)..(612): Homolog of NCBI NO: 3121997 NR Description: Chaperone protein dnaK (Heat shock protein 70)
  misc_feature (23)..(612): Homolog of NCBI NO: 17230482 NR Description: DnaK-type molecular chaperone [Nostoc sp. PCC
  misc_feature (23)..(610): Homolog of NCBI NO: 23040330 NR Description: hypothetical protein [Trichodesmium erythraeum
  misc_feature (1)..(662): Homolog of NCBI NO: 7441880 NR Description: dnaK-type molecular chaperone HSC70-9,
  misc_feature (1)..(662): Homolog of NCBI NO: 7441856 NR Description: heat shock protein, 70K, chloroplast - cucumber
  misc_feature (1)..(662): Homolog of NCBI NO: 1928991 NR Description: heat shock protein 70 precursor [Citrullus
  misc_feature (1)..(662): Homolog of NCBI NO: 399942 NR Description: Stromal 70 kDa heat shock-related protein,
  misc_feature (1)..(662): Homolog of NCBI NO: 445605 NR Description: heat shock protein hsp70
  misc_feature (1)..(662): Homolog of NCBI NO: 7441880 NR Description: dnaK-type molecular chaperone HSC70-9,
  misc_feature (1)..(662): Homolog of NCBI NO: 7441856 NR Description: heat shock protein, 70K, chloroplast - cucumber
  misc_feature (1)..(662): Homolog of NCBI NO: 1928991 NR Description: heat shock protein 70 precursor [Citrullus
  misc_feature (1)..(662): Homolog of NCBI NO: 399942 NR Description: Stromal 70 kDa heat shock-related protein,
  misc_feature (1)..(662): Homolog of NCBI NO: 445605 NR Description: heat shock protein hsp70
  misc_feature (78)..(646): Homolog of NCBI NO: 1708311 NR Description: Stromal 70 kDa heat shock-related protein,
  misc_feature (8)..(662): Homolog of NCBI NO: 7441862 NR Description: dnaK-type molecular chaperone hsp70b precursor,
  misc_feature (23)..(612): Homolog of NCBI NO: 17230482 NR Description: DnaK-type molecular chaperone [Nostoc sp. PCC
  misc_feature (1)..(662): Homolog of NCBI NO: 445605 NR Description: heat shock protein hsp70
  misc_feature (1)..(662): Homolog of NCBI NO: 399942 NR Description: Stromal 70 kDa heat shock-related protein,
  misc_feature (1)..(662): Homolog of NCBI NO: 1928991 NR Description: heat shock protein 70 precursor [Citrullus
  misc_feature (1)..(662): Homolog of NCBI NO: 7441856 NR Description: heat shock protein, 70K, chloroplast - cucumber
  misc_feature (1)..(662): Homolog of NCBI NO: 7441880 NR Description: dnaK-type molecular chaperone HSC70-9,

SEQ ID NO: 46880 - DNA, 1897 bp, Arabidopsis thaliana
  misc_feature (1)..(1897): Ceres Seq. ID no. 13646965
  misc_feature: MA Experiment ID: 20000180 Result: Down-regulated in Transcription
  misc_feature: MA Experiment 20000180 PARAMETER Experiment Name: At_Germinating_Seeds_P Parameter: Age (hr) Value: 24 vs. 0
  misc_feature: MA Experiment 20000180 PARAMETER Experiment Name: At_Germinating_Seeds_P Parameter: Tissue Value: Germinating Seeds
  misc_feature: MA Experiment ID: 20000227 Result: Up-regulated in Transcription
  misc_feature: MA Experiment 20000227 PARAMETER Experiment Name: At_Root-Tips-vs-Tops_P Parameter: Tissue Value: Root Tips vs. Root Tops
gaccggaaaataatgctgctccggtcatttcgcaccgtcgagcttctccgccgaatctccacttcttcagtctctggatatcgaacttctccttcacttttacaacgttgcaatggcttccaaacctatttaccacacagagtaacaacaacagagagtcctttcccttcacacatctctcgattctgttcttctcagagcgcgaattcgcaaaatgagaatcgacacacgactctatcatcaccggtttcttcacggagggttaataacagaaagatttcacggcggaggaaggcgggaaaatcattatcaatctcgccggcggcggatgcggttgatttggcgttagactcagtggtgaagatcttcactgtttctacaagtcctagttactttcttccttggcagaataagtctcaacgagaatctatgggctctggatttgtgatttctggaaggaagattataacgaatgcgcatgtcgtggctgatcactcctttgtgttagttagaaagcatggatcgtcgataaaacacagagcagaagttcaagcggttggtcatgaatgtgatttggctatattggtagttgatagtgaagtgttttgggaaggtatgaatgctttggagctaggagatataccgtttcttcaggaagctgtggctgtagttggctatcctcaaggtggtgacaacatttctgttacaaaaggtgttgtgtctcgagttgaaccgacacaatatgttcacggtgccacccagctaatggctatacaaatagatgctgctattaaccccggaaatagtggtggcccagctatcatgggaaacaaagtagctggtgtcgcatttcaaaatctttcaggtgctgagaatataggctatataattccaacaccagtgataaagcatttcataaatggcgttgaagaatgtggtaaatacattggtttttgttcaatgggtgtatcatgtcagcctatggagaatggtgaacttcgtagtggttttcagatgagttctgaaatgacaggggttcttgttagcaaaataaaccctctatcagatgctcacaaaattttgaagaaagatgatgttcttcttgcatttgatggtgttcctatagcaaatgatggaacagttccttttcggaacagggagagaatcactttcgaccatttggtttctatgaagaaaccagatgaaacagccttggttaaagttttgagagaggggaaagaacatgaattcagtatcacactaagacctctgcaaccactagttccagtgcatcaatttgatcagcttcccagttattatatatttgcgggcttcgtatttgtacctcttactcagccataccttcatgaatatggagaagattggtataacacttctccccgcacattgtgccatcgtgcattaaaagatttgcccaaaaaagccggtcaacaacttgtcattgtctctcaggtgttaatggatgatatcaacacaggatacgagcgtctcgcagaactacaagtgaataaagtgaacggagtagaagtgaataatctgagacatctatgtcagctcatagagaactgcaacaccgaaaagctgaggatagacttagacgatgagagtagggtaatcgtcttgaactaccaatccgcaaaaattgccacttctttgattttgaaacgacacagaatagcatcagcgatttccagcgatctgcttatcgaacaaaatctagaaaccgagttggcttcttgttctgcggtttgagctatcgccaacacgtatggcatgttgtacacttacaaattcattcataatttgtaaactacaatgttgtatactcataaacatttaggatttgataagtggcttgtcacgagcctgaattttg

SEQ ID NO: 46881 - protein, 590 aa, Arabidopsis thaliana
  peptide (1)..(590): Ceres Seq. ID no. 13646966
  misc_feature (121)..(306): Pfam Name: Trypsin Pfam Description: Trypsin
  misc_feature (71)..(486): Homolog of NCBI NO: 2190549 NR Description: F5I14.17 gene product [Arabidopsis thaliana]
  misc_feature (487)..(581): Homolog of NCBI NO: 9279653 NR Description: gb|AAF23847.1~gene_id:MDC8.17~strong similarity
  misc_feature (10)..(455): Homolog of NCBI NO: 9279653 NR Description: gb|AAF23847.1~gene_id:MDC8.17~strong similarity
  misc_feature (491)..(581): Homolog of NCBI NO: 18401167 NR Description: DegP protease [Arabidopsis thaliana]
  misc_feature (10)..(455): Homolog of NCBI NO: 18401167 NR Description: DegP protease [Arabidopsis thaliana]
  misc_feature (483)..(579): Homolog of NCBI NO: 9758082 NR Description: contains similarity to serine
  misc_feature (79)..(454): Homolog of NCBI NO: 9758082 NR Description: contains similarity to serine
  misc_feature (71)..(573): Homolog of NCBI NO: 18408329 NR Description: DegP protease [Arabidopsis thaliana]
  misc_feature (62)..(578): Homolog of NCBI NO: 18408327 NR Description: DegP protease [Arabidopsis thaliana]
  misc_feature (5)..(590): Homolog of NCBI NO: 18421592 NR Description: DegP protease [Arabidopsis thaliana]
DRKIMLLRSFRTVELLRRISTSSVSGYRTSPSLLQRCNGFQTYLPHRVTTTESPFPSHISRFCSSQSANSQNENRHTTLSSPVSSRRVNNRKISRRRKAGKSLSISPAADAVDLALDSVVKIFTVSTSPSYFLPWQNKSQRESMGSGFVISGRKIITNAHVVADHSFVLVRKHGSSIKHRAEVQAVGHECDLAILVVDSEVFWEGMNALELGDIPFLQEAVAVVGYPQGGDNISVTKGVVSRVEPTQYVHGATQLMAIQIDAAINPGNSGGPAIMGNKVAGVAFQNLSGAENIGYIIPTPVIKHFINGVEECGKYIGFCSMGVSCQPMENGELRSGFQMSSEMTGVLVSKINPLSDAHKILKKDDVLLAFDGVPIANDGTVPFRNRERITFDHLVSMKKPDETALVKVLREGKEHEFSITLRPLQPLVPVHQFDQLPSYYIFAGFVFVPLTQPYLHEYGEDWYNTSPRTLCHRALKDLPKKAGQQLVIVSQVLMDDINTGYERLAELQVNKVNGVEVNNLRHLCQLIENCNTEKLRIDLDDESRVIVLNYQSAKIATSLILKRHRIASAISSDLLIEQNLETELASCSAV

SEQ ID NO: 46882 - protein, 586 aa, Arabidopsis thaliana
  peptide (1)..(586): Ceres Seq. ID no. 13646967
  misc_feature (117)..(302): Pfam Name: Trypsin Pfam Description: Trypsin
  misc_feature (67)..(482): Homolog of NCBI NO: 2190549 NR Description: F5I14.17 gene product [Arabidopsis thaliana]
  misc_feature (483)..(577): Homolog of NCBI NO: 9279653 NR Description: gb|AAF23847.1~gene_id:MDC8.17~strong similarity
  misc_feature (6)..(451): Homolog of NCBI NO: 9279653 NR Description: gb|AAF23847.1~gene_id:MDC8.17~strong similarity
  misc_feature (487)..(577): Homolog of NCBI NO: 18401167 NR Description: DegP protease [Arabidopsis thaliana]
  misc_feature (6)..(451): Homolog of NCBI NO: 18401167 NR Description: DegP protease [Arabidopsis thaliana]
  misc_feature (479)..(575): Homolog of NCBI NO: 9758082 NR Description: contains similarity to serine
  misc_feature (75)..(450): Homolog of NCBI NO: 9758082 NR Description: contains similarity to serine
  misc_feature (67)..(569): Homolog of NCBI NO: 18408329 NR Description: DegP protease [Arabidopsis thaliana]
  misc_feature (58)..(574): Homolog of NCBI NO: 18408327 NR Description: DegP protease [Arabidopsis thaliana]
  misc_feature (1)..(586): Homolog of NCBI NO: 18421592 NR Description: DegP protease [Arabidopsis thaliana]
MLLRSFRTVELLRRISTSSVSGYRTSPSLLQRCNGFQTYLPHRVTTTESPFPSHISRFCSSQSANSQNENRHTTLSSPVSSRRVNNRKISRRRKAGKSLSISPAADAVDLALDSVVKIFTVSTSPSYFLPWQNKSQRESMGSGFVISGRKIITNAHVVADHSFVLVRKHGSSIKHRAEVQAVGHECDLAILVVDSEVFWEGMNALELGDIPFLQEAVAVVGYPQGGDNISVTKGVVSRVEPTQYVHGATQLMAIQIDAAINPGNSGGPAIMGNKVAGVAFQNLSGAENIGYIIPTPVIKHFINGVEECGKYIGFCSMGVSCQPMENGELRSGFQMSSEMTGVLVSKINPLSDAHKILKKDDVLLAFDGVPIANDGTVPFRNRERITFDHLVSMKKPDETALVKVLREGKEHEFSITLRPLQPLVPVHQFDQLPSYYIFAGFVFVPLTQPYLHEYGEDWYNTSPRTLCHRALKDLPKKAGQQLVIVSQVLMDDINTGYERLAELQVNKVNGVEVNNLRHLCQLIENCNTEKLRIDLDDESRVIVLNYQSAKIATSLILKRHRIASAISSDLLIEQNLETELASCSAV

SEQ ID NO: 46883 - protein, 447 aa, Arabidopsis thaliana
  peptide (1)..(447): Ceres Seq. ID no. 13646968
  misc_feature (1)..(163): Pfam Name: Trypsin Pfam Description: Trypsin
  misc_feature (1)..(343): Homolog of NCBI NO: 2190549 NR Description: F5I14.17 gene product [Arabidopsis thaliana]
  misc_feature (344)..(438): Homolog of NCBI NO: 9279653 NR Description: gb|AAF23847.1~gene_id:MDC8.17~strong similarity
  misc_feature (1)..(312): Homolog of NCBI NO: 9279653 NR Description: gb|AAF23847.1~gene_id:MDC8.17~strong similarity
  misc_feature (348)..(438): Homolog of NCBI NO: 18401167 NR Description: DegP protease [Arabidopsis thaliana]
  misc_feature (1)..(312): Homolog of NCBI NO: 18401167 NR Description: DegP protease [Arabidopsis thaliana]
  misc_feature (340)..(436): Homolog of NCBI NO: 9758082 NR Description: contains similarity to serine
  misc_feature (1)..(311): Homolog of NCBI NO: 9758082 NR Description: contains similarity to serine
  misc_feature (1)..(430): Homolog of NCBI NO: 18408329 NR Description: DegP protease [Arabidopsis thaliana]
  misc_feature (1)..(435): Homolog of NCBI NO: 18408327 NR Description: DegP protease [Arabidopsis thaliana]
  misc_feature (1)..(447): Homolog of NCBI NO: 18421592 NR Description: DegP protease [Arabidopsis thaliana]
MGSGFVISGRKIITNAHVVADHSFVLVRKHGSSIKHRAEVQAVGHECDLAILVVDSEVFWEGMNALELGDIPFLQEAVAVVGYPQGGDNISVTKGVVSRVEPTQYVHGATQLMAIQIDAAINPGNSGGPAIMGNKVAGVAFQNLSGAENIGYIIPTPVIKHFINGVEECGKYIGFCSMGVSCQPMENGELRSGFQMSSEMTGVLVSKINPLSDAHKILKKDDVLLAFDGVPIANDGTVPFRNRERITFDHLVSMKKPDETALVKVLREGKEHEFSITLRPLQPLVPVHQFDQLPSYYIFAGFVFVPLTQPYLHEYGEDWYNTSPRTLCHRALKDLPKKAGQQLVIVSQVLMDDINTGYERLAELQVNKVNGVEVNNLRHLCQLIENCNTEKLRIDLDDESRVIVLNYQSAKIATSLILKRHRIASAISSDLLIEQNLETELASCSAV

SEQ ID NO: 46884 - DNA, 2395 bp, Arabidopsis thaliana
  misc_feature (1)..(2395): Ceres Seq. ID no. 13647202
  misc_feature: MA Experiment ID: 20000173 Result: Down-regulated in Transcription
  misc_feature: MA Experiment 20000173 PARAMETER Experiment Name: At_42deg_Heat_P Parameter: Age (day) Value: 14
  misc_feature: MA Experiment 20000173 PARAMETER Experiment Name: At_42deg_Heat_P Parameter: Organism Value: A. thaliana
  misc_feature: MA Experiment 20000173 PARAMETER Experiment Name: At_42deg_Heat_P Parameter: Plant Line Value: WS
  misc_feature: MA Experiment 20000173 PARAMETER Experiment Name: At_42deg_Heat_P Parameter: Temperature (deg C) Value: 42 vs. 22
  misc_feature: MA Experiment 20000173 PARAMETER Experiment Name: At_42deg_Heat_P Parameter: Timepoint (hr) Value: 6
  misc_feature: MA Experiment 20000173 PARAMETER Experiment Name: At_42deg_Heat_P Parameter: Tissue Value: Aerial
  misc_feature: MA Experiment ID: 20000184 Result: Down-regulated in Transcription
  misc_feature: MA Experiment 20000184 PARAMETER Experiment Name: At_Shoots__P Parameter: Age (day) Value: 7
  misc_feature: MA Experiment 20000184 PARAMETER Experiment Name: At_Shoots__P Parameter: Tissue Value: Shoots vs. Whole Plant
  misc_feature: MA Experiment ID: 20000437 Result: Up-regulated in Transcription
  misc_feature: MA Experiment 20000437 PARAMETER Experiment Name: At_Drought_P Parameter: Age (day) Value: 8
  misc_feature: MA Experiment 20000437 PARAMETER Experiment Name: At_Drought_P Parameter: Organism Value: A. thaliana
  misc_feature: MA Experiment 20000437 PARAMETER Experiment Name: At_Drought_P Parameter: Plant Line Value: WS
  misc_feature: MA Experiment 20000437 PARAMETER Experiment Name: At_Drought_P Parameter: Timepoint (hr) Value: 24
  misc_feature: MA Experiment 20000437 PARAMETER Experiment Name: At_Drought_P Parameter: Tissue Value: Whole Plant
  misc_feature: MA Experiment 20000437 PARAMETER Experiment Name: At_Drought_P Parameter: Treatment Value: Drought vs. No Drought
  misc_feature: MA Experiment ID: 20001247 Result: Up-regulated in Transcription
  misc_feature: MA Experiment 20001247 PARAMETER Experiment Name: At_Far-red-induction_P Parameter: Age (day) Value: 7
  misc_feature: MA Experiment 20001247 PARAMETER Experiment Name: At_Far-red-induction_P Parameter: Light Value: Far-red vs. White
  misc_feature: MA Experiment 20001247 PARAMETER Experiment Name: At_Far-red-induction_P Parameter: Organism Value: A. thaliana
  misc_feature: MA Experiment 20001247 PARAMETER Experiment Name: At_Far-red-induction_P Parameter: Plant Line Value: Columbia
  misc_feature: MA Experiment 20001247 PARAMETER Experiment Name: At_Far-red-induction_P Parameter: Timepoint (hr) Value: 1
  misc_feature: MA Experiment 20001247 PARAMETER Experiment Name: At_Far-red-induction_P Parameter: Tissue Value: Whole Plant
  misc_feature: MA Experiment ID: 20001451 Result: Down-regulated in Transcription
  misc_feature: MA Experiment 20001451 PARAMETER Experiment Name: At_Far-red-induction_P Parameter: Age (day) Value: 7
  misc_feature: MA Experiment 20001451 PARAMETER Experiment Name: At_Far-red-induction_P Parameter: Light Value: Far-red vs. White
  misc_feature: MA Experiment 20001451 PARAMETER Experiment Name: At_Far-red-induction_P Parameter: Organism Value: A. thaliana
  misc_feature: MA Experiment 20001451 PARAMETER Experiment Name: At_Far-red-induction_P Parameter: Plant Line Value: Columbia
  misc_feature: MA Experiment 20001451 PARAMETER Experiment Name: At_Far-red-induction_P Parameter: Timepoint (hr) Value: 24
  misc_feature: MA Experiment 20001451 PARAMETER Experiment Name: At_Far-red-induction_P Parameter: Tissue Value: Whole Plant
  misc_feature: MA Experiment ID: 20001911 Result: Up-regulated in Transcription
  misc_feature: MA Experiment 20001911 PARAMETER Experiment Name: At_Drought_Reproduction_P Parameter: Age (day) Value: 40
  misc_feature: MA Experiment 20001911 PARAMETER Experiment Name: At_Drought_Reproduction_P Parameter: Organism Value: A. thaliana
  misc_feature: MA Experiment 20001911 PARAMETER Experiment Name: At_Drought_Reproduction_P Parameter: Plant Line Value: WS
  misc_feature: MA Experiment 20001911 PARAMETER Experiment Name: At_Drought_Reproduction_P Parameter: Timepoint (day) Value: 10
  misc_feature: MA Experiment 20001911 PARAMETER Experiment Name: At_Drought_Reproduction_P Parameter: Tissue Value: Flowers
  misc_feature: MA Experiment 20001911 PARAMETER Experiment Name: At_Drought_Reproduction_P Parameter: Treatment Value: Drought vs. No Drought
ggaaaaaggtcgcaacttgttgtgtctctctttctccaactaccctttcgagcttagctgtccactcttctctcccgatgaaatcttcatctttcgtatctctcctccttctcatgccctaaatttcatctcctctcttgtattgattctgttaaaaatctcacctttcaattcaaaaccccttccatttttgtgattaatatgcctacttggtggggaagaaagtcctgcaagaacaaggacgataatcacagaggaatcatctccacagatagagatatcaagagctctgctgttgttgttgatcctcctctcactcctactcgtggtggtacacctcgttgcagtcgtgaattcgctggagcttcttctgctttctctggttttgactctgattctaccgagaagaaaggtcaccctcttcctcgtcctttgctctctcctgtttcgatccatcatcaagatcatgtaagcggatccacttctggatctacatctgtttctagcgttagctcatctggatcagctgatgatcagagtcaacttgttgcttctaggggtcgtggtgatgtgaaattcaatgtagcagcagcaccacgtagtcctgagagagtttctccaaaggcagctactattactactaggcccacgtctccacggcatcagcgtttgtctggagttgtgagcttagagtcttctacagggaggaatgatgatggaaggtcctcctctgagtgtcatcctttgcctcgaccacctacttctcctacaagcccttctgctgtgcatggttccaggattggaggaggctacgagacctctccttcggggttttccacgtggaaaaaagggaaatttcttgggagtggcacctttggtcaagtctatcttggtttcaacagtgagaaagggaaaatgtgtgctattaaagaggtcaaggtcatttctgacgatcaaacatcaaaagaatgtctgaagcaactaaatcaggagataaatttgcttaaccagctttgtcatccgaatattgtccagtattacggaagtgaactgagtgaagaaaccttgtccgtctacttggagtacgtgtcaggtggttcaatccataaactacttaaggattatggttctttcactgaacccgttatccaaaactacacgcggcagattcttgctgggcttgcctatttacatggacgaaatacagtacatagggacatcaaaggagcaaatatattagtggatccgaatggtgaaatcaagttggcagactttgggatggccaaacatgtaacagccttttctactatgctttcttttaaagggagtccttactggatggcacccgaggttgtgatgagccaaaatggctacactcatgcagtcgatatctggagtttgggttgtactattctggaaatggcaacatcaaagccaccttggagccagtttgaaggggttgctgcgattttcaaaatcggaaacagtaaagacaccccggaaatacctgatcacctttcaaatgatgcaaagaattttataaggctttgtctgcaacgaaatccgacagtacgtcctacagcttctcagcttctagaacacccttttctacgtaacacaacaagagtggctagtactagtttgcccaaagacttccccccacgttcctatgatggaaacttctcactgcagcctacaagggaaccctatccagggagactgagccatgataattatgcaaaacagccattgtctagaactataaagagcccgagcagagaaaacgtaagagctatcacatccttaccagtatctccatgttcaagccctttacgccaacttgggccagcatacaaaagttgtttcctgtcacctcctcacccgtcttacgcatttcctgggcaagacagtgggtacaacctagcagagtttgctgcaagccctttcaggatgaagaaagacgcaatgatggaaccatctagtttcaggactcaaacaccgaattcaccattgagatcaagactggtgtagaaatggagcaaagattgagagactgaaagccacatactataaacaaggcccaatgaccatgtataaaacagtgtctacccctagttttggccttctccttctcaacacccagggaaatatgaagttatgagaccttagttgtgtgtgtgtggagcatctcctagaagtggagatttttggaacaagaaggagaaatttggggggaaaacagaaagatgtaaagagaaacatgaaaatgaatacaaagtttatagagtgtgagaagtatagatagtaagttgtgttgtcacacaaagataatattcaaccatttgttttcaacctacagtgtgaatatacttttcagaaagtaaattagttactc

SEQ ID NO: 46885 - protein, 609 aa, Arabidopsis thaliana
  peptide (1)..(609): Ceres Seq. ID no. 13647203
  misc_feature (214)..(470): Pfam Name: Protein kinase domain Pfam Description: Protein kinase domain
  misc_feature (53)..(480): Homolog of NCBI NO: 18425121 NR Description: MAP protein kinase [Arabidopsis thaliana]
  misc_feature (57)..(472): Homolog of NCBI NO: 38049268 NR Description: YDA [Arabidopsis thaliana]
  misc_feature (57)..(472): Homolog of NCBI NO: 15222512 NR Description: protein kinase, putative [Arabidopsis thaliana]
  misc_feature (93)..(607): Homolog of NCBI NO: 38345839 NR Description: OSJNBa0084K11.3 [Oryza sativa (japonica
  misc_feature (110)..(605): Homolog of NCBI NO: 38344069 NR Description: OSJNBa0006B20.13 [Oryza sativa (japonica
  misc_feature (42)..(112): Homolog of NCBI NO: 6979343 NR Description: similar to mitogen-activated protein kinases
  misc_feature (149)..(605): Homolog of NCBI NO: 6979343 NR Description: similar to mitogen-activated protein kinases
  misc_feature (1)..(609): Homolog of NCBI NO: 3688193 NR Description: MAP3K alpha 1 protein kinase [Brassica napus]
  misc_feature (373)..(609): Homolog of NCBI NO: 11358501 NR Description: MAP3K alpha protein kinase (EC 2.7.1.-)
  misc_feature (1)..(346): Homolog of NCBI NO: 11358501 NR Description: MAP3K alpha protein kinase (EC 2.7.1.-)
MPTWWGRKSCKNKDDNHRGIISTDRDIKSSAVVVDPPLTPTRGGTPRCSREFAGASSAFSGFDSDSTEKKGHPLPRPLLSPVSIHHQDHVSGSTSGSTSVSSVSSSGSADDQSQLVASRGRGDVKFNVAAAPRSPERVSPKAATITTRPTSPRHQRLSGVVSLESSTGRNDDGRSSSECHPLPRPPTSPTSPSAVHGSRIGGGYETSPSGFSTWKKGKFLGSGTFGQVYLGFNSEKGKMCAIKEVKVISDDQTSKECLKQLNQEINLLNQLCHPNIVQYYGSELSEETLSVYLEYVSGGSIHKLLKDYGSFTEPVIQNYTRQILAGLAYLHGRNTVHRDIKGANILVDPNGEIKLADFGMAKHVTAFSTMLSFKGSPYWMAPEVVMSQNGYTHAVDIWSLGCTILEMATSKPPWSQFEGVAAIFKIGNSKDTPEIPDHLSNDAKNFIRLCLQRNPTVRPTASQLLEHPFLRNTTRVASTSLPKDFPPRSYDGNFSLQPTREPYPGRLSHDNYAKQPLSRTIKSPSRENVRAITSLPVSPCSSPLRQLGPAYKSCFLSPPHPSYAFPGQDSGYNLAEFAASPFRMKKDAMMEPSSFRTQTPNSPLRSRLV

SEQ ID NO: 46886 - protein, 371 aa, Arabidopsis thaliana
  peptide (1)..(371): Ceres Seq. ID no. 13647204
  misc_feature (1)..(232): Pfam Name: Protein kinase domain Pfam Description: Protein kinase domain
  misc_feature (1)..(242): Homolog of NCBI NO: 15982852 NR Description: AT5g66850/MUD21_11 [Arabidopsis thaliana]
  misc_feature (1)..(242): Homolog of NCBI NO: 18425121 NR Description: MAP protein kinase [Arabidopsis thaliana]
  misc_feature (1)..(234): Homolog of NCBI NO: 38049268 NR Description: YDA [Arabidopsis thaliana]
  misc_feature (1)..(234): Homolog of NCBI NO: 15222512 NR Description: protein kinase, putative [Arabidopsis thaliana]
  misc_feature (1)..(369): Homolog of NCBI NO: 38345839 NR Description: OSJNBa0084K11.3 [Oryza sativa (japonica
  misc_feature (1)..(367): Homolog of NCBI NO: 38344069 NR Description: OSJNBa0006B20.13 [Oryza sativa (japonica
  misc_feature (1)..(367): Homolog of NCBI NO: 6979343 NR Description: similar to mitogen-activated protein kinases
  misc_feature (1)..(371): Homolog of NCBI NO: 3688193 NR Description: MAP3K alpha 1 protein kinase [Brassica napus]
  misc_feature (135)..(371): Homolog of NCBI NO: 11358501 NR Description: MAP3K alpha protein kinase (EC 2.7.1.-)
  misc_feature (1)..(108): Homolog of NCBI NO: 11358501 NR Description: MAP3K alpha protein kinase (EC 2.7.1.-)
MCAIKEVKVISDDQTSKECLKQLNQEINLLNQLCHPNIVQYYGSELSEETLSVYLEYVSGGSIHKLLKDYGSFTEPVIQNYTRQILAGLAYLHGRNTVHRDIKGANILVDPNGEIKLADFGMAKHVTAFSTMLSFKGSPYWMAPEVVMSQNGYTHAVDIWSLGCTILEMATSKPPWSQFEGVAAIFKIGNSKDTPEIPDHLSNDAKNFIRLCLQRNPTVRPTASQLLEHPFLRNTTRVASTSLPKDFPPRSYDGNFSLQPTREPYPGRLSHDNYAKQPLSRTIKSPSRENVRAITSLPVSPCSSPLRQLGPAYKSCFLSPPHPSYAFPGQDSGYNLAEFAASPFRMKKDAMMEPSSFRTQTPNSPLRSRLV

SEQ ID NO: 46887 - DNA, 902 bp, Arabidopsis thaliana
  misc_feature (1)..(902): Ceres Seq. ID no. 12574797
  misc_feature: MA Experiment ID: 20000171 Result: Down-regulated in Transcription
  misc_feature: MA Experiment 20000171 PARAMETER Experiment Name: At_42deg_Heat_P Parameter: Age (day) Value: 14
  misc_feature: MA Experiment 20000171 PARAMETER Experiment Name: At_42deg_Heat_P Parameter: Organism Value: A. thaliana
  misc_feature: MA Experiment 20000171 PARAMETER Experiment Name: At_42deg_Heat_P Parameter: Plant Line Value: WS
  misc_feature: MA Experiment 20000171 PARAMETER Experiment Name: At_42deg_Heat_P Parameter: Temperature (deg C) Value: 42 vs. 22
  misc_feature: MA Experiment 20000171 PARAMETER Experiment Name: At_42deg_Heat_P Parameter: Timepoint (hr) Value: 1
  misc_feature: MA Experiment 20000171 PARAMETER Experiment Name: At_42deg_Heat_P Parameter: Tissue Value: Aerial
  misc_feature: MA Experiment ID: 20000173 Result: Down-regulated in Transcription
  misc_feature: MA Experiment 20000173 PARAMETER Experiment Name: At_42deg_Heat_P Parameter: Age (day) Value: 14
  misc_feature: MA Experiment 20000173 PARAMETER Experiment Name: At_42deg_Heat_P Parameter: Organism Value: A. thaliana
  misc_feature: MA Experiment 20000173 PARAMETER Experiment Name: At_42deg_Heat_P Parameter: Plant Line Value: WS
  misc_feature: MA Experiment 20000173 PARAMETER Experiment Name: At_42deg_Heat_P Parameter: Temperature (deg C) Value: 42 vs. 22
  misc_feature: MA Experiment 20000173 PARAMETER Experiment Name: At_42deg_Heat_P Parameter: Timepoint (hr) Value: 6
  misc_feature: MA Experiment 20000173 PARAMETER Experiment Name: At_42deg_Heat_P Parameter: Tissue Value: Aerial
  misc_feature: MA Experiment ID: 20000185 Result: Up-regulated in Transcription
  misc_feature: MA Experiment 20000185 PARAMETER Experiment Name: At_Roots__P Parameter: Age (day) Value: 7 vs. 21
  misc_feature: MA Experiment 20000185 PARAMETER Experiment Name: At_Roots__P Parameter: Organism Value: A. thaliana
  misc_feature: MA Experiment 20000185 PARAMETER Experiment Name: At_Roots__P Parameter: Tissue Value: Roots vs. Whole Plant
  misc_feature: MA Experiment ID: 20000234 Result: Down-regulated in Transcription
  misc_feature: MA Experiment 20000234 PARAMETER Experiment Name: At_Siliques_P Parameter: Age (day) Value: 21
  misc_feature: MA Experiment 20000234 PARAMETER Experiment Name: At_Siliques_P Parameter: Organism Value: A. thaliana
  misc_feature: MA Experiment 20000234 PARAMETER Experiment Name: At_Siliques_P Parameter: Plant Line Value: WS
  misc_feature: MA Experiment 20000234 PARAMETER Experiment Name: At_Siliques_P Parameter: Tissue Value: Less Than 5mm Siliques vs. Whole Plant
  misc_feature: MA Experiment ID: 20000235 Result: Down-regulated in Transcription
  misc_feature: MA Experiment 20000235 PARAMETER Experiment Name: At_Siliques_P Parameter: Age (day) Value: 21
  misc_feature: MA Experiment 20000235 PARAMETER Experiment Name: At_Siliques_P Parameter: Organism Value: A. thaliana
  misc_feature: MA Experiment 20000235 PARAMETER Experiment Name: At_Siliques_P Parameter: Plant Line Value: WS
  misc_feature: MA Experiment 20000235 PARAMETER Experiment Name: At_Siliques_P Parameter: Tissue Value: 5-10mm Siliques vs. Whole Plant
  misc_feature: MA Experiment ID: 20000264 Result: Down-regulated in Transcription
  misc_feature: MA Experiment 20000264 PARAMETER Experiment Name: At_Open_Flower_P Parameter: Age (day) Value: 21
  misc_feature: MA Experiment 20000264 PARAMETER Experiment Name: At_Open_Flower_P Parameter: Plant Line Value: WS
  misc_feature: MA Experiment 20000264 PARAMETER Experiment Name: At_Open_Flower_P Parameter: Tissue Value: Open Flower vs. Whole Plant
  misc_feature: MA Experiment ID: 20000265 Result: Down-regulated in Transcription
  misc_feature: MA Experiment 20000265 PARAMETER Experiment Name: At_Open_Flower_P Parameter: Age (day) Value: 21
  misc_feature: MA Experiment 20000265 PARAMETER Experiment Name: At_Open_Flower_P Parameter: Plant Line Value: WS
  misc_feature: MA Experiment 20000265 PARAMETER Experiment Name: At_Open_Flower_P Parameter: Tissue Value: Closed Flower vs. Whole Plant
  misc_feature: MA Experiment ID: 20000286 Result: Down-regulated in Transcription
  misc_feature: MA Experiment 20000286 PARAMETER Experiment Name: At_Open_Flower_P Parameter: Age (day) Value: 21
  misc_feature: MA Experiment 20000286 PARAMETER Experiment Name: At_Open_Flower_P Parameter: Plant Line Value: WS
  misc_feature: MA Experiment 20000286 PARAMETER Experiment Name: At_Open_Flower_P Parameter: Tissue Value: Half Open vs. Whole Plant
  misc_feature: MA Experiment ID: 20000439 Result: Up-regulated in Transcription
  misc_feature: MA Experiment 20000439 PARAMETER Experiment Name: At_Roots__P Parameter: Age (day) Value: 14 vs. 21
  misc_feature: MA Experiment 20000439 PARAMETER Experiment Name: At_Roots__P Parameter: Organism Value: A. thaliana
  misc_feature: MA Experiment 20000439 PARAMETER Experiment Name: At_Roots__P Parameter: Tissue Value: Roots vs. Whole Plant
  misc_feature: MA Experiment ID: 20000794 Result: Down-regulated in Transcription
  misc_feature: MA Experiment 20000794 PARAMETER Experiment Name: At_Petals_P Parameter: Age (day) Value: 23-25 days
  misc_feature: MA Experiment 20000794 PARAMETER Experiment Name: At_Petals_P Parameter: Plant Line Value: WS
  misc_feature: MA Experiment 20000794 PARAMETER Experiment Name: At_Petals_P Parameter: Tissue Value: Petals vs. Whole plant
  misc_feature: MA Experiment ID: 20001248 Result: Down-regulated in Transcription
  misc_feature: MA Experiment 20001248 PARAMETER Experiment Name: At_Far-red-induction_P Parameter: Age (day) Value: 7
  misc_feature: MA Experiment 20001248 PARAMETER Experiment Name: At_Far-red-induction_P Parameter: Light Value: Far-red vs. White
  misc_feature: MA Experiment 20001248 PARAMETER Experiment Name: At_Far-red-induction_P Parameter: Organism Value: A. thaliana
  misc_feature: MA Experiment 20001248 PARAMETER Experiment Name: At_Far-red-induction_P Parameter: Plant Line Value: Columbia
  misc_feature: MA Experiment 20001248 PARAMETER Experiment Name: At_Far-red-induction_P Parameter: Timepoint (hr) Value: 4
  misc_feature: MA Experiment 20001248 PARAMETER Experiment Name: At_Far-red-induction_P Parameter: Tissue Value: Whole Plant
  misc_feature: MA Experiment ID: 20001560 Result: Down-regulated in Transcription
  misc_feature: MA Experiment 20001560 PARAMETER Experiment Name: At_Drought_Soil_Dry_P Parameter: Age (day) Value: 28
  misc_feature: MA Experiment 20001560 PARAMETER Experiment Name: At_Drought_Soil_Dry_P Parameter: Organism Value: A. thaliana
  misc_feature: MA Experiment 20001560 PARAMETER Experiment Name: At_Drought_Soil_Dry_P Parameter: Plant Line Value: WS
  misc_feature: MA Experiment 20001560 PARAMETER Experiment Name: At_Drought_Soil_Dry_P Parameter: Post Timepoint (hr) Value: None
  misc_feature: MA Experiment 20001560 PARAMETER Experiment Name: At_Drought_Soil_Dry_P Parameter: Post-Treatment Value: None
  misc_feature: MA Experiment 20001560 PARAMETER Experiment Name: At_Drought_Soil_Dry_P Parameter: Timepoint (day) Value: 14
  misc_feature: MA Experiment 20001560 PARAMETER Experiment Name: At_Drought_Soil_Dry_P Parameter: Treatment Value: Drought vs. No Drought
  misc_feature: MA Experiment ID: 20001906 Result: Up-regulated in Transcription
  misc_feature: MA Experiment 20001906 PARAMETER Experiment Name: At_Drought_Reproduction_P Parameter: Age (day) Value: 35
  misc_feature: MA Experiment 20001906 PARAMETER Experiment Name: At_Drought_Reproduction_P Parameter: Organism Value: A. thaliana
  misc_feature: MA Experiment 20001906 PARAMETER Experiment Name: At_Drought_Reproduction_P Parameter: Plant Line Value: WS
  misc_feature: MA Experiment 20001906 PARAMETER Experiment Name: At_Drought_Reproduction_P Parameter: Timepoint (day) Value: 5
  misc_feature: MA Experiment 20001906 PARAMETER Experiment Name: At_Drought_Reproduction_P Parameter: Tissue Value: Siliques
  misc_feature: MA Experiment 20001906 PARAMETER Experiment Name: At_Drought_Reproduction_P Parameter: Treatment Value: Drought vs. No Drought
  misc_feature: MA Experiment ID: 20001908 Result: Up-regulated in Transcription
  misc_feature: MA Experiment 20001908 PARAMETER Experiment Name: At_Drought_Reproduction_P Parameter: Age (day) Value: 40
  misc_feature: MA Experiment 20001908 PARAMETER Experiment Name: At_Drought_Reproduction_P Parameter: Organism Value: A. thaliana
  misc_feature: MA Experiment 20001908 PARAMETER Experiment Name: At_Drought_Reproduction_P Parameter: Plant Line Value: WS
  misc_feature: MA Experiment 20001908 PARAMETER Experiment Name: At_Drought_Reproduction_P Parameter: Timepoint (day) Value: 10
  misc_feature: MA Experiment 20001908 PARAMETER Experiment Name: At_Drought_Reproduction_P Parameter: Tissue Value: Siliques
  misc_feature: MA Experiment 20001908 PARAMETER Experiment Name: At_Drought_Reproduction_P Parameter: Treatment Value: Drought vs. No Drought
  misc_feature: MA Experiment ID: 20001911 Result: Up-regulated in Transcription
  misc_feature: MA Experiment 20001911 PARAMETER Experiment Name: At_Drought_Reproduction_P Parameter: Age (day) Value: 40
  misc_feature: MA Experiment 20001911 PARAMETER Experiment Name: At_Drought_Reproduction_P Parameter: Organism Value: A. thaliana
  misc_feature: MA Experiment 20001911 PARAMETER Experiment Name: At_Drought_Reproduction_P Parameter: Plant Line Value: WS
  misc_feature: MA Experiment 20001911 PARAMETER Experiment Name: At_Drought_Reproduction_P Parameter: Timepoint (day) Value: 10
  misc_feature: MA Experiment 20001911 PARAMETER Experiment Name: At_Drought_Reproduction_P Parameter: Tissue Value: Flowers
  misc_feature: MA Experiment 20001911 PARAMETER Experiment Name: At_Drought_Reproduction_P Parameter: Treatment Value: Drought vs. No Drought
acaccgcactctcttcttcttcttcttcttcctctctgttttttctctctctttgtttggaaccaccatggataatgtcaaacttgttaagaatggtgttttgagattgccacctggattcagattccatcctactgatgaagaacttgtggttcaataccttaagaggaaagtttgttcttctcctttgccagcttcaatcatccctgagtttgatgtttgcagagctgatccttgggatttacctggcaatttggagaaagagaggtacttctttagcacaagggaagctaaatacccaaatgggaaccggtctaaccgggcaactgggtctggttattggaaagctaccggtattgataaacgggttgtgacctctagaggaaatcaaatcgttggtttgaagaaaactcttgtcttctacaaaggcaaaccacctcatggctcaagaaccgattggatcatgcacgaatatcgcctctcttcttctcctccgagttctatgggtcccactcagaactgggtactctgtcgtatcttcttgaagaaaagagccggtaacaagaacgacgacgacgacggagatagccgtaatcttagacataataataataacaattcgagtgaccaaattgagataattacaacagaccaaacagatgataaaacaaaaccaatcttctttgatttcatgagaaaagaaagaacaacagatttgaaccttttgccgagctctccttcttccgatcatgcttcaagtggagtcacgacggagatcttctcttcttccgatgaagagaccagtagttgcaatagtttcagatgaaatctttaatttaattttaatgttgactatcttaataagttattatagttttatattaatacgactctctttcctt

SEQ ID NO: 46888 - protein, 274 aa, Arabidopsis thaliana
  peptide (1)..(274): Ceres Seq. ID no. 12574798
  misc_feature (36)..(161): Pfam Name: No apical meristem (NAM) protein Pfam Description: No apical meristem (NAM) protein
  misc_feature (29)..(194): Homolog of NCBI NO: 21593134 NR Description: GRAB1-like protein [Arabidopsis thaliana]
  misc_feature (28)..(194): Homolog of NCBI NO: 15223963 NR Description: GRAB1-like protein
  misc_feature (36)..(208): Homolog of NCBI NO: 15218843 NR Description: jasmonic acid, putative; protein id: At1g65910.1
  misc_feature (34)..(222): Homolog of NCBI NO: 6175246 NR Description: jasmonic acid 2 [Lycopersicon esculentum]
  misc_feature (36)..(186): Homolog of NCBI NO: 15148914 NR Description: NAC domain protein NAC2 [Phaseolus vulgaris]
  misc_feature (36)..(224): Homolog of NCBI NO: 6223651 NR Description: NAM-like protein (no apical meristem)
  misc_feature (36)..(195): Homolog of NCBI NO: 15232606 NR Description: putative jasmonic acid regulatory protein
  misc_feature (23)..(273): Homolog of NCBI NO: 7489024 NR Description: hypothetical protein SENU5, senescence
  misc_feature (23)..(269): Homolog of NCBI NO: 15226119 NR Description: putative NAM (no apical meristem)-like protein
  misc_feature (23)..(274): Homolog of NCBI NO: 15240042 NR Description: NAM-like protein
HRTLFFFFFFLSVFSLSLFGTTMDNVKLVKNGVLRLPPGFRFHPTDEELVVQYLKRKVCSSPLPASIIPEFDVCRADPWDLPGNLEKERYFFSTREAKYPNGNRSNRATGSGYWKATGIDKRVVTSRGNQIVGLKKTLVFYKGKPPHGSRTDWIMHEYRLSSSPPSSMGPTQNWVLCRIFLKKRAGNKNDDDDGDSRNLRHNNNNNSSDQIEIITTDQTDDKTKPIFFDFMRKERTTDLNLLPSSPSSDHASSGVTTEIFSSSDEETSSCNSFR

SEQ ID NO: 46889 - protein, 252 aa, Arabidopsis thaliana
  peptide (1)..(252): Ceres Seq. ID no. 12574799
  misc_feature (14)..(139): Pfam Name: No apical meristem (NAM) protein Pfam Description: No apical meristem (NAM) protein
  misc_feature (7)..(172): Homolog of NCBI NO: 21593134 NR Description: GRAB1-like protein [Arabidopsis thaliana]
  misc_feature (6)..(172): Homolog of NCBI NO: 15223963 NR Description: GRAB1-like protein
  misc_feature (14)..(186): Homolog of NCBI NO: 15218843 NR Description: jasmonic acid, putative; protein id: At1g65910.1
  misc_feature (12)..(200): Homolog of NCBI NO: 6175246 NR Description: jasmonic acid 2 [Lycopersicon esculentum]
  misc_feature (14)..(164): Homolog of NCBI NO: 15148914 NR Description: NAC domain protein NAC2 [Phaseolus vulgaris]
  misc_feature (14)..(202): Homolog of NCBI NO: 6223651 NR Description: NAM-like protein (no apical meristem)
  misc_feature (14)..(173): Homolog of NCBI NO: 15232606 NR Description: putative jasmonic acid regulatory protein
  misc_feature (1)..(251): Homolog of NCBI NO: 7489024 NR Description: hypothetical protein SENU5, senescence
  misc_feature (1)..(247): Homolog of NCBI NO: 15226119 NR Description: putative NAM (no apical meristem)-like protein
  misc_feature (1)..(252): Homolog of NCBI NO: 15240042 NR Description: NAM-like protein
MDNVKLVKNGVLRLPPGFRFHPTDEELVVQYLKRKVCSSPLPASIIPEFDVCRADPWDLPGNLEKERYFFSTREAKYPNGNRSNRATGSGYWKATGIDKRVVTSRGNQIVGLKKTLVFYKGKPPHGSRTDWIMHEYRLSSSPPSSMGPTQNWVLCRIFLKKRAGNKNDDDDGDSRNLRHNNNNNSSDQIEIITTDQTDDKTKPIFFDFMRKERTTDLNLLPSSPSSDHASSGVTTEIFSSSDEETSSCNSFR

SEQ ID NO: 46890 - DNA, 1755 bp, Arabidopsis thaliana
  misc_feature (1)..(1755): Ceres Seq. ID no. 15168981
  misc_feature: MA Experiment ID: 20000173 Result: Down-regulated in Transcription
  misc_feature: MA Experiment 20000173 PARAMETER Experiment Name: At_42deg_Heat_P Parameter: Age (day) Value: 14
  misc_feature: MA Experiment 20000173 PARAMETER Experiment Name: At_42deg_Heat_P Parameter: Organism Value: A. thaliana
  misc_feature: MA Experiment 20000173 PARAMETER Experiment Name: At_42deg_Heat_P Parameter: Plant Line Value: WS
  misc_feature: MA Experiment 20000173 PARAMETER Experiment Name: At_42deg_Heat_P Parameter: Temperature (deg C) Value: 42 vs. 22
  misc_feature: MA Experiment 20000173 PARAMETER Experiment Name: At_42deg_Heat_P Parameter: Timepoint (hr) Value: 6
  misc_feature: MA Experiment 20000173 PARAMETER Experiment Name: At_42deg_Heat_P Parameter: Tissue Value: Aerial
  misc_feature: MA Experiment ID: 20000180 Result: Up-regulated in Transcription
  misc_feature: MA Experiment 20000180 PARAMETER Experiment Name: At_Germinating_Seeds_P Parameter: Age (hr) Value: 24 vs. 0
  misc_feature: MA Experiment 20000180 PARAMETER Experiment Name: At_Germinating_Seeds_P Parameter: Tissue Value: Germinating Seeds
  misc_feature: MA Experiment ID: 20000182 Result: Down-regulated in Transcription
  misc_feature: MA Experiment 20000182 PARAMETER Experiment Name: At_2mM_SA_P Parameter: Age (day) Value: 14
  misc_feature: MA Experiment 20000182 PARAMETER Experiment Name: At_2mM_SA_P Parameter: Organism Value: A. thaliana
  misc_feature: MA Experiment 20000182 PARAMETER Experiment Name: At_2mM_SA_P Parameter: Plant Line Value: WS
  misc_feature: MA Experiment 20000182 PARAMETER Experiment Name: At_2mM_SA_P Parameter: Timepoint (hr) Value: 6
  misc_feature: MA Experiment 20000182 PARAMETER Experiment Name: At_2mM_SA_P Parameter: Tissue Value: Aerial
  misc_feature: MA Experiment 20000182 PARAMETER Experiment Name: At_2mM_SA_P Parameter: Treatment Value: 2mM SA vs. No Treatment
  misc_feature: MA Experiment ID: 20000184 Result: Down-regulated in Transcription
  misc_feature: MA Experiment 20000184 PARAMETER Experiment Name: At_Shoots__P Parameter: Age (day) Value: 7
  misc_feature: MA Experiment 20000184 PARAMETER Experiment Name: At_Shoots__P Parameter: Tissue Value: Shoots vs. Whole Plant
  misc_feature: MA Experiment ID: 20000234 Result: Up-regulated in Transcription
  misc_feature: MA Experiment 20000234 PARAMETER Experiment Name: At_Siliques_P Parameter: Age (day) Value: 21
  misc_feature: MA Experiment 20000234 PARAMETER Experiment Name: At_Siliques_P Parameter: Organism Value: A. thaliana
  misc_feature: MA Experiment 20000234 PARAMETER Experiment Name: At_Siliques_P Parameter: Plant Line Value: WS
  misc_feature: MA Experiment 20000234 PARAMETER Experiment Name: At_Siliques_P Parameter: Tissue Value: Less Than 5mm Siliques vs. Whole Plant
  misc_feature: MA Experiment ID: 20000264 Result: Up-regulated in Transcription
  misc_feature: MA Experiment 20000264 PARAMETER Experiment Name: At_Open_Flower_P Parameter: Age (day) Value: 21
  misc_feature: MA Experiment 20000264 PARAMETER Experiment Name: At_Open_Flower_P Parameter: Plant Line Value: WS
  misc_feature: MA Experiment 20000264 PARAMETER Experiment Name: At_Open_Flower_P Parameter: Tissue Value: Open Flower vs. Whole Plant
  misc_feature: MA Experiment ID: 20000265 Result: Up-regulated in Transcription
  misc_feature: MA Experiment 20000265 PARAMETER Experiment Name: At_Open_Flower_P Parameter: Age (day) Value: 21
  misc_feature: MA Experiment 20000265 PARAMETER Experiment Name: At_Open_Flower_P Parameter: Plant Line Value: WS
  misc_feature: MA Experiment 20000265 PARAMETER Experiment Name: At_Open_Flower_P Parameter: Tissue Value: Closed Flower vs. Whole Plant
  misc_feature: MA Experiment ID: 20000436 Result: Down-regulated in Transcription
  misc_feature: MA Experiment 20000436 PARAMETER Experiment Name: At_Drought_P Parameter: Age (day) Value: 7
  misc_feature: MA Experiment 20000436 PARAMETER Experiment Name: At_Drought_P Parameter: Organism Value: A. thaliana
  misc_feature: MA Experiment 20000436 PARAMETER Experiment Name: At_Drought_P Parameter: Plant Line Value: WS
  misc_feature: MA Experiment 20000436 PARAMETER Experiment Name: At_Drought_P Parameter: Timepoint (hr) Value: 12
  misc_feature: MA Experiment 20000436 PARAMETER Experiment Name: At_Drought_P Parameter: Tissue Value: Whole Plant
  misc_feature: MA Experiment 20000436 PARAMETER Experiment Name: At_Drought_P Parameter: Treatment Value: Drought vs. No Drought
  misc_feature: MA Experiment ID: 20000495 Result: Up-regulated in Transcription
  misc_feature: MA Experiment 20000495 PARAMETER Experiment Name: At_Guard_Cells_P Parameter: Harvest Date Value: 8/2/2002
  misc_feature: MA Experiment 20000495 PARAMETER Experiment Name: At_Guard_Cells_P Parameter: Organism Value: A. thaliana
  misc_feature: MA Experiment 20000495 PARAMETER Experiment Name: At_Guard_Cells_P Parameter: Tissue Value: Guard Cells vs. Leaves
  misc_feature: MA Experiment ID: 20000794 Result: Up-regulated in Transcription
  misc_feature: MA Experiment 20000794 PARAMETER Experiment Name: At_Petals_P Parameter: Age (day) Value: 23-25 days
  misc_feature: MA Experiment 20000794 PARAMETER Experiment Name: At_Petals_P Parameter: Plant Line Value: WS
  misc_feature: MA Experiment 20000794 PARAMETER Experiment Name: At_Petals_P Parameter: Tissue Value: Petals vs. Whole plant
  misc_feature: MA Experiment ID: 20001450 Result: Down-regulated in Transcription
  misc_feature: MA Experiment 20001450 PARAMETER Experiment Name: At_Far-red-induction_P Parameter: Age (day) Value: 7
  misc_feature: MA Experiment 20001450 PARAMETER Experiment Name: At_Far-red-induction_P Parameter: Light Value: Far-red vs. White
  misc_feature: MA Experiment 20001450 PARAMETER Experiment Name: At_Far-red-induction_P Parameter: Organism Value: A. thaliana
  misc_feature: MA Experiment 20001450 PARAMETER Experiment Name: At_Far-red-induction_P Parameter: Plant Line Value: Columbia
  misc_feature: MA Experiment 20001450 PARAMETER Experiment Name: At_Far-red-induction_P Parameter: Timepoint (hr) Value: 8
  misc_feature: MA Experiment 20001450 PARAMETER Experiment Name: At_Far-red-induction_P Parameter: Tissue Value: Whole Plant
  misc_feature: MA Experiment ID: 20001757 Result: Up-regulated in Transcription
  misc_feature: MA Experiment 20001757 PARAMETER Experiment Name: At_50mM_NH4NO3_L-to-H_P Parameter: Timepoint (hr) Value: 6
  misc_feature: MA Experiment 20001757 PARAMETER Experiment Name: At_50mM_NH4NO3_L-to-H_P Parameter: Tissue Value: Leaf
  misc_feature: MA Experiment 20001757 PARAMETER Experiment Name: At_50mM_NH4NO3_L-to-H_P Parameter: Treatment Value: 50mM NH4NO3 vs 100mM Mannitol
  misc_feature: MA Experiment ID: 20001906 Result: Down-regulated in Transcription
  misc_feature: MA Experiment 20001906 PARAMETER Experiment Name: At_Drought_Reproduction_P Parameter: Age (day) Value: 35
  misc_feature: MA Experiment 20001906 PARAMETER Experiment Name: At_Drought_Reproduction_P Parameter: Organism Value: A. thaliana
  misc_feature: MA Experiment 20001906 PARAMETER Experiment Name: At_Drought_Reproduction_P Parameter: Plant Line Value: WS
  misc_feature: MA Experiment 20001906 PARAMETER Experiment Name: At_Drought_Reproduction_P Parameter: Timepoint (day) Value: 5
  misc_feature: MA Experiment 20001906 PARAMETER Experiment Name: At_Drought_Reproduction_P Parameter: Tissue Value: Siliques
  misc_feature: MA Experiment 20001906 PARAMETER Experiment Name: At_Drought_Reproduction_P Parameter: Treatment Value: Drought vs. No Drought
ggactcacagtgagtgtgacataagacaaacggattttgtttcctttacaatttaacgaaacagtaattaacactctcgaatggattcgtagagagcagcaaactccactctgacgccatacataaacaattcttaactttatcctctcatccttatcactcttcctcaaaacttcgaaaatgcatgcgatcgatttcaaagagattcaggagaagctctctgatggattccggccttggcaacgatcgtttcagttctgggctcgtgccactgatatctacaccggatacaaggtttctctttgattgatgggtatttcaacttcgtatgaacttcgtcaaggatgttaataagcacgaggagatgtgggagagacaacatgaacttgctgctcataaagtttattctatgtgctctgaccttggtggtttcttccttaagattgcacaaattctagggaaacctgacttggctccagctgcttgggtgagaaaactcgtcactttgtgtgatcaagctcctgccacaccatttgatgccgttcgagttgtcctggagaaagagttaggtaaaagcatcgaacaagtgtttgaaacatttgatgagaagcctcttggctctgcttctattgctcaggtacaccgagcaagagtaaagggtgacaagagggatgttgttgtaaaggtccaacatcctggcgttgagaagttgatgatggttgatatcagaaacttgcaaatatttgcattatacatgcagaaaactgatatcaaatttgacttgttctccatgacaaaggaaatagagaagcagattgggtatgaattcgactttaaaagggaggccaatgcaatggagaagatccgacgttttctatatgataacaatagaaagagtcctgttctggttcccagggtgtttccaaatttggtgaccaggaaggttctggttatggaattcatgaacggaatcccgatcttgagccttggtgatgagatggcaaaaagagggataaatcctcatggtaaaatggcagaggcagcaaaattcaatatactacacagtttgtcccaagcatatggccaaatgatactgaagagtggtttctttcatgcggatccacatcctgggaatatcttgattggtaaaggttcagaggttgcactgctggactatggtcaagtgaaagaactccctgaccacctgagacttggttatgcaaatttgggaacttggtatagctacagtagccaagtgtaagaatgagcaacaagagcttctccagttagcaaaaacaatgttcgacacagagatgcctcctggtacgacaactctgcaacctttctcagaagactcttcgatcaaaaagatttcggttgaggcatttccagaggaactcttctctgttcttcgcacagtagttctgttaagaggactcagcgtagggattggcattaattactcctgcgctcaacactggagggctatggcagaagaggctttgcatgcatctggaagactctcaacaggtagaaagcagaagcgtcgatgtagttctcttagaaggctatacccagggccaagagagagttaataaaatcccctgcctcttgcaaatgatgctctcagtctttagtctttacattattttctggatacagctaaggcagcaagttgtctcttaccttaaccggtttagttggtttgaaactttgactagtgagtacatctttataaaagttttgtcattatac

SEQ ID NO: 46891 - protein, 310 aa, Arabidopsis thaliana
  peptide (1)..(310): Ceres Seq. ID no. 15168982
  misc_feature (78)..(198): Pfam Name: ABC1 family Pfam Description: ABC1 family
  misc_feature (10)..(300): Homolog of NCBI NO: 39592068 NR Description: Hypothetical protein CBG23256 [Caenorhabditis
  misc_feature (11)..(305): Homolog of NCBI NO: 21312430 NR Description: RIKEN cDNA 2610005A10 [Mus musculus]
  misc_feature (31)..(310): Homolog of NCBI NO: 20808256 NR Description: predicted unusual protein kinase
  misc_feature (31)..(289): Homolog of NCBI NO: 17227685 NR Description: hypothetical protein [Nostoc sp. PCC 7120]
  misc_feature (31)..(289): Homolog of NCBI NO: 23128673 NR Description: hypothetical protein [Nostoc punctiforme]
  misc_feature (12)..(305): Homolog of NCBI NO: 40254938 NR Description: aarF domain containing kinase 1 [Homo sapiens]
  misc_feature (1)..(300): Homolog of NCBI NO: 34907760 NR Description: ABC transporter-like protein
  misc_feature (1)..(284): Homolog of NCBI NO: 9758915 NR Description: contains similarity to ABC
  misc_feature (1)..(284): Homolog of NCBI NO: 30695871 NR Description: expressed protein [Arabidopsis thaliana]
  misc_feature (1)..(284): Homolog of NCBI NO: 15234008 NR Description: hypothetical protein [Arabidopsis thaliana]
MNFVKDVNKHEEMWERQHELAAHKVYSMCSDLGGFFLKIAQILGKPDLAPAAWVRKLVTLCDQAPATPFDAVRVVLEKELGKSIEQVFETFDEKPLGSASIAQVHRARVKGDKRDVVVKVQHPGVEKLMMVDIRNLQIFALYMQKTDIKFDLFSMTKEIEKQIGYEFDFKREANAMEKIRRFLYDNNRKSPVLVPRVFPNLVTRKVLVMEFMNGIPILSLGDEMAKRGINPHGKMAEAAKFNILHSLSQAYGQMILKSGFFHADPHPGNILIGKGSEVALLDYGQVKELPDHLRLGYANLGTWYSYSSQV

SEQ ID NO: 46892 - protein, 298 aa, Arabidopsis thaliana
  peptide (1)..(298): Ceres Seq. ID no. 15168983
  misc_feature (66)..(186): Pfam Name: ABC1 family Pfam Description: ABC1 family
  misc_feature (1)..(288): Homolog of NCBI NO: 39592068 NR Description: Hypothetical protein CBG23256 [Caenorhabditis
  misc_feature (1)..(293): Homolog of NCBI NO: 21312430 NR Description: RIKEN cDNA 2610005A10 [Mus musculus]
  misc_feature (19)..(298): Homolog of NCBI NO: 20808256 NR Description: predicted unusual protein kinase
  misc_feature (19)..(277): Homolog of NCBI NO: 17227685 NR Description: hypothetical protein [Nostoc sp. PCC 7120]
  misc_feature (19)..(277): Homolog of NCBI NO: 23128673 NR Description: hypothetical protein [Nostoc punctiforme]
  misc_feature (1)..(293): Homolog of NCBI NO: 40254938 NR Description: aarF domain containing kinase 1 [Homo sapiens]
  misc_feature (1)..(288): Homolog of NCBI NO: 34907760 NR Description: ABC transporter-like protein
  misc_feature (1)..(272): Homolog of NCBI NO: 9758915 NR Description: contains similarity to ABC
  misc_feature (1)..(272): Homolog of NCBI NO: 30695871 NR Description: expressed protein [Arabidopsis thaliana]
  misc_feature (1)..(272): Homolog of NCBI NO: 15234008 NR Description: hypothetical protein [Arabidopsis thaliana]
MWERQHELAAHKVYSMCSDLGGFFLKIAQILGKPDLAPAAWVRKLVTLCDQAPATPFDAVRVVLEKELGKSIEQVFETFDEKPLGSASIAQVHRARVKGDKRDVVVKVQHPGVEKLMMVDIRNLQIFALYMQKTDIKFDLFSMTKEIEKQIGYEFDFKREANAMEKIRRFLYDNNRKSPVLVPRVFPNLVTRKVLVMEFMNGIPILSLGDEMAKRGINPHGKMAEAAKFNILHSLSQAYGQMILKSGFFHADPHPGNILIGKGSEVALLDYGQVKELPDHLRLGYANLGTWYSYSSQV

SEQ ID NO: 46893 - protein, 283 aa, Arabidopsis thaliana
  peptide (1)..(283): Ceres Seq. ID no. 15168984
  misc_feature (51)..(171): Pfam Name: ABC1 family Pfam Description: ABC1 family
  misc_feature (1)..(273): Homolog of NCBI NO: 39592068 NR Description: Hypothetical protein CBG23256 [Caenorhabditis
  misc_feature (1)..(278): Homolog of NCBI NO: 21312430 NR Description: RIKEN cDNA 2610005A10 [Mus musculus]
  misc_feature (4)..(283): Homolog of NCBI NO: 20808256 NR Description: predicted unusual protein kinase
  misc_feature (4)..(262): Homolog of NCBI NO: 17227685 NR Description: hypothetical protein [Nostoc sp. PCC 7120]
  misc_feature (4)..(262): Homolog of NCBI NO: 23128673 NR Description: hypothetical protein [Nostoc punctiforme]
  misc_feature (1)..(278): Homolog of NCBI NO: 40254938 NR Description: aarF domain containing kinase 1 [Homo sapiens]
  misc_feature (1)..(273): Homolog of NCBI NO: 34907760 NR Description: ABC transporter-like protein
  misc_feature (1)..(257): Homolog of NCBI NO: 9758915 NR Description: contains similarity to ABC
  misc_feature (1)..(257): Homolog of NCBI NO: 30695871 NR Description: expressed protein [Arabidopsis thaliana]
  misc_feature (1)..(257): Homolog of NCBI NO: 15234008 NR Description: hypothetical protein [Arabidopsis thaliana]
MCSDLGGFFLKIAQILGKPDLAPAAWVRKLVTLCDQAPATPFDAVRVVLEKELGKSIEQVFETFDEKPLGSASIAQVHRARVKGDKRDVVVKVQHPGVEKLMMVDIRNLQIFALYMQKTDIKFDLFSMTKEIEKQIGYEFDFKREANAMEKIRRFLYDNNRKSPVLVPRVFPNLVTRKVLVMEFMNGIPILSLGDEMAKRGINPHGKMAEAAKFNILHSLSQAYGQMILKSGFFHADPHPGNILIGKGSEVALLDYGQVKELPDHLRLGYANLGTWYSYSSQV

SEQ ID NO: 46894 - DNA, 2204 bp, Arabidopsis thaliana
  misc_feature (1)..(2204): Ceres Seq. ID no. 12574800
  misc_feature: MA Experiment ID: 20000173 Result: Down-regulated in Transcription
  misc_feature: MA Experiment 20000173 PARAMETER Experiment Name: At_42deg_Heat_P Parameter: Age (day) Value: 14
  misc_feature: MA Experiment 20000173 PARAMETER Experiment Name: At_42deg_Heat_P Parameter: Organism Value: A. thaliana
  misc_feature: MA Experiment 20000173 PARAMETER Experiment Name: At_42deg_Heat_P Parameter: Plant Line Value: WS
  misc_feature: MA Experiment 20000173 PARAMETER Experiment Name: At_42deg_Heat_P Parameter: Temperature (deg C) Value: 42 vs. 22
  misc_feature: MA Experiment 20000173 PARAMETER Experiment Name: At_42deg_Heat_P Parameter: Timepoint (hr) Value: 6
  misc_feature: MA Experiment 20000173 PARAMETER Experiment Name: At_42deg_Heat_P Parameter: Tissue Value: Aerial
  misc_feature: MA Experiment ID: 20000180 Result: Up-regulated in Transcription
  misc_feature: MA Experiment 20000180 PARAMETER Experiment Name: At_Germinating_Seeds_P Parameter: Age (hr) Value: 24 vs. 0
  misc_feature: MA Experiment 20000180 PARAMETER Experiment Name: At_Germinating_Seeds_P Parameter: Tissue Value: Germinating Seeds
  misc_feature: MA Experiment ID: 20000439 Result: Up-regulated in Transcription
  misc_feature: MA Experiment 20000439 PARAMETER Experiment Name: At_Roots__P Parameter: Age (day) Value: 14 vs. 21
  misc_feature: MA Experiment 20000439 PARAMETER Experiment Name: At_Roots__P Parameter: Organism Value: A. thaliana
  misc_feature: MA Experiment 20000439 PARAMETER Experiment Name: At_Roots__P Parameter: Tissue Value: Roots vs. Whole Plant
acgaaggccgtctcgtcagatttctttttcatttttcttttaacgtttggtttcgtctctaatccattatcttccttaagaaaaaaaaaattcagcaaaaaaaaagagaaaaaaatagtgaatcaagctgtctcgtagcagtctttatagatcaaacgataatcgaatccaacgacccattttttttttttttgggtctgatttcgtctctctttgttcttttcaccttttttttttgttttggttttgtctcttccgtttcattttgtgtttcttcaatctgatctaaagcttttgtctgaaaaaaagtgtcagactttctatgaagatgttgttggtcaatgggtgatttttagtttgtgttaaagcagaagcataagattacttggtgaatcgattacaattttgatttgattcagatatttgaagggttcttactagaatttgaattggggatctttgaatttcgatcaggcttttagagaggtagggaacattgaattgagatctgggtcaacttttggttttgttggggattagttgttttaagagatcgaagaaaggaggaagctttttgatttggtaacgatggatcgtgtggttggtggtaagtataagcttggacgtaaacttggaagtggatcatttggtgaactttttctaggggttaatgtacaaactggagaagaagttgctgtgaagcttgaacctgcgagagctagacatcctcaacttcattatgaatcaaagctttatatgcttcttcaaggaggaactggtattccacatctaaaatggtatggggttgagggtgaatacaactgtatggtgattgaccttttgggtccgagtatggaggatttatttaattattgtagtcggaggttcaatctaaagacggttctaatgctcgcagatcaaatgatcaatagagttgagtatatgcatgtccggggatttcttcatcgtgacataaagcctgataactttttgatgggtcttggacgcaaagcgaaccaggtgtacatcattgactacggacttgcaaaaaagtatagagatctccaaactcatagacacattccctacagggaaaacaagaatcttactggaacagctcgatatgcaagtgttaacactcatcttggaattgagcaaagtaggagggacgatctggaatctcttggctacgtgcttatgtattttcttcgaggaagtcttccttggcaaggccttcgtgcgggtaccaaaaaacagaagtatgacaagatcagcgaaaagaaaaggcttacacctgtagaggttctctgtaaatcctttccacctgagttcacatcatacttcctctatgtacgatcattgcggtttgaagacaaaccagattatccatacctaaagaggcttttcagggatctctttattcgagaaggttatcagtttgactatgtatttgattggacaatcttgaagtatccacagtttagttcgggctccagctctagctccaagccaagatcaagcctgagaccagctatgaatcctccagtaccaattgccgaaagaccagataaaccttcagctggagctgggcaagacagtcgagatagattctcaggtgctttagaggcatatgctagaagaaatggctcaggaagcggtgtggtacaagctgatcgatctagaccaagaacctcagagaatgtattagcatcgtcaaaggatacaacaccacaaaactatgagagagtcgaaagaccaatctcttcaacaagacacgcaagttcttcaagaaaagctgttgtatcgagcgtacgagccacttcttcagctgatttcacagagaaccgctctagcagagttgtcccaagcaatggccgttcctcaaccgctcagaggactcagctcgtccctgacccaaccactagaccgtcatcttcttcttttacccgagctgcgccgtcgaggactgctcgtgacatcacgctccagagctttgagctactcaccatagggaatggaaagaggaagtgagaggcttggctttatcgtgagcgtgttggaggacactgcgacattttaatggatggagactttgtttttatttcacgaaattatcggtttcctaatttaaggaataaatcgaacatcatttgattacaaattatatgtgataaagtatatggttttaacttgttaagctcatc

SEQ ID NO: 46895 - protein, 480 aa, Arabidopsis thaliana
  peptide (1)..(480): Ceres Seq. ID no. 12574801
  misc_feature (1)..(414): Homolog of NCBI NO: 15229427 NR Description: putative casein kinase I
  misc_feature (1)..(474): Homolog of NCBI NO: 30678728 NR Description: protein kinase (ADK1) [Arabidopsis thaliana]
  misc_feature (1)..(436): Homolog of NCBI NO: 15236471 NR Description: casein kinase I
  misc_feature (1)..(474): Homolog of NCBI NO: 21536851 NR Description: protein kinase ADK1-like protein [Arabidopsis
  misc_feature (1)..(474): Homolog of NCBI NO: 18417216 NR Description: protein kinase ADK1-like protein
  misc_feature (1)..(468): Homolog of NCBI NO: 25287643 NR Description: protein F19P19.10 [imported] - Arabidopsis
  misc_feature (117)..(480): Homolog of NCBI NO: 1103322 NR Description: casein kinase I [Arabidopsis thaliana]
  misc_feature (1)..(480): Homolog of NCBI NO: 27754653 NR Description: putative casein kinase I [Arabidopsis thaliana]
  misc_feature (1)..(480): Homolog of NCBI NO: 15219733 NR Description: putative casein kinase I; protein id: At1g04440.1
  misc_feature (1)..(480): Homolog of NCBI NO: 15239840 NR Description: casein kinase I
MDRVVGGKYKLGRKLGSGSFGELFLGVNVQTGEEVAVKLEPARARHPQLHYESKLYMLLQGGTGIPHLKWYGVEGEYNCMVIDLLGPSMEDLFNYCSRRFNLKTVLMLADQMINRVEYMHVRGFLHRDIKPDNFLMGLGRKANQVYIIDYGLAKKYRDLQTHRHIPYRENKNLTGTARYASVNTHLGIEQSRRDDLESLGYVLMYFLRGSLPWQGLRAGTKKQKYDKISEKKRLTPVEVLCKSFPPEFTSYFLYVRSLRFEDKPDYPYLKRLFRDLFIREGYQFDYVFDWTILKYPQFSSGSSSSSKPRSSLRPAMNPPVPIAERPDKPSAGAGQDSRDRFSGALEAYARRNGSGSGVVQADRSRPRTSENVLASSKDTTPQNYERVERPISSTRHASSSRKAVVSSVRATSSADFTENRSSRVVPSNGRSSTAQRTQLVPDPTTRPSSSSFTRAAPSRTARDITLQSFELLTIGNGKRK

SEQ ID NO: 46896 - protein, 424 aa, Arabidopsis thaliana
  peptide (1)..(424): Ceres Seq. ID no. 12574802
  misc_feature (1)..(358): Homolog of NCBI NO: 15229427 NR Description: putative casein kinase I
  misc_feature (1)..(418): Homolog of NCBI NO: 30678728 NR Description: protein kinase (ADK1) [Arabidopsis thaliana]
  misc_feature (1)..(380): Homolog of NCBI NO: 15236471 NR Description: casein kinase I
  misc_feature (1)..(418): Homolog of NCBI NO: 21536851 NR Description: protein kinase ADK1-like protein [Arabidopsis
  misc_feature (1)..(418): Homolog of NCBI NO: 18417216 NR Description: protein kinase ADK1-like protein
  misc_feature (1)..(412): Homolog of NCBI NO: 25287643 NR Description: protein F19P19.10 [imported] - Arabidopsis
  misc_feature (61)..(424): Homolog of NCBI NO: 1103322 NR Description: casein kinase I [Arabidopsis thaliana]
  misc_feature (1)..(424): Homolog of NCBI NO: 27754653 NR Description: putative casein kinase I [Arabidopsis thaliana]
  misc_feature (1)..(424): Homolog of NCBI NO: 15219733 NR Description: putative casein kinase I; protein id: At1g04440.1
  misc_feature (1)..(424): Homolog of NCBI NO: 15239840 NR Description: casein kinase I
MLLQGGTGIPHLKWYGVEGEYNCMVIDLLGPSMEDLFNYCSRRFNLKTVLMLADQMINRVEYMHVRGFLHRDIKPDNFLMGLGRKANQVYIIDYGLAKKYRDLQTHRHIPYRENKNLTGTARYASVNTHLGIEQSRRDDLESLGYVLMYFLRGSLPWQGLRAGTKKQKYDKISEKKRLTPVEVLCKSFPPEFTSYFLYVRSLRFEDKPDYPYLKRLFRDLFIREGYQFDYVFDWTILKYPQFSSGSSSSSKPRSSLRPAMNPPVPIAERPDKPSAGAGQDSRDRFSGALEAYARRNGSGSGVVQADRSRPRTSENVLASSKDTTPQNYERVERPISSTRHASSSRKAVVSSVRATSSADFTENRSSRVVPSNGRSSTAQRTQLVPDPTTRPSSSSFTRAAPSRTARDITLQSFELLTIGNGKRK

SEQ ID NO: 46897 - protein, 401 aa, Arabidopsis thaliana
  peptide (1)..(401): Ceres Seq. ID no. 12574803
  misc_feature (1)..(335): Homolog of NCBI NO: 15229427 NR Description: putative casein kinase I
  misc_feature (1)..(395): Homolog of NCBI NO: 30678728 NR Description: protein kinase (ADK1) [Arabidopsis thaliana]
  misc_feature (1)..(357): Homolog of NCBI NO: 15236471 NR Description: casein kinase I
  misc_feature (1)..(395): Homolog of NCBI NO: 21536851 NR Description: protein kinase ADK1-like protein [Arabidopsis
  misc_feature (1)..(395): Homolog of NCBI NO: 18417216 NR Description: protein kinase ADK1-like protein
  misc_feature (1)..(389): Homolog of NCBI NO: 25287643 NR Description: protein F19P19.10 [imported] - Arabidopsis
  misc_feature (38)..(401): Homolog of NCBI NO: 1103322 NR Description: casein kinase I [Arabidopsis thaliana]
  misc_feature (1)..(401): Homolog of NCBI NO: 27754653 NR Description: putative casein kinase I [Arabidopsis thaliana]
  misc_feature (1)..(401): Homolog of NCBI NO: 15219733 NR Description: putative casein kinase I; protein id: At1g04440.1
  misc_feature (1)..(401): Homolog of NCBI NO: 15239840 NR Description: casein kinase I
MVIDLLGPSMEDLFNYCSRRFNLKTVLMLADQMINRVEYMHVRGFLHRDIKPDNFLMGLGRKANQVYIIDYGLAKKYRDLQTHRHIPYRENKNLTGTARYASVNTHLGIEQSRRDDLESLGYVLMYFLRGSLPWQGLRAGTKKQKYDKISEKKRLTPVEVLCKSFPPEFTSYFLYVRSLRFEDKPDYPYLKRLFRDLFIREGYQFDYVFDWTILKYPQFSSGSSSSSKPRSSLRPAMNPPVPIAERPDKPSAGAGQDSRDRFSGALEAYARRNGSGSGVVQADRSRPRTSENVLASSKDTTPQNYERVERPISSTRHASSSRKAVVSSVRATSSADFTENRSSRVVPSNGRSSTAQRTQLVPDPTTRPSSSSFTRAAPSRTARDITLQSFELLTIGNGKRK

SEQ ID NO: 46898 - DNA, 1530 bp, Arabidopsis thaliana
  misc_feature (1)..(1530): Ceres Seq. ID no. 15168985
  misc_feature: MA Experiment ID: 20000185 Result: Down-regulated in Transcription
  misc_feature: MA Experiment 20000185 PARAMETER Experiment Name: At_Roots__P Parameter: Age (day) Value: 7 vs. 21
  misc_feature: MA Experiment 20000185 PARAMETER Experiment Name: At_Roots__P Parameter: Organism Value: A. thaliana
  misc_feature: MA Experiment 20000185 PARAMETER Experiment Name: At_Roots__P Parameter: Tissue Value: Roots vs. Whole Plant
  misc_feature: MA Experiment ID: 20000436 Result: Down-regulated in Transcription
  misc_feature: MA Experiment 20000436 PARAMETER Experiment Name: At_Drought_P Parameter: Age (day) Value: 7
  misc_feature: MA Experiment 20000436 PARAMETER Experiment Name: At_Drought_P Parameter: Organism Value: A. thaliana
  misc_feature: MA Experiment 20000436 PARAMETER Experiment Name: At_Drought_P Parameter: Plant Line Value: WS
  misc_feature: MA Experiment 20000436 PARAMETER Experiment Name: At_Drought_P Parameter: Timepoint (hr) Value: 12
  misc_feature: MA Experiment 20000436 PARAMETER Experiment Name: At_Drought_P Parameter: Tissue Value: Whole Plant
  misc_feature: MA Experiment 20000436 PARAMETER Experiment Name: At_Drought_P Parameter: Treatment Value: Drought vs. No Drought
  misc_feature: MA Experiment ID: 20000437 Result: Down-regulated in Transcription
  misc_feature: MA Experiment 20000437 PARAMETER Experiment Name: At_Drought_P Parameter: Age (day) Value: 8
  misc_feature: MA Experiment 20000437 PARAMETER Experiment Name: At_Drought_P Parameter: Organism Value: A. thaliana
  misc_feature: MA Experiment 20000437 PARAMETER Experiment Name: At_Drought_P Parameter: Plant Line Value: WS
  misc_feature: MA Experiment 20000437 PARAMETER Experiment Name: At_Drought_P Parameter: Timepoint (hr) Value: 24
  misc_feature: MA Experiment 20000437 PARAMETER Experiment Name: At_Drought_P Parameter: Tissue Value: Whole Plant
  misc_feature: MA Experiment 20000437 PARAMETER Experiment Name: At_Drought_P Parameter: Treatment Value: Drought vs. No Drought
  misc_feature: MA Experiment ID: 20000439 Result: Down-regulated in Transcription
  misc_feature: MA Experiment 20000439 PARAMETER Experiment Name: At_Roots__P Parameter: Age (day) Value: 14 vs. 21
  misc_feature: MA Experiment 20000439 PARAMETER Experiment Name: At_Roots__P Parameter: Organism Value: A. thaliana
  misc_feature: MA Experiment 20000439 PARAMETER Experiment Name: At_Roots__P Parameter: Tissue Value: Roots vs. Whole Plant
  misc_feature: MA Experiment ID: 20000527 Result: Up-regulated in Transcription
  misc_feature: MA Experiment 20000527 PARAMETER Experiment Name: At_10percent_PEG_P Parameter: Age (day) Value: 20
  misc_feature: MA Experiment 20000527 PARAMETER Experiment Name: At_10percent_PEG_P Parameter: Organism Value: A. thaliana
  misc_feature: MA Experiment 20000527 PARAMETER Experiment Name: At_10percent_PEG_P Parameter: Plant Line Value: WS
  misc_feature: MA Experiment 20000527 PARAMETER Experiment Name: At_10percent_PEG_P Parameter: Timepoint (day) Value: 20
  misc_feature: MA Experiment 20000527 PARAMETER Experiment Name: At_10percent_PEG_P Parameter: Tissue Value: Whole Plant
  misc_feature: MA Experiment 20000527 PARAMETER Experiment Name: At_10percent_PEG_P Parameter: Treatment Value: 10percent PEG vs. No Treatment
  misc_feature: MA Experiment ID: 20000794 Result: Down-regulated in Transcription
  misc_feature: MA Experiment 20000794 PARAMETER Experiment Name: At_Petals_P Parameter: Age (day) Value: 23-25 days
  misc_feature: MA Experiment 20000794 PARAMETER Experiment Name: At_Petals_P Parameter: Plant Line Value: WS
  misc_feature: MA Experiment 20000794 PARAMETER Experiment Name: At_Petals_P Parameter: Tissue Value: Petals vs. Whole plant
  misc_feature: MA Experiment ID: 20001247 Result: Down-regulated in Transcription
  misc_feature: MA Experiment 20001247 PARAMETER Experiment Name: At_Far-red-induction_P Parameter: Age (day) Value: 7
  misc_feature: MA Experiment 20001247 PARAMETER Experiment Name: At_Far-red-induction_P Parameter: Light Value: Far-red vs. White
  misc_feature: MA Experiment 20001247 PARAMETER Experiment Name: At_Far-red-induction_P Parameter: Organism Value: A. thaliana
  misc_feature: MA Experiment 20001247 PARAMETER Experiment Name: At_Far-red-induction_P Parameter: Plant Line Value: Columbia
  misc_feature: MA Experiment 20001247 PARAMETER Experiment Name: At_Far-red-induction_P Parameter: Timepoint (hr) Value: 1
  misc_feature: MA Experiment 20001247 PARAMETER Experiment Name: At_Far-red-induction_P Parameter: Tissue Value: Whole Plant
  misc_feature: MA Experiment ID: 20001450 Result: Down-regulated in Transcription
  misc_feature: MA Experiment 20001450 PARAMETER Experiment Name: At_Far-red-induction_P Parameter: Age (day) Value: 7
  misc_feature: MA Experiment 20001450 PARAMETER Experiment Name: At_Far-red-induction_P Parameter: Light Value: Far-red vs. White
  misc_feature: MA Experiment 20001450 PARAMETER Experiment Name: At_Far-red-induction_P Parameter: Organism Value: A. thaliana
  misc_feature: MA Experiment 20001450 PARAMETER Experiment Name: At_Far-red-induction_P Parameter: Plant Line Value: Columbia
  misc_feature: MA Experiment 20001450 PARAMETER Experiment Name: At_Far-red-induction_P Parameter: Timepoint (hr) Value: 8
  misc_feature: MA Experiment 20001450 PARAMETER Experiment Name: At_Far-red-induction_P Parameter: Tissue Value: Whole Plant
  misc_feature: MA Experiment ID: 20001451 Result: Down-regulated in Transcription
  misc_feature: MA Experiment 20001451 PARAMETER Experiment Name: At_Far-red-induction_P Parameter: Age (day) Value: 7
  misc_feature: MA Experiment 20001451 PARAMETER Experiment Name: At_Far-red-induction_P Parameter: Light Value: Far-red vs. White
  misc_feature: MA Experiment 20001451 PARAMETER Experiment Name: At_Far-red-induction_P Parameter: Organism Value: A. thaliana
  misc_feature: MA Experiment 20001451 PARAMETER Experiment Name: At_Far-red-induction_P Parameter: Plant Line Value: Columbia
  misc_feature: MA Experiment 20001451 PARAMETER Experiment Name: At_Far-red-induction_P Parameter: Timepoint (hr) Value: 24
  misc_feature: MA Experiment 20001451 PARAMETER Experiment Name: At_Far-red-induction_P Parameter: Tissue Value: Whole Plant
  misc_feature: MA Experiment ID: 20001458 Result: Up-regulated in Transcription
  misc_feature: MA Experiment 20001458 PARAMETER Experiment Name: At_50mM_NH4NO3_L-to-H_P Parameter: Age (day) Value: Undefined
  misc_feature: MA Experiment 20001458 PARAMETER Experiment Name: At_50mM_NH4NO3_L-to-H_P Parameter: Organism Value: Undefined
  misc_feature: MA Experiment 20001458 PARAMETER Experiment Name: At_50mM_NH4NO3_L-to-H_P Parameter: Plant Line Value: Undefined
  misc_feature: MA Experiment 20001458 PARAMETER Experiment Name: At_50mM_NH4NO3_L-to-H_P Parameter: Timepoint (hr) Value: 2
  misc_feature: MA Experiment 20001458 PARAMETER Experiment Name: At_50mM_NH4NO3_L-to-H_P Parameter: Tissue Value: Siliques
  misc_feature: MA Experiment 20001458 PARAMETER Experiment Name: At_50mM_NH4NO3_L-to-H_P Parameter: Treatment Value: 50mM NH4NO3 vs. 100mM Manitol
  misc_feature: MA Experiment ID: 20001555 Result: Up-regulated in Transcription
  misc_feature: MA Experiment 20001555 PARAMETER Experiment Name: At_Drought_Soil_Dry_P Parameter: Age (day) Value: 24
  misc_feature: MA Experiment 20001555 PARAMETER Experiment Name: At_Drought_Soil_Dry_P Parameter: Organism Value: A. thaliana
  misc_feature: MA Experiment 20001555 PARAMETER Experiment Name: At_Drought_Soil_Dry_P Parameter: Plant Line Value: WS
  misc_feature: MA Experiment 20001555 PARAMETER Experiment Name: At_Drought_Soil_Dry_P Parameter: Post Timepoint (hr) Value: None
  misc_feature: MA Experiment 20001555 PARAMETER Experiment Name: At_Drought_Soil_Dry_P Parameter: Post-Treatment Value: None
  misc_feature: MA Experiment 20001555 PARAMETER Experiment Name: At_Drought_Soil_Dry_P Parameter: Timepoint (day) Value: 10
  misc_feature: MA Experiment 20001555 PARAMETER Experiment Name: At_Drought_Soil_Dry_P Parameter: Treatment Value: Drought vs. No Drought
  misc_feature: MA Experiment ID: 20001556 Result: Up-regulated in Transcription
  misc_feature: MA Experiment 20001556 PARAMETER Experiment Name: At_Drought_Soil_Dry_P Parameter: Age (day) Value: 26
  misc_feature: MA Experiment 20001556 PARAMETER Experiment Name: At_Drought_Soil_Dry_P Parameter: Organism Value: A. thaliana
  misc_feature: MA Experiment 20001556 PARAMETER Experiment Name: At_Drought_Soil_Dry_P Parameter: Plant Line Value: WS
  misc_feature: MA Experiment 20001556 PARAMETER Experiment Name: At_Drought_Soil_Dry_P Parameter: Post Timepoint (hr) Value: None
  misc_feature: MA Experiment 20001556 PARAMETER Experiment Name: At_Drought_Soil_Dry_P Parameter: Post-Treatment Value: None
  misc_feature: MA Experiment 20001556 PARAMETER Experiment Name: At_Drought_Soil_Dry_P Parameter: Timepoint (day) Value: 12
  misc_feature: MA Experiment 20001556 PARAMETER Experiment Name: At_Drought_Soil_Dry_P Parameter: Treatment Value: Drought vs. No Drought
  misc_feature: MA Experiment ID: 20001558 Result: Up-regulated in Transcription
  misc_feature: MA Experiment 20001558 PARAMETER Experiment Name: At_Drought_Soil_Dry_P Parameter: Age (day) Value: 27
  misc_feature: MA Experiment 20001558 PARAMETER Experiment Name: At_Drought_Soil_Dry_P Parameter: Organism Value: A. thaliana
  misc_feature: MA Experiment 20001558 PARAMETER Experiment Name: At_Drought_Soil_Dry_P Parameter: Plant Line Value: WS
  misc_feature: MA Experiment 20001558 PARAMETER Experiment Name: At_Drought_Soil_Dry_P Parameter: Post Timepoint (hr) Value: 6
  misc_feature: MA Experiment 20001558 PARAMETER Experiment Name: At_Drought_Soil_Dry_P Parameter: Post-Treatment Value: Re-Water vs. No Drought
  misc_feature: MA Experiment 20001558 PARAMETER Experiment Name: At_Drought_Soil_Dry_P Parameter: Timepoint (day) Value: 13
  misc_feature: MA Experiment 20001558 PARAMETER Experiment Name: At_Drought_Soil_Dry_P Parameter: Treatment Value: Drought vs. No Drought
  misc_feature: MA Experiment ID: 20001560 Result: Up-regulated in Transcription
  misc_feature: MA Experiment 20001560 PARAMETER Experiment Name: At_Drought_Soil_Dry_P Parameter: Age (day) Value: 28
  misc_feature: MA Experiment 20001560 PARAMETER Experiment Name: At_Drought_Soil_Dry_P Parameter: Organism Value: A. thaliana
  misc_feature: MA Experiment 20001560 PARAMETER Experiment Name: At_Drought_Soil_Dry_P Parameter: Plant Line Value: WS
  misc_feature: MA Experiment 20001560 PARAMETER Experiment Name: At_Drought_Soil_Dry_P Parameter: Post Timepoint (hr) Value: None
  misc_feature: MA Experiment 20001560 PARAMETER Experiment Name: At_Drought_Soil_Dry_P Parameter: Post-Treatment Value: None
  misc_feature: MA Experiment 20001560 PARAMETER Experiment Name: At_Drought_Soil_Dry_P Parameter: Timepoint (day) Value: 14
  misc_feature: MA Experiment 20001560 PARAMETER Experiment Name: At_Drought_Soil_Dry_P Parameter: Treatment Value: Drought vs. No Drought
  misc_feature: MA Experiment ID: 20001757 Result: Up-regulated in Transcription
  misc_feature: MA Experiment 20001757 PARAMETER Experiment Name: At_50mM_NH4NO3_L-to-H_P Parameter: Timepoint (hr) Value: 6
  misc_feature: MA Experiment 20001757 PARAMETER Experiment Name: At_50mM_NH4NO3_L-to-H_P Parameter: Tissue Value: Leaf
  misc_feature: MA Experiment 20001757 PARAMETER Experiment Name: At_50mM_NH4NO3_L-to-H_P Parameter: Treatment Value: 50mM NH4NO3 vs 100mM Mannitol
  misc_feature: MA Experiment ID: 20001911 Result: Down-regulated in Transcription
  misc_feature: MA Experiment 20001911 PARAMETER Experiment Name: At_Drought_Reproduction_P Parameter: Age (day) Value: 40
  misc_feature: MA Experiment 20001911 PARAMETER Experiment Name: At_Drought_Reproduction_P Parameter: Organism Value: A. thaliana
  misc_feature: MA Experiment 20001911 PARAMETER Experiment Name: At_Drought_Reproduction_P Parameter: Plant Line Value: WS
  misc_feature: MA Experiment 20001911 PARAMETER Experiment Name: At_Drought_Reproduction_P Parameter: Timepoint (day) Value: 10
  misc_feature: MA Experiment 20001911 PARAMETER Experiment Name: At_Drought_Reproduction_P Parameter: Tissue Value: Flowers
  misc_feature: MA Experiment 20001911 PARAMETER Experiment Name: At_Drought_Reproduction_P Parameter: Treatment Value: Drought vs. No Drought
gaatggcttcacttcttattttcccccaccttcaccattttgattcttcactggaccgtagagaggtactagtagttcgccattcacaagcatcaaggcgatttctcactccgaaagcttcaattaatggcagcggaatcacaaacggagctgcagcggaaaccacctctaaacctagtcgcaaagggaggaagaagaagcaaacatcgacggtaattgagaaagataacaccgagactgatcctgaattgaatccggagttagctgattacgacgacgggatcgagtttccgtacgacgatccgcctcttgtgtgttgcttcggagctgtacagaaggagttagttccggtggtgcgagtccatgataatccgatgcatcctgatatgtactcgcagtggaagatgctacagtgggatccaccggagtttgggagagctccgggaggtccgccgtcgaatgtggcgatctctcatgtacggttaggtgggagagctgcgtttatggggaaagtaggtgaagatgattttggagatgagcttgttctgatgatgaatcaggagagagttcagacgagagctgtgaaattcgatgagaattcgaaaactgcttgtactcgtgtcaagatcaagtttaaggacgggaaaatgatggcggagactgtgaaagaaccacctgaggactcgctatttgcttcagaactcaatttagctgtgcttaaagaggcgaggatttttcatttcaattcagaagtgttgacgtctcctacaatgcaatcaactctttttacggcaatacaatggtctaagaagtttggtgggcttattttctttgacttgaatctcccattaccgctgtggagatcgcgcaatgagactaggaagttgatcaagaaagcatggaatgaagcaaacatcattgaagtttcacagcaagagcttgagtttctacttgatgaagattactacgagaggagaagaaactacacaccacagtacttcgctgaggattttgatcagacgaaaaacagaagagactattaccattacacaccagaggaaatcaagtcattgtggcatgacaagctgaagctattggttgtgactgatggaacacttcggcttcattactatactcctacttttgatggtgttgtgattggaacagaagatgtgcttataactcctttcacctgtgataggaccggttctggtgatgctgttgttgcagggataatgagaaagctaacaacttgtcctgagatgtttgaggatcaggatgtgatggagcgacagctcaggtttgcagttgctgctgggatcatagcgcagtggacaattggtgcagttagaggtttccctactgaaagcgcgacacagaatttgaaagaacaagtttatgttccatcaatgtggtagaatagaagatgaagaactgaacttgtgtactcaatgtttttgaacaatgtgtgagttgtatactgattcagatttgtaatccagagaaatgtacaatcaatttttttagttc

SEQ ID NO: 46899 - protein, 471 aa, Arabidopsis thaliana
  peptide (1)..(471): Ceres Seq. ID no. 15168986
  misc_feature (101)..(455): Pfam Name: pfkB family carbohydrate kinase Pfam Description: pfkB family carbohydrate kinase
  misc_feature (352)..(461): Homolog of NCBI NO: 21592495 NR Description: fructokinase-like protein [Arabidopsis thaliana]
  misc_feature (139)..(320): Homolog of NCBI NO: 21592495 NR Description: fructokinase-like protein [Arabidopsis thaliana]
  misc_feature (352)..(461): Homolog of NCBI NO: 33329200 NR Description: putative fructokinase 2
  misc_feature (352)..(461): Homolog of NCBI NO: 33329198 NR Description: putative fructokinase
  misc_feature (139)..(320): Homolog of NCBI NO: 33329200 NR Description: putative fructokinase 2
  misc_feature (139)..(320): Homolog of NCBI NO: 33329198 NR Description: putative fructokinase
  misc_feature (67)..(453): Homolog of NCBI NO: 15222232 NR Description: pfkB type carbohydrate kinase protein family
  misc_feature (67)..(453): Homolog of NCBI NO: 6730638 NR Description: F4N2.16 [Arabidopsis thaliana]
  misc_feature (78)..(471): Homolog of NCBI NO: 34908334 NR Description: putative fructokinase [Oryza sativa (japonica
  misc_feature (1)..(471): Homolog of NCBI NO: 15232415 NR Description: pfkB type carbohydrate kinase protein family
MASLLIFPHLHHFDSSLDRREVLVVRHSQASRRFLTPKASINGSGITNGAAAETTSKPSRKGRKKKQTSTVIEKDNTETDPELNPELADYDDGIEFPYDDPPLVCCFGAVQKELVPVVRVHDNPMHPDMYSQWKMLQWDPPEFGRAPGGPPSNVAISHVRLGGRAAFMGKVGEDDFGDELVLMMNQERVQTRAVKFDENSKTACTRVKIKFKDGKMMAETVKEPPEDSLFASELNLAVLKEARIFHFNSEVLTSPTMQSTLFTAIQWSKKFGGLIFFDLNLPLPLWRSRNETRKLIKKAWNEANIIEVSQQELEFLLDEDYYERRRNYTPQYFAEDFDQTKNRRDYYHYTPEEIKSLWHDKLKLLVVTDGTLRLHYYTPTFDGVVIGTEDVLITPFTCDRTGSGDAVVAGIMRKLTTCPEMFEDQDVMERQLRFAVAAGIIAQWTIGAVRGFPTESATQNLKEQVYVPSMW

SEQ ID NO: 46900 - protein, 347 aa, Arabidopsis thaliana
  peptide (1)..(347): Ceres Seq. ID no. 15168987
  misc_feature (1)..(331): Pfam Name: pfkB family carbohydrate kinase Pfam Description: pfkB family carbohydrate kinase
  misc_feature (228)..(337): Homolog of NCBI NO: 21592495 NR Description: fructokinase-like protein [Arabidopsis thaliana]
  misc_feature (15)..(196): Homolog of NCBI NO: 21592495 NR Description: fructokinase-like protein [Arabidopsis thaliana]
  misc_feature (228)..(337): Homolog of NCBI NO: 33329200 NR Description: putative fructokinase 2
  misc_feature (228)..(337): Homolog of NCBI NO: 33329198 NR Description: putative fructokinase
  misc_feature (15)..(196): Homolog of NCBI NO: 33329200 NR Description: putative fructokinase 2
  misc_feature (15)..(196): Homolog of NCBI NO: 33329198 NR Description: putative fructokinase
  misc_feature (1)..(329): Homolog of NCBI NO: 15222232 NR Description: pfkB type carbohydrate kinase protein family
  misc_feature (1)..(329): Homolog of NCBI NO: 6730638 NR Description: F4N2.16 [Arabidopsis thaliana]
  misc_feature (1)..(347): Homolog of NCBI NO: 34908334 NR Description: putative fructokinase [Oryza sativa (japonica
  misc_feature (1)..(347): Homolog of NCBI NO: 15232415 NR Description: pfkB type carbohydrate kinase protein family
MHPDMYSQWKMLQWDPPEFGRAPGGPPSNVAISHVRLGGRAAFMGKVGEDDFGDELVLMMNQERVQTRAVKFDENSKTACTRVKIKFKDGKMMAETVKEPPEDSLFASELNLAVLKEARIFHFNSEVLTSPTMQSTLFTAIQWSKKFGGLIFFDLNLPLPLWRSRNETRKLIKKAWNEANIIEVSQQELEFLLDEDYYERRRNYTPQYFAEDFDQTKNRRDYYHYTPEEIKSLWHDKLKLLVVTDGTLRLHYYTPTFDGVVIGTEDVLITPFTCDRTGSGDAVVAGIMRKLTTCPEMFEDQDVMERQLRFAVAAGIIAQWTIGAVRGFPTESATQNLKEQVYVPSMW

SEQ ID NO: 46901 - protein, 343 aa, Arabidopsis thaliana
  peptide (1)..(343): Ceres Seq. ID no. 15168988
  misc_feature (1)..(327): Pfam Name: pfkB family carbohydrate kinase Pfam Description: pfkB family carbohydrate kinase
  misc_feature (224)..(333): Homolog of NCBI NO: 21592495 NR Description: fructokinase-like protein [Arabidopsis thaliana]
  misc_feature (11)..(192): Homolog of NCBI NO: 21592495 NR Description: fructokinase-like protein [Arabidopsis thaliana]
  misc_feature (224)..(333): Homolog of NCBI NO: 33329200 NR Description: putative fructokinase 2
  misc_feature (224)..(333): Homolog of NCBI NO: 33329198 NR Description: putative fructokinase
  misc_feature (11)..(192): Homolog of NCBI NO: 33329200 NR Description: putative fructokinase 2
  misc_feature (11)..(192): Homolog of NCBI NO: 33329198 NR Description: putative fructokinase
  misc_feature (1)..(325): Homolog of NCBI NO: 15222232 NR Description: pfkB type carbohydrate kinase protein family
  misc_feature (1)..(325): Homolog of NCBI NO: 6730638 NR Description: F4N2.16 [Arabidopsis thaliana]
  misc_feature (1)..(343): Homolog of NCBI NO: 34908334 NR Description: putative fructokinase [Oryza sativa (japonica
  misc_feature (1)..(343): Homolog of NCBI NO: 15232415 NR Description: pfkB type carbohydrate kinase protein family
MYSQWKMLQWDPPEFGRAPGGPPSNVAISHVRLGGRAAFMGKVGEDDFGDELVLMMNQERVQTRAVKFDENSKTACTRVKIKFKDGKMMAETVKEPPEDSLFASELNLAVLKEARIFHFNSEVLTSPTMQSTLFTAIQWSKKFGGLIFFDLNLPLPLWRSRNETRKLIKKAWNEANIIEVSQQELEFLLDEDYYERRRNYTPQYFAEDFDQTKNRRDYYHYTPEEIKSLWHDKLKLLVVTDGTLRLHYYTPTFDGVVIGTEDVLITPFTCDRTGSGDAVVAGIMRKLTTCPEMFEDQDVMERQLRFAVAAGIIAQWTIGAVRGFPTESATQNLKEQVYVPSMW

SEQ ID NO: 46902 - DNA, 1288 bp, Arabidopsis thaliana
  misc_feature (1)..(1288): Ceres Seq. ID no. 13646915
  misc_feature: MA Experiment ID: 20000307 Result: Up-regulated in Transcription
  misc_feature: MA Experiment 20000307 PARAMETER Experiment Name: At_Germinating_Seeds_Sub_P Parameter: Age (hr) Value: 24 vs. 0
  misc_feature: MA Experiment 20000307 PARAMETER Experiment Name: At_Germinating_Seeds_Sub_P Parameter: Organism Value: A. thaliana
  misc_feature: MA Experiment 20000307 PARAMETER Experiment Name: At_Germinating_Seeds_Sub_P Parameter: Plant Line Value: WS
  misc_feature: MA Experiment 20000307 PARAMETER Experiment Name: At_Germinating_Seeds_Sub_P Parameter: Tissue Value: Germinating Seeds
  misc_feature: MA Experiment ID: 20000314 Result: Up-regulated in Transcription
  misc_feature: MA Experiment 20000314 PARAMETER Experiment Name: At_14day_Shoots-Roots_Sub_P Parameter: Age (day) Value: 14
  misc_feature: MA Experiment 20000314 PARAMETER Experiment Name: At_14day_Shoots-Roots_Sub_P Parameter: Organism Value: A. thaliana
  misc_feature: MA Experiment 20000314 PARAMETER Experiment Name: At_14day_Shoots-Roots_Sub_P Parameter: Plant Line Value: WS
  misc_feature: MA Experiment 20000314 PARAMETER Experiment Name: At_14day_Shoots-Roots_Sub_P Parameter: Tissue Value: Roots vs. Whole Plant
  misc_feature: MA Experiment ID: 20000347 Result: Up-regulated in Transcription
  misc_feature: MA Experiment 20000347 PARAMETER Experiment Name: At_2mM_SA_Sub_P Parameter: Age (day) Value: 14
  misc_feature: MA Experiment 20000347 PARAMETER Experiment Name: At_2mM_SA_Sub_P Parameter: Organism Value: A. thaliana
  misc_feature: MA Experiment 20000347 PARAMETER Experiment Name: At_2mM_SA_Sub_P Parameter: Plant Line Value: WS
  misc_feature: MA Experiment 20000347 PARAMETER Experiment Name: At_2mM_SA_Sub_P Parameter: Timepoint (hr) Value: 6
  misc_feature: MA Experiment 20000347 PARAMETER Experiment Name: At_2mM_SA_Sub_P Parameter: Tissue Value: Aerial
  misc_feature: MA Experiment 20000347 PARAMETER Experiment Name: At_2mM_SA_Sub_P Parameter: Treatment Value: 2mM SA vs. No Treatment
  misc_feature: MA Experiment ID: 20000355 Result: Up-regulated in Transcription
  misc_feature: MA Experiment 20000355 PARAMETER Experiment Name: At_Siliques_Sub_P Parameter: Age (day) Value: 21
  misc_feature: MA Experiment 20000355 PARAMETER Experiment Name: At_Siliques_Sub_P Parameter: Organism Value: A. thaliana
  misc_feature: MA Experiment 20000355 PARAMETER Experiment Name: At_Siliques_Sub_P Parameter: Plant Line Value: WS
  misc_feature: MA Experiment 20000355 PARAMETER Experiment Name: At_Siliques_Sub_P Parameter: Tissue Value: Less Than 5mm Siliques vs. Whole Plant
gagatccctccatcattgttcaccatggacaaggcttcaatcactgaaggaaagccgattcgatgcaaagcagcaatcttaagaaaagcaggagaaccattggtgatagaagagatccaagttgatccacctcaagcttacgaagtcagaatcaaaattttatgcacttctctatgtcacacggatgttactttctggaaactagacagtggaccgcttgcaagatttcctaggattctaggtcatgaagcagtcggtgtggtcgagagtattggagaaaaggtagacggatttaaacaaggcgacgtcgttttgccagtgtttcatcctcaatgtgaagaatgcaaagagtgcaaatctccaaagagcaactggtgcacaagatatacaaacgattacttatcaaacacaagacgatatggaatgacttcaagattcaaggactctcttggagaagatattcaccatttcatctttgtctcaagttttactgaatataccgtagtagatatcgcacatctcgtcaaaatctctcctgaaattcccgttgatatagcggccttgctcagctgcagtgttgccacaggaattggagctgcgtggaaagtagctgacgtagaggaaggttccactgtcgttatctttggccttggtgctgttggactagcggttgcagaaggagtcagattgcgtggagccgcaaaaatcatcggtgtggatagcaatcccgcgaaatttgaaataggtaaaagatttggaatcacggattttgtcaatcctgctttgtgtggggagaagaaaattagcgaggtgattagagaaatgacagatgtaggagctgactacagttttgaatgcattggtttagcttccttgatggaagaggcattcaagagtactcgcccgggatcgggtaaaacgatagtattggggatggaacaaaaggctttgccaataagcttgggtagttatgatcttctcagaggcagaactgtatgcggcactttatttggcggtttgaaacccaaacttgatattcctattctcgtggatcgttatttgaaaaaggagcttaatctagaggatctgattacacacgaattaagctttgaagaaattaacaaagctttccatttattggctgagggaaactctatccgttgcattatatggatggataaataatccttttatcttcatttgaattttcttcctagttcttctatgtcccaaaacatagtacttggtaacaaaaaaaaaaaaaaaaaaactcgagggggggcccggt

SEQ ID NO: 46903 - protein, 394 aa, Arabidopsis thaliana
  peptide (1)..(394): Ceres Seq. ID no. 13646916
  misc_feature (13)..(394): Homolog of NCBI NO: 7705215 NR Description: alcohol dehydrogenase ADH [Lycopersicon
  misc_feature (9)..(393): Homolog of NCBI NO: 34906828 NR Description: contains EST C99136(E10204)~similar to alcohol
  misc_feature (18)..(392): Homolog of NCBI NO: 15238330 NR Description: alcohol dehydrogenase (ADH), putative
  misc_feature (17)..(394): Homolog of NCBI NO: 1076579 NR Description: probable alcohol dehydrogenase (EC 1.1.1.1) ADH3a
  misc_feature (17)..(394): Homolog of NCBI NO: 7705214 NR Description: alcohol dehydrogenase ADH [Lycopersicon
  misc_feature (13)..(394): Homolog of NCBI NO: 11250327 NR Description: probable alcohol dehydrogenase (EC 1.1.1.1)
  misc_feature (13)..(394): Homolog of NCBI NO: 18415840 NR Description: alcohol dehydrogenase (ADH), putative
  misc_feature (13)..(394): Homolog of NCBI NO: 21618210 NR Description: alcohol dehydrogenase like protein [Arabidopsis
  misc_feature (9)..(394): Homolog of NCBI NO: 15219882 NR Description: alcohol dehydrogenase (ADH), putative
  misc_feature (9)..(394): Homolog of NCBI NO: 15219884 NR Description: alcohol dehydrogenase (ADH), putative
  misc_feature (13)..(394): Homolog of NCBI NO: 7705215 NR Description: alcohol dehydrogenase ADH [Lycopersicon
  misc_feature (9)..(393): Homolog of NCBI NO: 34906828 NR Description: contains EST C99136(E10204)~similar to alcohol
  misc_feature (18)..(392): Homolog of NCBI NO: 15238330 NR Description: alcohol dehydrogenase (ADH), putative
  misc_feature (17)..(394): Homolog of NCBI NO: 1076579 NR Description: probable alcohol dehydrogenase (EC 1.1.1.1) ADH3a
  misc_feature (17)..(394): Homolog of NCBI NO: 7705214 NR Description: alcohol dehydrogenase ADH [Lycopersicon
  misc_feature (13)..(394): Homolog of NCBI NO: 11250327 NR Description: probable alcohol dehydrogenase (EC 1.1.1.1)
  misc_feature (13)..(394): Homolog of NCBI NO: 18415840 NR Description: alcohol dehydrogenase (ADH), putative
  misc_feature (13)..(394): Homolog of NCBI NO: 21618210 NR Description: alcohol dehydrogenase like protein [Arabidopsis
  misc_feature (9)..(394): Homolog of NCBI NO: 15219882 NR Description: alcohol dehydrogenase (ADH), putative
  misc_feature (9)..(394): Homolog of NCBI NO: 15219884 NR Description: alcohol dehydrogenase (ADH), putative
EIPPSLFTMDKASITEGKPIRCKAAILRKAGEPLVIEEIQVDPPQAYEVRIKILCTSLCHTDVTFWKLDSGPLARFPRILGHEAVGVVESIGEKVDGFKQGDVVLPVFHPQCEECKECKSPKSNWCTRYTNDYLSNTRRYGMTSRFKDSLGEDIHHFIFVSSFTEYTVVDIAHLVKISPEIPVDIAALLSCSVATGIGAAWKVADVEEGSTVVIFGLGAVGLAVAEGVRLRGAAKIIGVDSNPAKFEIGKRFGITDFVNPALCGEKKISEVIREMTDVGADYSFECIGLASLMEEAFKSTRPGSGKTIVLGMEQKALPISLGSYDLLRGRTVCGTLFGGLKPKLDIPILVDRYLKKELNLEDLITHELSFEEINKAFHLLAEGNSIRCIIWMDK

SEQ ID NO: 46904 - protein, 386 aa, Arabidopsis thaliana
  peptide (1)..(386): Ceres Seq. ID no. 13646917
  misc_feature (5)..(386): Homolog of NCBI NO: 7705215 NR Description: alcohol dehydrogenase ADH [Lycopersicon
  misc_feature (1)..(385): Homolog of NCBI NO: 34906828 NR Description: contains EST C99136(E10204)~similar to alcohol
  misc_feature (10)..(384): Homolog of NCBI NO: 15238330 NR Description: alcohol dehydrogenase (ADH), putative
  misc_feature (9)..(386): Homolog of NCBI NO: 1076579 NR Description: probable alcohol dehydrogenase (EC 1.1.1.1) ADH3a
  misc_feature (9)..(386): Homolog of NCBI NO: 7705214 NR Description: alcohol dehydrogenase ADH [Lycopersicon
  misc_feature (5)..(386): Homolog of NCBI NO: 11250327 NR Description: probable alcohol dehydrogenase (EC 1.1.1.1)
  misc_feature (5)..(386): Homolog of NCBI NO: 18415840 NR Description: alcohol dehydrogenase (ADH), putative
  misc_feature (5)..(386): Homolog of NCBI NO: 21618210 NR Description: alcohol dehydrogenase like protein [Arabidopsis
  misc_feature (1)..(386): Homolog of NCBI NO: 15219882 NR Description: alcohol dehydrogenase (ADH), putative
  misc_feature (1)..(386): Homolog of NCBI NO: 15219884 NR Description: alcohol dehydrogenase (ADH), putative
  misc_feature (5)..(386): Homolog of NCBI NO: 7705215 NR Description: alcohol dehydrogenase ADH [Lycopersicon
  misc_feature (1)..(385): Homolog of NCBI NO: 34906828 NR Description: contains EST C99136(E10204)~similar to alcohol
  misc_feature (10)..(384): Homolog of NCBI NO: 15238330 NR Description: alcohol dehydrogenase (ADH), putative
  misc_feature (9)..(386): Homolog of NCBI NO: 1076579 NR Description: probable alcohol dehydrogenase (EC 1.1.1.1) ADH3a
  misc_feature (9)..(386): Homolog of NCBI NO: 7705214 NR Description: alcohol dehydrogenase ADH [Lycopersicon
  misc_feature (5)..(386): Homolog of NCBI NO: 11250327 NR Description: probable alcohol dehydrogenase (EC 1.1.1.1)
  misc_feature (5)..(386): Homolog of NCBI NO: 18415840 NR Description: alcohol dehydrogenase (ADH), putative
  misc_feature (5)..(386): Homolog of NCBI NO: 21618210 NR Description: alcohol dehydrogenase like protein [Arabidopsis
  misc_feature (1)..(386): Homolog of NCBI NO: 15219882 NR Description: alcohol dehydrogenase (ADH), putative
  misc_feature (1)..(386): Homolog of NCBI NO: 15219884 NR Description: alcohol dehydrogenase (ADH), putative
MDKASITEGKPIRCKAAILRKAGEPLVIEEIQVDPPQAYEVRIKILCTSLCHTDVTFWKLDSGPLARFPRILGHEAVGVVESIGEKVDGFKQGDVVLPVFHPQCEECKECKSPKSNWCTRYTNDYLSNTRRYGMTSRFKDSLGEDIHHFIFVSSFTEYTVVDIAHLVKISPEIPVDIAALLSCSVATGIGAAWKVADVEEGSTVVIFGLGAVGLAVAEGVRLRGAAKIIGVDSNPAKFEIGKRFGITDFVNPALCGEKKISEVIREMTDVGADYSFECIGLASLMEEAFKSTRPGSGKTIVLGMEQKALPISLGSYDLLRGRTVCGTLFGGLKPKLDIPILVDRYLKKELNLEDLITHELSFEEINKAFHLLAEGNSIRCIIWMDK

SEQ ID NO: 46905 - protein, 253 aa, Arabidopsis thaliana
  peptide (1)..(253): Ceres Seq. ID no. 13646918
  misc_feature (1)..(253): Homolog of NCBI NO: 7705215 NR Description: alcohol dehydrogenase ADH [Lycopersicon
  misc_feature (1)..(252): Homolog of NCBI NO: 34906828 NR Description: contains EST C99136(E10204)~similar to alcohol
  misc_feature (1)..(251): Homolog of NCBI NO: 15238330 NR Description: alcohol dehydrogenase (ADH), putative
  misc_feature (1)..(253): Homolog of NCBI NO: 1076579 NR Description: probable alcohol dehydrogenase (EC 1.1.1.1) ADH3a
  misc_feature (1)..(253): Homolog of NCBI NO: 7705214 NR Description: alcohol dehydrogenase ADH [Lycopersicon
  misc_feature (1)..(253): Homolog of NCBI NO: 11250327 NR Description: probable alcohol dehydrogenase (EC 1.1.1.1)
  misc_feature (1)..(253): Homolog of NCBI NO: 18415840 NR Description: alcohol dehydrogenase (ADH), putative
  misc_feature (1)..(253): Homolog of NCBI NO: 21618210 NR Description: alcohol dehydrogenase like protein [Arabidopsis
  misc_feature (1)..(253): Homolog of NCBI NO: 15219882 NR Description: alcohol dehydrogenase (ADH), putative
  misc_feature (1)..(253): Homolog of NCBI NO: 15219884 NR Description: alcohol dehydrogenase (ADH), putative
  misc_feature (1)..(253): Homolog of NCBI NO: 7705215 NR Description: alcohol dehydrogenase ADH [Lycopersicon
  misc_feature (1)..(252): Homolog of NCBI NO: 34906828 NR Description: contains EST C99136(E10204)~similar to alcohol
  misc_feature (1)..(251): Homolog of NCBI NO: 15238330 NR Description: alcohol dehydrogenase (ADH), putative
  misc_feature (1)..(253): Homolog of NCBI NO: 1076579 NR Description: probable alcohol dehydrogenase (EC 1.1.1.1) ADH3a
  misc_feature (1)..(253): Homolog of NCBI NO: 7705214 NR Description: alcohol dehydrogenase ADH [Lycopersicon
  misc_feature (1)..(253): Homolog of NCBI NO: 11250327 NR Description: probable alcohol dehydrogenase (EC 1.1.1.1)
  misc_feature (1)..(253): Homolog of NCBI NO: 18415840 NR Description: alcohol dehydrogenase (ADH), putative
  misc_feature (1)..(253): Homolog of NCBI NO: 21618210 NR Description: alcohol dehydrogenase like protein [Arabidopsis
  misc_feature (1)..(253): Homolog of NCBI NO: 15219882 NR Description: alcohol dehydrogenase (ADH), putative
  misc_feature (1)..(253): Homolog of NCBI NO: 15219884 NR Description: alcohol dehydrogenase (ADH), putative
MTSRFKDSLGEDIHHFIFVSSFTEYTVVDIAHLVKISPEIPVDIAALLSCSVATGIGAAWKVADVEEGSTVVIFGLGAVGLAVAEGVRLRGAAKIIGVDSNPAKFEIGKRFGITDFVNPALCGEKKISEVIREMTDVGADYSFECIGLASLMEEAFKSTRPGSGKTIVLGMEQKALPISLGSYDLLRGRTVCGTLFGGLKPKLDIPILVDRYLKKELNLEDLITHELSFEEINKAFHLLAEGNSIRCIIWMDK

SEQ ID NO: 46906 - DNA, 2061 bp, Arabidopsis thaliana
  misc_feature (1)..(2061): Ceres Seq. ID no. 12600798
  misc_feature: MA Experiment ID: 20000166 Result: Up-regulated in Transcription
  misc_feature: MA Experiment 20000166 PARAMETER Experiment Name: At_100uM_ABA_P Parameter: Age (day) Value: 14
  misc_feature: MA Experiment 20000166 PARAMETER Experiment Name: At_100uM_ABA_P Parameter: Organism Value: A. thaliana
  misc_feature: MA Experiment 20000166 PARAMETER Experiment Name: At_100uM_ABA_P Parameter: Plant Line Value: WS
  misc_feature: MA Experiment 20000166 PARAMETER Experiment Name: At_100uM_ABA_P Parameter: Timepoint (hr) Value: 1
  misc_feature: MA Experiment 20000166 PARAMETER Experiment Name: At_100uM_ABA_P Parameter: Tissue Value: Aerial
  misc_feature: MA Experiment 20000166 PARAMETER Experiment Name: At_100uM_ABA_P Parameter: Treatment Value: 100uM ABA vs. No Treatment
  misc_feature: MA Experiment ID: 20000169 Result: Up-regulated in Transcription
  misc_feature: MA Experiment 20000169 PARAMETER Experiment Name: At_100uM_ABA_P Parameter: Age (day) Value: 14
  misc_feature: MA Experiment 20000169 PARAMETER Experiment Name: At_100uM_ABA_P Parameter: Organism Value: A. thaliana
  misc_feature: MA Experiment 20000169 PARAMETER Experiment Name: At_100uM_ABA_P Parameter: Plant Line Value: WS
  misc_feature: MA Experiment 20000169 PARAMETER Experiment Name: At_100uM_ABA_P Parameter: Timepoint (hr) Value: 6
  misc_feature: MA Experiment 20000169 PARAMETER Experiment Name: At_100uM_ABA_P Parameter: Tissue Value: Aerial
  misc_feature: MA Experiment 20000169 PARAMETER Experiment Name: At_100uM_ABA_P Parameter: Treatment Value: 100uM ABA vs. No Treatment
  misc_feature: MA Experiment ID: 20000436 Result: Up-regulated in Transcription
  misc_feature: MA Experiment 20000436 PARAMETER Experiment Name: At_Drought_P Parameter: Age (day) Value: 7
  misc_feature: MA Experiment 20000436 PARAMETER Experiment Name: At_Drought_P Parameter: Organism Value: A. thaliana
  misc_feature: MA Experiment 20000436 PARAMETER Experiment Name: At_Drought_P Parameter: Plant Line Value: WS
  misc_feature: MA Experiment 20000436 PARAMETER Experiment Name: At_Drought_P Parameter: Timepoint (hr) Value: 12
  misc_feature: MA Experiment 20000436 PARAMETER Experiment Name: At_Drought_P Parameter: Tissue Value: Whole Plant
  misc_feature: MA Experiment 20000436 PARAMETER Experiment Name: At_Drought_P Parameter: Treatment Value: Drought vs. No Drought
  misc_feature: MA Experiment ID: 20000437 Result: Up-regulated in Transcription
  misc_feature: MA Experiment 20000437 PARAMETER Experiment Name: At_Drought_P Parameter: Age (day) Value: 8
  misc_feature: MA Experiment 20000437 PARAMETER Experiment Name: At_Drought_P Parameter: Organism Value: A. thaliana
  misc_feature: MA Experiment 20000437 PARAMETER Experiment Name: At_Drought_P Parameter: Plant Line Value: WS
  misc_feature: MA Experiment 20000437 PARAMETER Experiment Name: At_Drought_P Parameter: Timepoint (hr) Value: 24
  misc_feature: MA Experiment 20000437 PARAMETER Experiment Name: At_Drought_P Parameter: Tissue Value: Whole Plant
  misc_feature: MA Experiment 20000437 PARAMETER Experiment Name: At_Drought_P Parameter: Treatment Value: Drought vs. No Drought
  misc_feature: MA Experiment ID: 20000438 Result: Up-regulated in Transcription
  misc_feature: MA Experiment 20000438 PARAMETER Experiment Name: At_Shoots__P Parameter: Age (day) Value: 14
  misc_feature: MA Experiment 20000438 PARAMETER Experiment Name: At_Shoots__P Parameter: Tissue Value: Shoots vs. Whole Plant
  misc_feature: MA Experiment ID: 20000453 Result: Up-regulated in Transcription
  misc_feature: MA Experiment 20000453 PARAMETER Experiment Name: At_100uM_ABA_P Parameter: Age (day) Value: 15
  misc_feature: MA Experiment 20000453 PARAMETER Experiment Name: At_100uM_ABA_P Parameter: Organism Value: A. thaliana
  misc_feature: MA Experiment 20000453 PARAMETER Experiment Name: At_100uM_ABA_P Parameter: Plant Line Value: WS
  misc_feature: MA Experiment 20000453 PARAMETER Experiment Name: At_100uM_ABA_P Parameter: Timepoint (hr) Value: 24
  misc_feature: MA Experiment 20000453 PARAMETER Experiment Name: At_100uM_ABA_P Parameter: Tissue Value: Aerial
  misc_feature: MA Experiment 20000453 PARAMETER Experiment Name: At_100uM_ABA_P Parameter: Treatment Value: 100uM ABA vs. No Treatment
  misc_feature: MA Experiment ID: 20000455 Result: Up-regulated in Transcription
  misc_feature: MA Experiment 20000455 PARAMETER Experiment Name: At_100uM_ABA_P Parameter: Age (day) Value: 16
  misc_feature: MA Experiment 20000455 PARAMETER Experiment Name: At_100uM_ABA_P Parameter: Organism Value: A. thaliana
  misc_feature: MA Experiment 20000455 PARAMETER Experiment Name: At_100uM_ABA_P Parameter: Plant Line Value: WS
  misc_feature: MA Experiment 20000455 PARAMETER Experiment Name: At_100uM_ABA_P Parameter: Timepoint (hr) Value: 48
  misc_feature: MA Experiment 20000455 PARAMETER Experiment Name: At_100uM_ABA_P Parameter: Tissue Value: Aerial
  misc_feature: MA Experiment 20000455 PARAMETER Experiment Name: At_100uM_ABA_P Parameter: Treatment Value: 100uM ABA vs. No Treatment
  misc_feature: MA Experiment ID: 20001554 Result: Up-regulated in Transcription
  misc_feature: MA Experiment 20001554 PARAMETER Experiment Name: At_Drought_Soil_Dry_P Parameter: Age (day) Value: 21
  misc_feature: MA Experiment 20001554 PARAMETER Experiment Name: At_Drought_Soil_Dry_P Parameter: Organism Value: A. thaliana
  misc_feature: MA Experiment 20001554 PARAMETER Experiment Name: At_Drought_Soil_Dry_P Parameter: Plant Line Value: WS
  misc_feature: MA Experiment 20001554 PARAMETER Experiment Name: At_Drought_Soil_Dry_P Parameter: Post Timepoint (hr) Value: None
  misc_feature: MA Experiment 20001554 PARAMETER Experiment Name: At_Drought_Soil_Dry_P Parameter: Post-Treatment Value: None
  misc_feature: MA Experiment 20001554 PARAMETER Experiment Name: At_Drought_Soil_Dry_P Parameter: Timepoint (day) Value: 7
  misc_feature: MA Experiment 20001554 PARAMETER Experiment Name: At_Drought_Soil_Dry_P Parameter: Treatment Value: Drought vs. No Drought
  misc_feature: MA Experiment ID: 20001904 Result: Up-regulated in Transcription
  misc_feature: MA Experiment 20001904 PARAMETER Experiment Name: At_Drought_Reproduction_P Parameter: Age (day) Value: 37
  misc_feature: MA Experiment 20001904 PARAMETER Experiment Name: At_Drought_Reproduction_P Parameter: Organism Value: A. thaliana
  misc_feature: MA Experiment 20001904 PARAMETER Experiment Name: At_Drought_Reproduction_P Parameter: Plant Line Value: WS
  misc_feature: MA Experiment 20001904 PARAMETER Experiment Name: At_Drought_Reproduction_P Parameter: Timepoint (day) Value: 7
  misc_feature: MA Experiment 20001904 PARAMETER Experiment Name: At_Drought_Reproduction_P Parameter: Tissue Value: Rosettes
  misc_feature: MA Experiment 20001904 PARAMETER Experiment Name: At_Drought_Reproduction_P Parameter: Treatment Value: Drought vs. No Drought
  misc_feature: MA Experiment ID: 20001905 Result: Up-regulated in Transcription
  misc_feature: MA Experiment 20001905 PARAMETER Experiment Name: At_Drought_Reproduction_P Parameter: Age (day) Value: 40
  misc_feature: MA Experiment 20001905 PARAMETER Experiment Name: At_Drought_Reproduction_P Parameter: Organism Value: A. thaliana
  misc_feature: MA Experiment 20001905 PARAMETER Experiment Name: At_Drought_Reproduction_P Parameter: Plant Line Value: WS
  misc_feature: MA Experiment 20001905 PARAMETER Experiment Name: At_Drought_Reproduction_P Parameter: Timepoint (day) Value: 10
  misc_feature: MA Experiment 20001905 PARAMETER Experiment Name: At_Drought_Reproduction_P Parameter: Tissue Value: Rosettes
  misc_feature: MA Experiment 20001905 PARAMETER Experiment Name: At_Drought_Reproduction_P Parameter: Treatment Value: Drought vs. No Drought
  misc_feature: MA Experiment ID: 20001911 Result: Up-regulated in Transcription
  misc_feature: MA Experiment 20001911 PARAMETER Experiment Name: At_Drought_Reproduction_P Parameter: Age (day) Value: 40
  misc_feature: MA Experiment 20001911 PARAMETER Experiment Name: At_Drought_Reproduction_P Parameter: Organism Value: A. thaliana
  misc_feature: MA Experiment 20001911 PARAMETER Experiment Name: At_Drought_Reproduction_P Parameter: Plant Line Value: WS
  misc_feature: MA Experiment 20001911 PARAMETER Experiment Name: At_Drought_Reproduction_P Parameter: Timepoint (day) Value: 10
  misc_feature: MA Experiment 20001911 PARAMETER Experiment Name: At_Drought_Reproduction_P Parameter: Tissue Value: Flowers
  misc_feature: MA Experiment 20001911 PARAMETER Experiment Name: At_Drought_Reproduction_P Parameter: Treatment Value: Drought vs. No Drought
aacaccgtgttgttcttgtttcctttttttctgtttcgctttatgaacttcggagagaagacgaaatctcgctcgctttcgccgccgtgatatttgattctccgatcactacaacgattccgatctgtcctccgttgatttcgatcctgattttgatattgtttcgacatgaaattggtgtgatctcgtttcgagtttcgtggcgtatttgcttattttaagtgtgtggaatcgatttttaatgggggataattctggtagaagtagaaactctatgatggcaactgtttcttctgggaaagagttgttacctaaaagaagcttagtagctgctattccaagagctgttcagcagacaatctctaagcatgtttcttttgggagtaatggtagatttggaagtggaaccgctcgtaatgcagctgtgtttctgcttaaaatcgctgttttagaagttgttcgaagggtttcaaaggctaaatgtcctcatttgtggaatagtcttcaggcgttgcaatgtctttgttatcctcctcttaagtggattcaaagatgggctcctttcaaggagttgatcaatgcaatgcagatgttgtctcggccattgttggtcatcacgatagctgaggctctgacagaccagtcagagttaaagcaagaagcctcaggtggtaccaattctcatgcatcttcagaatcagaatcacaatctgactcgcagactttacagtctccatcagatataagaattgaagatgaggctccacttcctgtaatttcacaagactggcttagaaaactctatgaagaactggaaaagcagagacttagcttaccagagagactcaatgaagacgagcttcatagattctacagggtgtcaaatggagacttcacatccttactatcttcgataaaaaagacaattcattggagggagacttacagaattctttctgaagaagaacttgagacatggtcaagtttactcttttggcatggatatgataagaaccaacgaccttgcctcattgttcgtttggggctagcttttctaaagttgccatctcatgagagacctcgtttcgctcaggcaatcatatctcaggtagagcacggcgttttgcatcttctgacccctgagaattcagaacttacagtgttagtcgattgtgaaggattatctcctctgaggattcccatgcagatgatgagatcttgttcttccattcttcaagatcacttccctaaccgtcttggctgcctattcatcattcgcctccctcctgttgtccgtgtcatttcccagactttcatccaaattcttagaccaaccacacgcaagaagctgagaattgaaggggaaactttccatcgagtcctctctgaatacctccagacacttccttcataccttggtagcaactgcaactgcaaaagatgctcaaatctcaacgaacaagatccaccacagccacaaacacacccaagaagaaagagaagaagctcgagtgaaacagagaagctagacgacagccactggagttacaatgcccagacacctgatttatcctatgaagacgagccgagcctgaacatatgcagccaagttctgcgaacagcagtcgtgttcttactcatgatatggctcttcggtgcactactagctggatttgctgatcctgagagcagacccttttaagcttccataaggtaagaaccatccataattaatttcaggcacatgcgtatgtcttctgtatacatagtaatagtaagtgtgataggcgttgatatatacatagtcattagtgaataaaccccatctctcatccagcgtggtcattgcaaacgcggactcaacgtagttttgggtcttggtttagggttaatggttgttgcggttgagtacatttgtacgttgggagaaagtaattatggtccagttaaatcgtgatgagactttggtcaccctctgcagtaaaactctgtgtacaattgttgccattgttggtaatgttttgtaaaaatcagatttatttaatgtgattagaaattgag

SEQ ID NO: 46907 - protein, 486 aa, Arabidopsis thaliana
  peptide (1)..(486): Ceres Seq. ID no. 12600799
  misc_feature (249)..(424): Pfam Name: CRAL/TRIO domain Pfam Description: CRAL/TRIO domain
  misc_feature (8)..(483): Homolog of NCBI NO: 29124131 NR Description: unknown protein [Oryza sativa (japonica
  misc_feature (1)..(486): Homolog of NCBI NO: 15231434 NR Description: SEC14 cytosolic factor, putative
MGDNSGRSRNSMMATVSSGKELLPKRSLVAAIPRAVQQTISKHVSFGSNGRFGSGTARNAAVFLLKIAVLEVVRRVSKAKCPHLWNSLQALQCLCYPPLKWIQRWAPFKELINAMQMLSRPLLVITIAEALTDQSELKQEASGGTNSHASSESESQSDSQTLQSPSDIRIEDEAPLPVISQDWLRKLYEELEKQRLSLPERLNEDELHRFYRVSNGDFTSLLSSIKKTIHWRETYRILSEEELETWSSLLFWHGYDKNQRPCLIVRLGLAFLKLPSHERPRFAQAIISQVEHGVLHLLTPENSELTVLVDCEGLSPLRIPMQMMRSCSSILQDHFPNRLGCLFIIRLPPVVRVISQTFIQILRPTTRKKLRIEGETFHRVLSEYLQTLPSYLGSNCNCKRCSNLNEQDPPQPQTHPRRKRRSSSETEKLDDSHWSYNAQTPDLSYEDEPSLNICSQVLRTAVVFLLMIWLFGALLAGFADPESRPF

SEQ ID NO: 46908 - protein, 475 aa, Arabidopsis thaliana
  peptide (1)..(475): Ceres Seq. ID no. 12600800
  misc_feature (238)..(413): Pfam Name: CRAL/TRIO domain Pfam Description: CRAL/TRIO domain
  misc_feature (1)..(472): Homolog of NCBI NO: 29124131 NR Description: unknown protein [Oryza sativa (japonica
  misc_feature (1)..(475): Homolog of NCBI NO: 15231434 NR Description: SEC14 cytosolic factor, putative
MMATVSSGKELLPKRSLVAAIPRAVQQTISKHVSFGSNGRFGSGTARNAAVFLLKIAVLEVVRRVSKAKCPHLWNSLQALQCLCYPPLKWIQRWAPFKELINAMQMLSRPLLVITIAEALTDQSELKQEASGGTNSHASSESESQSDSQTLQSPSDIRIEDEAPLPVISQDWLRKLYEELEKQRLSLPERLNEDELHRFYRVSNGDFTSLLSSIKKTIHWRETYRILSEEELETWSSLLFWHGYDKNQRPCLIVRLGLAFLKLPSHERPRFAQAIISQVEHGVLHLLTPENSELTVLVDCEGLSPLRIPMQMMRSCSSILQDHFPNRLGCLFIIRLPPVVRVISQTFIQILRPTTRKKLRIEGETFHRVLSEYLQTLPSYLGSNCNCKRCSNLNEQDPPQPQTHPRRKRRSSSETEKLDDSHWSYNAQTPDLSYEDEPSLNICSQVLRTAVVFLLMIWLFGALLAGFADPESRPF

SEQ ID NO: 46909 - protein, 474 aa, Arabidopsis thaliana
  peptide (1)..(474): Ceres Seq. ID no. 12600801
  misc_feature (237)..(412): Pfam Name: CRAL/TRIO domain Pfam Description: CRAL/TRIO domain
  misc_feature (1)..(471): Homolog of NCBI NO: 29124131 NR Description: unknown protein [Oryza sativa (japonica
  misc_feature (1)..(474): Homolog of NCBI NO: 15231434 NR Description: SEC14 cytosolic factor, putative
MATVSSGKELLPKRSLVAAIPRAVQQTISKHVSFGSNGRFGSGTARNAAVFLLKIAVLEVVRRVSKAKCPHLWNSLQALQCLCYPPLKWIQRWAPFKELINAMQMLSRPLLVITIAEALTDQSELKQEASGGTNSHASSESESQSDSQTLQSPSDIRIEDEAPLPVISQDWLRKLYEELEKQRLSLPERLNEDELHRFYRVSNGDFTSLLSSIKKTIHWRETYRILSEEELETWSSLLFWHGYDKNQRPCLIVRLGLAFLKLPSHERPRFAQAIISQVEHGVLHLLTPENSELTVLVDCEGLSPLRIPMQMMRSCSSILQDHFPNRLGCLFIIRLPPVVRVISQTFIQILRPTTRKKLRIEGETFHRVLSEYLQTLPSYLGSNCNCKRCSNLNEQDPPQPQTHPRRKRRSSSETEKLDDSHWSYNAQTPDLSYEDEPSLNICSQVLRTAVVFLLMIWLFGALLAGFADPESRPF

SEQ ID NO: 46910 - DNA, 1443 bp, Arabidopsis thaliana; identical to SEQ ID NO: 23501
  misc_feature (1)..(1443): Ceres Seq. ID no. 12601407
  misc_feature: MA Experiment ID: 108434 Result: Up-regulated in Transcription
  misc_feature: MA Experiment 108434 PARAMETER Experiment Name: At_Root_Tips_cDNA_P Parameter: Tissue Value: Root Tips
  misc_feature: MA Experiment ID: 108463 Result: Up-regulated in Transcription
  misc_feature: MA Experiment 108463 PARAMETER Experiment Name: At_Germinating_Seeds_cDNA_P Parameter: Age (day) Value: 3 vs. 0
  misc_feature: MA Experiment 108463 PARAMETER Experiment Name: At_Germinating_Seeds_cDNA_P Parameter: Tissue Value: Germinating Seeds
  misc_feature: MA Experiment ID: 108464 Result: Up-regulated in Transcription
  misc_feature: MA Experiment 108464 PARAMETER Experiment Name: At_Germinating_Seeds_cDNA_P Parameter: Age (day) Value: 4 vs. 0
  misc_feature: MA Experiment 108464 PARAMETER Experiment Name: At_Germinating_Seeds_cDNA_P Parameter: Tissue Value: Germinating Seeds
  misc_feature: MA Experiment ID: 108573 Result: Up-regulated in Transcription
  misc_feature: MA Experiment 108573 PARAMETER Experiment Name: At_Drought_cDNA_P Parameter: Timepoint (hr) Value: 6
  misc_feature: MA Experiment 108573 PARAMETER Experiment Name: At_Drought_cDNA_P Parameter: Tissue Value: Aerial
  misc_feature: MA Experiment 108573 PARAMETER Experiment Name: At_Drought_cDNA_P Parameter: Treatment Value: Drought vs. No Drought
  misc_feature: MA Experiment ID: 20000087 Result: Down-regulated in Transcription
  misc_feature: MA Experiment 20000087 PARAMETER Experiment Name: At_100uM_ABA_Mutants_cDNA_P Parameter: Plant Line Value: WS
  misc_feature: MA Experiment 20000087 PARAMETER Experiment Name: At_100uM_ABA_Mutants_cDNA_P Parameter: Timepoint (hr) Value: 6
  misc_feature: MA Experiment 20000087 PARAMETER Experiment Name: At_100uM_ABA_Mutants_cDNA_P Parameter: Tissue Value: Aerial
  misc_feature: MA Experiment 20000087 PARAMETER Experiment Name: At_100uM_ABA_Mutants_cDNA_P Parameter: Treatment Value: 100uM ABA vs. No Treatment
  misc_feature: MA Experiment ID: 20000111 Result: Up-regulated in Transcription
  misc_feature: MA Experiment 20000111 PARAMETER Experiment Name: At_42deg_Heat_cDNA_P Parameter: Temperature (deg C) Value: 42 vs. 22
  misc_feature: MA Experiment 20000111 PARAMETER Experiment Name: At_42deg_Heat_cDNA_P Parameter: Timepoint (hr) Value: 6
  misc_feature: MA Experiment 20000111 PARAMETER Experiment Name: At_42deg_Heat_cDNA_P Parameter: Tissue Value: Aerial
  misc_feature: MA Experiment ID: 20000113 Result: Up-regulated in Transcription
  misc_feature: MA Experiment 20000113 PARAMETER Experiment Name: At_42deg_Heat_cDNA_P Parameter: Temperature (deg C) Value: 42 vs. 22
  misc_feature: MA Experiment 20000113 PARAMETER Experiment Name: At_42deg_Heat_cDNA_P Parameter: Timepoint (hr) Value: 8
  misc_feature: MA Experiment 20000113 PARAMETER Experiment Name: At_42deg_Heat_cDNA_P Parameter: Tissue Value: Aerial
  misc_feature: MA Experiment ID: 20000224 Result: Down-regulated in Transcription
  misc_feature: MA Experiment ID: 20000307 Result: Up-regulated in Transcription
  misc_feature: MA Experiment 20000307 PARAMETER Experiment Name: At_Germinating_Seeds_Sub_P Parameter: Age (hr) Value: 24 vs. 0
  misc_feature: MA Experiment 20000307 PARAMETER Experiment Name: At_Germinating_Seeds_Sub_P Parameter: Organism Value: A. thaliana
  misc_feature: MA Experiment 20000307 PARAMETER Experiment Name: At_Germinating_Seeds_Sub_P Parameter: Plant Line Value: WS
  misc_feature: MA Experiment 20000307 PARAMETER Experiment Name: At_Germinating_Seeds_Sub_P Parameter: Tissue Value: Germinating Seeds
  misc_feature: MA Experiment ID: 20000328 Result: Up-regulated in Transcription
  misc_feature: MA Experiment 20000328 PARAMETER Experiment Name: At_42deg_Heat_Sub_P Parameter: Age (day) Value: 14
  misc_feature: MA Experiment 20000328 PARAMETER Experiment Name: At_42deg_Heat_Sub_P Parameter: Organism Value: A. thaliana
  misc_feature: MA Experiment 20000328 PARAMETER Experiment Name: At_42deg_Heat_Sub_P Parameter: Plant Line Value: WS
  misc_feature: MA Experiment 20000328 PARAMETER Experiment Name: At_42deg_Heat_Sub_P Parameter: Temperature (deg C) Value: 42 vs. 22
  misc_feature: MA Experiment 20000328 PARAMETER Experiment Name: At_42deg_Heat_Sub_P Parameter: Timepoint (hr) Value: 6
  misc_feature: MA Experiment 20000328 PARAMETER Experiment Name: At_42deg_Heat_Sub_P Parameter: Tissue Value: Aerial
  misc_feature: MA Experiment ID: 20000355 Result: Up-regulated in Transcription
  misc_feature: MA Experiment 20000355 PARAMETER Experiment Name: At_Siliques_Sub_P Parameter: Age (day) Value: 21
  misc_feature: MA Experiment 20000355 PARAMETER Experiment Name: At_Siliques_Sub_P Parameter: Organism Value: A. thaliana
  misc_feature: MA Experiment 20000355 PARAMETER Experiment Name: At_Siliques_Sub_P Parameter: Plant Line Value: WS
  misc_feature: MA Experiment 20000355 PARAMETER Experiment Name: At_Siliques_Sub_P Parameter: Tissue Value: Less Than 5mm Siliques vs. Whole Plant
  misc_feature: Phenotype: ROSETTE LEAVES Petiole Length-Short Petioles
  misc_feature: Phenotype: ROSETTE LEAVES Shape-Serrate
  misc_feature: Phenotype: WHOLE PLANT Size-Small
  misc_feature: Phenotype: WHOLE PLANT Other
  misc_feature: Phenotype: ROSETTE LEAVES Petiole Length-Short Petioles
  misc_feature: Phenotype: ROSETTE LEAVES Shape-Serrate
  misc_feature: Phenotype: WHOLE PLANT Size-Small
  misc_feature: Phenotype: WHOLE PLANT Other
  misc_feature: Phenotype: INFLORESCENCE Flowering Time-Late Flowering
  misc_feature: Phenotype: ROSETTE LEAVES Petiole Length-Short Petioles
  misc_feature: Phenotype: ROSETTE LEAVES Shape-Serrate
  misc_feature: Phenotype: WHOLE PLANT Size-Small
  misc_feature: Phenotype: WHOLE PLANT Other
  misc_feature: Phenotype: INFLORESCENCE Flowering Time-Late Flowering

SEQ ID NO: 46911 - protein, 393 aa, Arabidopsis thaliana; identical to SEQ ID NO: 23502
  peptide (1)..(393): Ceres Seq. ID no. 12601408
  misc_feature (116)..(238): Pfam Name: S-adenosylmethionine synthetase, central domain Pfam Description: S-adenosylmethionine synthetase, central domain
  misc_feature (116)..(238): Pfam Name: S-adenosylmethionine synthetase, central domain Pfam Description: S-adenosylmethionine synthetase, central domain
  misc_feature (1)..(393): Homolog of NCBI NO: 16226059 NR Description: S-adenosyl-L-methionine synthetase [Dendrobium
  misc_feature (1)..(390): Homolog of NCBI NO: 3024126 NR Description: S-adenosylmethionine synthetase 1 (Methionine
  misc_feature (1)..(393): Homolog of NCBI NO: 13540318 NR Description: S-adenosyl-L-methionine synthetase [Elaeagnus
  misc_feature (1)..(393): Homolog of NCBI NO: 13540316 NR Description: S-adenosyl-L-methionine synthetase [Elaeagnus
  misc_feature (1)..(393): Homolog of NCBI NO: 15217781 NR Description: s-adenosylmethionine synthetase
  misc_feature (1)..(393): Homolog of NCBI NO: 16226059 NR Description: S-adenosyl-L-methionine synthetase [Dendrobium
  misc_feature (1)..(393): Homolog of NCBI NO: 13540318 NR Description: S-adenosyl-L-methionine synthetase [Elaeagnus
  misc_feature (1)..(393): Homolog of NCBI NO: 15217781 NR Description: s-adenosylmethionine synthetase
  misc_feature (1)..(393): Homolog of NCBI NO: 15234354 NR Description: S-adenosylmethionine synthase 2
  misc_feature (1)..(393): Homolog of NCBI NO: 14600072 NR Description: S-adenosylmethionine synthetase [Brassica juncea]
  misc_feature (1)..(393): Homolog of NCBI NO: 14600068 NR Description: S-adenosylmethionine synthetase [Brassica juncea]
  misc_feature (1)..(393): Homolog of NCBI NO: 1346520 NR Description: S-adenosylmethionine synthetase (Methionine
  misc_feature (1)..(393): Homolog of NCBI NO: 81647 NR Description: methionine adenosyltransferase (EC 2.5.1.6) -
  misc_feature (1)..(393): Homolog of NCBI NO: 13540316 NR Description: S-adenosyl-L-methionine synthetase [Elaeagnus
  misc_feature (1)..(390): Homolog of NCBI NO: 3024126 NR Description: S-adenosylmethionine synthetase 1 (Methionine
  misc_feature (1)..(393): Homolog of NCBI NO: 81647 NR Description: methionine adenosyltransferase (EC 2.5.1.6) -
  misc_feature (1)..(393): Homolog of NCBI NO: 1346520 NR Description: S-adenosylmethionine synthetase (Methionine
  misc_feature (1)..(393): Homolog of NCBI NO: 14600068 NR Description: S-adenosylmethionine synthetase [Brassica juncea]
  misc_feature (1)..(393): Homolog of NCBI NO: 14600072 NR Description: S-adenosylmethionine synthetase [Brassica juncea]
  misc_feature (1)..(393): Homolog of NCBI NO: 15234354 NR Description: S-adenosylmethionine synthase 2

SEQ ID NO: 46912 - protein, 344 aa, Arabidopsis thaliana; identical to SEQ ID NO: 23503
  peptide (1)..(344): Ceres Seq. ID no. 12601409
  misc_feature (67)..(189): Pfam Name: S-adenosylmethionine synthetase, central domain Pfam Description: S-adenosylmethionine synthetase, central domain
  misc_feature (67)..(189): Pfam Name: S-adenosylmethionine synthetase, central domain Pfam Description: S-adenosylmethionine synthetase, central domain
  misc_feature (1)..(344): Homolog of NCBI NO: 16226059 NR Description: S-adenosyl-L-methionine synthetase [Dendrobium
  misc_feature (1)..(341): Homolog of NCBI NO: 3024126 NR Description: S-adenosylmethionine synthetase 1 (Methionine
  misc_feature (1)..(344): Homolog of NCBI NO: 13540318 NR Description: S-adenosyl-L-methionine synthetase [Elaeagnus
  misc_feature (1)..(344): Homolog of NCBI NO: 13540316 NR Description: S-adenosyl-L-methionine synthetase [Elaeagnus
  misc_feature (1)..(344): Homolog of NCBI NO: 15217781 NR Description: s-adenosylmethionine synthetase
  misc_feature (1)..(344): Homolog of NCBI NO: 16226059 NR Description: S-adenosyl-L-methionine synthetase [Dendrobium
  misc_feature (1)..(344): Homolog of NCBI NO: 13540318 NR Description: S-adenosyl-L-methionine synthetase [Elaeagnus
  misc_feature (1)..(344): Homolog of NCBI NO: 15217781 NR Description: s-adenosylmethionine synthetase
  misc_feature (1)..(344): Homolog of NCBI NO: 15234354 NR Description: S-adenosylmethionine synthase 2
  misc_feature (1)..(344): Homolog of NCBI NO: 14600072 NR Description: S-adenosylmethionine synthetase [Brassica juncea]
  misc_feature (1)..(344): Homolog of NCBI NO: 14600068 NR Description: S-adenosylmethionine synthetase [Brassica juncea]
  misc_feature (1)..(344): Homolog of NCBI NO: 1346520 NR Description: S-adenosylmethionine synthetase (Methionine
  misc_feature (1)..(344): Homolog of NCBI NO: 81647 NR Description: methionine adenosyltransferase (EC 2.5.1.6) -
  misc_feature (1)..(344): Homolog of NCBI NO: 13540316 NR Description: S-adenosyl-L-methionine synthetase [Elaeagnus
  misc_feature (1)..(341): Homolog of NCBI NO: 3024126 NR Description: S-adenosylmethionine synthetase 1 (Methionine
  misc_feature (1)..(344): Homolog of NCBI NO: 81647 NR Description: methionine adenosyltransferase (EC 2.5.1.6) -
  misc_feature (1)..(344): Homolog of NCBI NO: 1346520 NR Description: S-adenosylmethionine synthetase (Methionine
  misc_feature (1)..(344): Homolog of NCBI NO: 14600068 NR Description: S-adenosylmethionine synthetase [Brassica juncea]
  misc_feature (1)..(344): Homolog of NCBI NO: 14600072 NR Description: S-adenosylmethionine synthetase [Brassica juncea]
  misc_feature (1)..(344): Homolog of NCBI NO: 15234354 NR Description: S-adenosylmethionine synthase 2

SEQ ID NO: 46913 - protein, 342 aa, Arabidopsis thaliana; identical to SEQ ID NO: 23504
  peptide (1)..(342): Ceres Seq. ID no. 12601410
  misc_feature (65)..(187): Pfam Name: S-adenosylmethionine synthetase, central domain Pfam Description: S-adenosylmethionine synthetase, central domain
  misc_feature (65)..(187): Pfam Name: S-adenosylmethionine synthetase, central domain Pfam Description: S-adenosylmethionine synthetase, central domain
  misc_feature (1)..(342): Homolog of NCBI NO: 16226059 NR Description: S-adenosyl-L-methionine synthetase [Dendrobium
  misc_feature (1)..(339): Homolog of NCBI NO: 3024126 NR Description: S-adenosylmethionine synthetase 1 (Methionine
  misc_feature (1)..(342): Homolog of NCBI NO: 13540318 NR Description: S-adenosyl-L-methionine synthetase [Elaeagnus
  misc_feature (1)..(342): Homolog of NCBI NO: 13540316 NR Description: S-adenosyl-L-methionine synthetase [Elaeagnus
  misc_feature (1)..(342): Homolog of NCBI NO: 15217781 NR Description: s-adenosylmethionine synthetase
  misc_feature (1)..(342): Homolog of NCBI NO: 16226059 NR Description: S-adenosyl-L-methionine synthetase [Dendrobium
  misc_feature (1)..(342): Homolog of NCBI NO: 13540318 NR Description: S-adenosyl-L-methionine synthetase [Elaeagnus
  misc_feature (1)..(342): Homolog of NCBI NO: 15217781 NR Description: s-adenosylmethionine synthetase
  misc_feature (1)..(342): Homolog of NCBI NO: 15234354 NR Description: S-adenosylmethionine synthase 2
  misc_feature (1)..(342): Homolog of NCBI NO: 14600072 NR Description: S-adenosylmethionine synthetase [Brassica juncea]
  misc_feature (1)..(342): Homolog of NCBI NO: 14600068 NR Description: S-adenosylmethionine synthetase [Brassica juncea]
  misc_feature (1)..(342): Homolog of NCBI NO: 1346520 NR Description: S-adenosylmethionine synthetase (Methionine
  misc_feature (1)..(342): Homolog of NCBI NO: 81647 NR Description: methionine adenosyltransferase (EC 2.5.1.6) -
  misc_feature (1)..(342): Homolog of NCBI NO: 13540316 NR Description: S-adenosyl-L-methionine synthetase [Elaeagnus
  misc_feature (1)..(339): Homolog of NCBI NO: 3024126 NR Description: S-adenosylmethionine synthetase 1 (Methionine
  misc_feature (1)..(342): Homolog of NCBI NO: 81647 NR Description: methionine adenosyltransferase (EC 2.5.1.6) -
  misc_feature (1)..(342): Homolog of NCBI NO: 1346520 NR Description: S-adenosylmethionine synthetase (Methionine
  misc_feature (1)..(342): Homolog of NCBI NO: 14600068 NR Description: S-adenosylmethionine synthetase [Brassica juncea]
  misc_feature (1)..(342): Homolog of NCBI NO: 14600072 NR Description: S-adenosylmethionine synthetase [Brassica juncea]
  misc_feature (1)..(342): Homolog of NCBI NO: 15234354 NR Description: S-adenosylmethionine synthase 2

SEQ ID NO: 46914 - DNA, 1289 bp, Arabidopsis thaliana
  misc_feature (1)..(1289): Ceres Seq. ID no. 12575606
  misc_feature: MA Experiment ID: 20000265 Result: Up-regulated in Transcription
  misc_feature: MA Experiment 20000265 PARAMETER Experiment Name: At_Open_Flower_P Parameter: Age (day) Value: 21
  misc_feature: MA Experiment 20000265 PARAMETER Experiment Name: At_Open_Flower_P Parameter: Plant Line Value: WS
  misc_feature: MA Experiment 20000265 PARAMETER Experiment Name: At_Open_Flower_P Parameter: Tissue Value: Closed Flower vs. Whole Plant
gggctttgtaatggtctacaaaggataagaaaaaaccaaatccaaactaaagctatgcattttccacttgtttcggcttggaacaagataaggagaagcaaatcatatgatacggatccatgggtctacagaacagcagaatgctggcaaatcgaagatcaggcttctcagccaaggaagcgaagattcgggtcatcagtttataccctcaaggagatggaggaggccacaagttctttcagtgatgagaatctcctcggtaaaggaggctttggccgagtttaccaaggcactttaaaaacaggagaggttgttgcaatcaagaagatggatttacctacgtttaaaaaggctgacggagaaagagaatttcgtgtggaggtggatatcttgagcagactcgaccacccaaatctggtctctttgatcggctattgtgcagatgggaaacaccggttcctagtatatgaatatatgcaaaatggaaacctgcaagatcatttgaatgcaaaaataagctggccaataaggctcagaattgcactaggagcagcaaaaggactcgcgtatctccattcaagttcttctgttgggattccaattgttcacagagacttcaaatccaccaacgttctactagactccaattataatgcaaagatatccgactttggactagcaaagttgatgccagaaggaaaggatacttgtgtcacagcaagagttctaggaacattcggctatttcgacccagaatatacatcgacaggtaaacttactctacaaagcgacatttatgcatttggggttgtgctgctagaactacttactggacgcagagcagttgacttaactcagggcccaaatgaacagaacctggtgctacaggttaggaatatactgaatgatagaaagaaattgcgtaaggttatagatgtcgagctgcctcggaattcatacagcatggaagctataaccatgtttgctgatctagcatcacggtgcatccgtatagagagtaaagagcgaccttcagtgatggattgtgttaaggaactgcaactaattatctacacaaactcgaagggtggtttgggtgggacgattcctacattcagaaggctctagacactgaattcttcgaaacaagtaaaatggattactgtcatttttcctaaaatgagaggtcactgataaaaaaacccttgataaatataaacaaacaatactaattatgaattaccggataatttcaattcaacttccagctaggaaactttgatcaagcg

SEQ ID NO: 46915 - protein, 375 aa, Arabidopsis thaliana
  peptide (1)..(375): Ceres Seq. ID no. 12575607
  misc_feature (65)..(353): Homolog of NCBI NO: 15238886 NR Description: protein kinase -like protein; protein id:
  misc_feature (64)..(356): Homolog of NCBI NO: 15217992 NR Description: protein kinase, putative; protein id: At1g20650.1
  misc_feature (64)..(356): Homolog of NCBI NO: 8778594 NR Description: F5M15.3 [Arabidopsis thaliana]
  misc_feature (51)..(362): Homolog of NCBI NO: 28392990 NR Description: putative protein kinase [Arabidopsis thaliana]
  misc_feature (51)..(362): Homolog of NCBI NO: 15232294 NR Description: protein kinase, putative; protein id: At3g20530.1
  misc_feature (51)..(362): Homolog of NCBI NO: 11994140 NR Description: receptor protein kinase-like protein [Arabidopsis
  misc_feature (19)..(189): Homolog of NCBI NO: 30102706 NR Description: At1g24030 [Arabidopsis thaliana]
  misc_feature (73)..(375): Homolog of NCBI NO: 25287587 NR Description: protein T23E23.18 [imported] - Arabidopsis
  misc_feature (73)..(375): Homolog of NCBI NO: 15221649 NR Description: protein kinase, putative; protein id: At1g24030.1
  misc_feature (42)..(375): Homolog of NCBI NO: 30102706 NR Description: At1g24030 [Arabidopsis thaliana]
GLCNGLQRIRKNQIQTKAMHFPLVSAWNKIRRSKSYDTDPWVYRTAECWQIEDQASQPRKRRFGSSVYTLKEMEEATSSFSDENLLGKGGFGRVYQGTLKTGEVVAIKKMDLPTFKKADGEREFRVEVDILSRLDHPNLVSLIGYCADGKHRFLVYEYMQNGNLQDHLNAKISWPIRLRIALGAAKGLAYLHSSSSVGIPIVHRDFKSTNVLLDSNYNAKISDFGLAKLMPEGKDTCVTARVLGTFGYFDPEYTSTGKLTLQSDIYAFGVVLLELLTGRRAVDLTQGPNEQNLVLQVRNILNDRKKLRKVIDVELPRNSYSMEAITMFADLASRCIRIESKERPSVMDCVKELQLIIYTNSKGGLGGTIPTFRRL

SEQ ID NO: 46916 - protein, 357 aa, Arabidopsis thaliana
  peptide (1)..(357): Ceres Seq. ID no. 12575608
  misc_feature (47)..(335): Homolog of NCBI NO: 15238886 NR Description: protein kinase -like protein; protein id:
  misc_feature (46)..(338): Homolog of NCBI NO: 15217992 NR Description: protein kinase, putative; protein id: At1g20650.1
  misc_feature (46)..(338): Homolog of NCBI NO: 8778594 NR Description: F5M15.3 [Arabidopsis thaliana]
  misc_feature (33)..(344): Homolog of NCBI NO: 28392990 NR Description: putative protein kinase [Arabidopsis thaliana]
  misc_feature (33)..(344): Homolog of NCBI NO: 15232294 NR Description: protein kinase, putative; protein id: At3g20530.1
  misc_feature (33)..(344): Homolog of NCBI NO: 11994140 NR Description: receptor protein kinase-like protein [Arabidopsis
  misc_feature (1)..(171): Homolog of NCBI NO: 30102706 NR Description: At1g24030 [Arabidopsis thaliana]
  misc_feature (55)..(357): Homolog of NCBI NO: 25287587 NR Description: protein T23E23.18 [imported] - Arabidopsis
  misc_feature (55)..(357): Homolog of NCBI NO: 15221649 NR Description: protein kinase, putative; protein id: At1g24030.1
  misc_feature (24)..(357): Homolog of NCBI NO: 30102706 NR Description: At1g24030 [Arabidopsis thaliana]
MHFPLVSAWNKIRRSKSYDTDPWVYRTAECWQIEDQASQPRKRRFGSSVYTLKEMEEATSSFSDENLLGKGGFGRVYQGTLKTGEVVAIKKMDLPTFKKADGEREFRVEVDILSRLDHPNLVSLIGYCADGKHRFLVYEYMQNGNLQDHLNAKISWPIRLRIALGAAKGLAYLHSSSSVGIPIVHRDFKSTNVLLDSNYNAKISDFGLAKLMPEGKDTCVTARVLGTFGYFDPEYTSTGKLTLQSDIYAFGVVLLELLTGRRAVDLTQGPNEQNLVLQVRNILNDRKKLRKVIDVELPRNSYSMEAITMFADLASRCIRIESKERPSVMDCVKELQLIIYTNSKGGLGGTIPTFRRL

SEQ ID NO: 46917 - protein, 303 aa, Arabidopsis thaliana
  peptide (1)..(303): Ceres Seq. ID no. 12575609
  misc_feature (1)..(281): Homolog of NCBI NO: 15238886 NR Description: protein kinase -like protein; protein id:
  misc_feature (1)..(284): Homolog of NCBI NO: 15217992 NR Description: protein kinase, putative; protein id: At1g20650.1
  misc_feature (1)..(284): Homolog of NCBI NO: 8778594 NR Description: F5M15.3 [Arabidopsis thaliana]
  misc_feature (1)..(290): Homolog of NCBI NO: 28392990 NR Description: putative protein kinase [Arabidopsis thaliana]
  misc_feature (1)..(290): Homolog of NCBI NO: 15232294 NR Description: protein kinase, putative; protein id: At3g20530.1
  misc_feature (1)..(290): Homolog of NCBI NO: 11994140 NR Description: receptor protein kinase-like protein [Arabidopsis
  misc_feature (1)..(117): Homolog of NCBI NO: 30102706 NR Description: At1g24030 [Arabidopsis thaliana]
  misc_feature (1)..(303): Homolog of NCBI NO: 25287587 NR Description: protein T23E23.18 [imported] - Arabidopsis
  misc_feature (1)..(303): Homolog of NCBI NO: 15221649 NR Description: protein kinase, putative; protein id: At1g24030.1
  misc_feature (1)..(303): Homolog of NCBI NO: 30102706 NR Description: At1g24030 [Arabidopsis thaliana]
MEEATSSFSDENLLGKGGFGRVYQGTLKTGEVVAIKKMDLPTFKKADGEREFRVEVDILSRLDHPNLVSLIGYCADGKHRFLVYEYMQNGNLQDHLNAKISWPIRLRIALGAAKGLAYLHSSSSVGIPIVHRDFKSTNVLLDSNYNAKISDFGLAKLMPEGKDTCVTARVLGTFGYFDPEYTSTGKLTLQSDIYAFGVVLLELLTGRRAVDLTQGPNEQNLVLQVRNILNDRKKLRKVIDVELPRNSYSMEAITMFADLASRCIRIESKERPSVMDCVKELQLIIYTNSKGGLGGTIPTFRRL

SEQ ID NO: 46918 - DNA, 1246 bp, Arabidopsis thaliana; identical to SEQ ID NO: 26472
  misc_feature (1)..(1246): Ceres Seq. ID no. 13591822
  misc_feature: MA Experiment ID: 108433 Result: Down-regulated in Transcription
  misc_feature: MA Experiment 108433 PARAMETER Experiment Name: At_rhl_Mutant2_cDNA_P Parameter: Age (day) Value: 7
  misc_feature: MA Experiment 108433 PARAMETER Experiment Name: At_rhl_Mutant2_cDNA_P Parameter: Organism Value: A. thaliana
  misc_feature: MA Experiment 108433 PARAMETER Experiment Name: At_rhl_Mutant2_cDNA_P Parameter: Plant Line Value: rhl Mutant vs. wt landsburg
  misc_feature: MA Experiment 108433 PARAMETER Experiment Name: At_rhl_Mutant2_cDNA_P Parameter: Tissue Value: Roots
  misc_feature: MA Experiment ID: 108434 Result: Down-regulated in Transcription
  misc_feature: MA Experiment 108434 PARAMETER Experiment Name: At_Root_Tips_cDNA_P Parameter: Tissue Value: Root Tips
  misc_feature: MA Experiment ID: 108461 Result: Up-regulated in Transcription
  misc_feature: MA Experiment 108461 PARAMETER Experiment Name: At_Germinating_Seeds_cDNA_P Parameter: Age (day) Value: 1 vs. 0
  misc_feature: MA Experiment 108461 PARAMETER Experiment Name: At_Germinating_Seeds_cDNA_P Parameter: Tissue Value: Germinating Seeds
  misc_feature: MA Experiment ID: 108462 Result: Up-regulated in Transcription
  misc_feature: MA Experiment 108462 PARAMETER Experiment Name: At_Germinating_Seeds_cDNA_P Parameter: Age (day) Value: 2 vs. 0
  misc_feature: MA Experiment 108462 PARAMETER Experiment Name: At_Germinating_Seeds_cDNA_P Parameter: Tissue Value: Germinating Seeds
  misc_feature: MA Experiment ID: 108464 Result: Up-regulated in Transcription
  misc_feature: MA Experiment 108464 PARAMETER Experiment Name: At_Germinating_Seeds_cDNA_P Parameter: Age (day) Value: 4 vs. 0
  misc_feature: MA Experiment 108464 PARAMETER Experiment Name: At_Germinating_Seeds_cDNA_P Parameter: Tissue Value: Germinating Seeds
  misc_feature: MA Experiment ID: 108488 Result: Up-regulated in Transcription
  misc_feature: MA Experiment ID: 108594 Result: Down-regulated in Transcription
  misc_feature: MA Experiment 108594 PARAMETER Experiment Name: At_Ler-rhl_Root_cDNA_P Parameter: Plant Line Value: null

SEQ ID NO: 46919 - protein, 169 aa, Arabidopsis thaliana; identical to SEQ ID NO: 26473
  peptide (1)..(169): Ceres Seq. ID no. 13591823
  misc_feature (57)..(169): Pfam Name: Thi4 family Pfam Description: Thi4 family
  misc_feature (57)..(169): Pfam Name: Thi4 family Pfam Description: Thi4 family
  misc_feature (57)..(169): Pfam Name: Thi4 family Pfam Description: Thi4 family
  misc_feature (1)..(169): Homolog of NCBI NO: 30013665 NR Description: putative chloroplast thiazole biosynthetic
  misc_feature (1)..(169): Homolog of NCBI NO: 6094476 NR Description: Thiazole biosynthetic enzyme, chloroplast
  misc_feature (1)..(169): Homolog of NCBI NO: 6094476 NR Description: Thiazole biosynthetic enzyme, chloroplast
  misc_feature (1)..(169): Homolog of NCBI NO: 6094476 NR Description: Thiazole biosynthetic enzyme, chloroplast
  misc_feature (1)..(169): Homolog of NCBI NO: 15239735 NR Description: thiazole biosynthetic enzyme precursor (ARA6) (sp
  misc_feature (1)..(169): Homolog of NCBI NO: 30013665 NR Description: putative chloroplast thiazole biosynthetic
  misc_feature (1)..(169): Homolog of NCBI NO: 15239735 NR Description: thiazole biosynthetic enzyme precursor (ARA6) (sp
  misc_feature (1)..(169): Homolog of NCBI NO: 30013665 NR Description: putative chloroplast thiazole biosynthetic
  misc_feature (1)..(169): Homolog of NCBI NO: 15239735 NR Description: thiazole biosynthetic enzyme precursor (ARA6) (sp

SEQ ID NO: 46920 - protein, 100 aa, Arabidopsis thaliana; identical to SEQ ID NO: 26474
  peptide (1)..(100): Ceres Seq. ID no. 13591824
  misc_feature (1)..(100): Pfam Name: Thi4 family Pfam Description: Thi4 family
  misc_feature (1)..(100): Pfam Name: Thi4 family Pfam Description: Thi4 family
  misc_feature (1)..(100): Pfam Name: Thi4 family Pfam Description: Thi4 family
  misc_feature (1)..(100): Homolog of NCBI NO: 30013665 NR Description: putative chloroplast thiazole biosynthetic
  misc_feature (1)..(100): Homolog of NCBI NO: 6094476 NR Description: Thiazole biosynthetic enzyme, chloroplast
  misc_feature (1)..(100): Homolog of NCBI NO: 6094476 NR Description: Thiazole biosynthetic enzyme, chloroplast
  misc_feature (1)..(100): Homolog of NCBI NO: 6094476 NR Description: Thiazole biosynthetic enzyme, chloroplast
  misc_feature (1)..(100): Homolog of NCBI NO: 15239735 NR Description: thiazole biosynthetic enzyme precursor (ARA6) (sp
  misc_feature (1)..(100): Homolog of NCBI NO: 30013665 NR Description: putative chloroplast thiazole biosynthetic
  misc_feature (1)..(100): Homolog of NCBI NO: 15239735 NR Description: thiazole biosynthetic enzyme precursor (ARA6) (sp
  misc_feature (1)..(100): Homolog of NCBI NO: 30013665 NR Description: putative chloroplast thiazole biosynthetic
  misc_feature (1)..(100): Homolog of NCBI NO: 15239735 NR Description: thiazole biosynthetic enzyme precursor (ARA6) (sp

SEQ ID NO: 46921 - protein, 95 aa, Arabidopsis thaliana; identical to SEQ ID NO: 26475
  peptide (1)..(95): Ceres Seq. ID no. 13591825
  misc_feature (1)..(95): Pfam Name: Thi4 family Pfam Description: Thi4 family
  misc_feature (1)..(95): Pfam Name: Thi4 family Pfam Description: Thi4 family
  misc_feature (1)..(95): Pfam Name: Thi4 family Pfam Description: Thi4 family
  misc_feature (1)..(95): Homolog of NCBI NO: 30013665 NR Description: putative chloroplast thiazole biosynthetic
  misc_feature (1)..(95): Homolog of NCBI NO: 6094476 NR Description: Thiazole biosynthetic enzyme, chloroplast
  misc_feature (1)..(95): Homolog of NCBI NO: 6094476 NR Description: Thiazole biosynthetic enzyme, chloroplast
  misc_feature (1)..(95): Homolog of NCBI NO: 6094476 NR Description: Thiazole biosynthetic enzyme, chloroplast
  misc_feature (1)..(95): Homolog of NCBI NO: 15239735 NR Description: thiazole biosynthetic enzyme precursor (ARA6) (sp
  misc_feature (1)..(95): Homolog of NCBI NO: 30013665 NR Description: putative chloroplast thiazole biosynthetic
  misc_feature (1)..(95): Homolog of NCBI NO: 15239735 NR Description: thiazole biosynthetic enzyme precursor (ARA6) (sp
  misc_feature (1)..(95): Homolog of NCBI NO: 30013665 NR Description: putative chloroplast thiazole biosynthetic
  misc_feature (1)..(95): Homolog of NCBI NO: 15239735 NR Description: thiazole biosynthetic enzyme precursor (ARA6) (sp

SEQ ID NO: 46922 - DNA, 1158 bp, Arabidopsis thaliana
  misc_feature (1)..(1158): Ceres Seq. ID no. 13647028
  misc_feature: MA Experiment ID: 20000173 Result: Up-regulated in Transcription
  misc_feature: MA Experiment 20000173 PARAMETER Experiment Name: At_42deg_Heat_P Parameter: Age (day) Value: 14
  misc_feature: MA Experiment 20000173 PARAMETER Experiment Name: At_42deg_Heat_P Parameter: Organism Value: A. thaliana
  misc_feature: MA Experiment 20000173 PARAMETER Experiment Name: At_42deg_Heat_P Parameter: Plant Line Value: WS
  misc_feature: MA Experiment 20000173 PARAMETER Experiment Name: At_42deg_Heat_P Parameter: Temperature (deg C) Value: 42 vs. 22
  misc_feature: MA Experiment 20000173 PARAMETER Experiment Name: At_42deg_Heat_P Parameter: Timepoint (hr) Value: 6
  misc_feature: MA Experiment 20000173 PARAMETER Experiment Name: At_42deg_Heat_P Parameter: Tissue Value: Aerial
  misc_feature: MA Experiment ID: 20000182 Result: Up-regulated in Transcription
  misc_feature: MA Experiment 20000182 PARAMETER Experiment Name: At_2mM_SA_P Parameter: Age (day) Value: 14
  misc_feature: MA Experiment 20000182 PARAMETER Experiment Name: At_2mM_SA_P Parameter: Organism Value: A. thaliana
  misc_feature: MA Experiment 20000182 PARAMETER Experiment Name: At_2mM_SA_P Parameter: Plant Line Value: WS
  misc_feature: MA Experiment 20000182 PARAMETER Experiment Name: At_2mM_SA_P Parameter: Timepoint (hr) Value: 6
  misc_feature: MA Experiment 20000182 PARAMETER Experiment Name: At_2mM_SA_P Parameter: Tissue Value: Aerial
  misc_feature: MA Experiment 20000182 PARAMETER Experiment Name: At_2mM_SA_P Parameter: Treatment Value: 2mM SA vs. No Treatment
  misc_feature: MA Experiment ID: 20000234 Result: Up-regulated in Transcription
  misc_feature: MA Experiment 20000234 PARAMETER Experiment Name: At_Siliques_P Parameter: Age (day) Value: 21
  misc_feature: MA Experiment 20000234 PARAMETER Experiment Name: At_Siliques_P Parameter: Organism Value: A. thaliana
  misc_feature: MA Experiment 20000234 PARAMETER Experiment Name: At_Siliques_P Parameter: Plant Line Value: WS
  misc_feature: MA Experiment 20000234 PARAMETER Experiment Name: At_Siliques_P Parameter: Tissue Value: Less Than 5mm Siliques vs. Whole Plant
  misc_feature: MA Experiment ID: 20000235 Result: Up-regulated in Transcription
  misc_feature: MA Experiment 20000235 PARAMETER Experiment Name: At_Siliques_P Parameter: Age (day) Value: 21
  misc_feature: MA Experiment 20000235 PARAMETER Experiment Name: At_Siliques_P Parameter: Organism Value: A. thaliana
  misc_feature: MA Experiment 20000235 PARAMETER Experiment Name: At_Siliques_P Parameter: Plant Line Value: WS
  misc_feature: MA Experiment 20000235 PARAMETER Experiment Name: At_Siliques_P Parameter: Tissue Value: 5-10mm Siliques vs. Whole Plant
  misc_feature: MA Experiment ID: 20000443 Result: Up-regulated in Transcription
  misc_feature: MA Experiment 20000443 PARAMETER Experiment Name: At_1uM_BR-BRZ__P Parameter: Tissue Value: Shoot Apices
  misc_feature: MA Experiment 20000443 PARAMETER Experiment Name: At_1uM_BR-BRZ__P Parameter: Treatment Value: 1uM BRZ vs. No Treatment
  misc_feature: MA Experiment ID: 20000709 Result: Up-regulated in Transcription
  misc_feature: MA Experiment 20000709 PARAMETER Experiment Name: At_15mM_NH4NO3_L-to-H_P Parameter: Age (hr) Value: 14
  misc_feature: MA Experiment 20000709 PARAMETER Experiment Name: At_15mM_NH4NO3_L-to-H_P Parameter: Organism Value: A. thaliana
  misc_feature: MA Experiment 20000709 PARAMETER Experiment Name: At_15mM_NH4NO3_L-to-H_P Parameter: Plant Line Value: WS
  misc_feature: MA Experiment 20000709 PARAMETER Experiment Name: At_15mM_NH4NO3_L-to-H_P Parameter: Timepoint (hr) Value: 4
  misc_feature: MA Experiment 20000709 PARAMETER Experiment Name: At_15mM_NH4NO3_L-to-H_P Parameter: Tissue Value: Aerial
  misc_feature: MA Experiment 20000709 PARAMETER Experiment Name: At_15mM_NH4NO3_L-to-H_P Parameter: Treatment Value: 15mM NH4NO3 vs. 30mM Mannitol
  misc_feature: MA Experiment ID: 20001557 Result: Up-regulated in Transcription
  misc_feature: MA Experiment 20001557 PARAMETER Experiment Name: At_Drought_Soil_Dry_P Parameter: Age (day) Value: 27
  misc_feature: MA Experiment 20001557 PARAMETER Experiment Name: At_Drought_Soil_Dry_P Parameter: Organism Value: A. thaliana
  misc_feature: MA Experiment 20001557 PARAMETER Experiment Name: At_Drought_Soil_Dry_P Parameter: Plant Line Value: WS
  misc_feature: MA Experiment 20001557 PARAMETER Experiment Name: At_Drought_Soil_Dry_P Parameter: Post Timepoint (hr) Value: 3
  misc_feature: MA Experiment 20001557 PARAMETER Experiment Name: At_Drought_Soil_Dry_P Parameter: Post-Treatment Value: Re-Water vs. No Drought
  misc_feature: MA Experiment 20001557 PARAMETER Experiment Name: At_Drought_Soil_Dry_P Parameter: Timepoint (day) Value: 13
  misc_feature: MA Experiment 20001557 PARAMETER Experiment Name: At_Drought_Soil_Dry_P Parameter: Treatment Value: Drought vs. No Drought
  misc_feature: MA Experiment ID: 20001560 Result: Up-regulated in Transcription
  misc_feature: MA Experiment 20001560 PARAMETER Experiment Name: At_Drought_Soil_Dry_P Parameter: Age (day) Value: 28
  misc_feature: MA Experiment 20001560 PARAMETER Experiment Name: At_Drought_Soil_Dry_P Parameter: Organism Value: A. thaliana
  misc_feature: MA Experiment 20001560 PARAMETER Experiment Name: At_Drought_Soil_Dry_P Parameter: Plant Line Value: WS
  misc_feature: MA Experiment 20001560 PARAMETER Experiment Name: At_Drought_Soil_Dry_P Parameter: Post Timepoint (hr) Value: None
  misc_feature: MA Experiment 20001560 PARAMETER Experiment Name: At_Drought_Soil_Dry_P Parameter: Post-Treatment Value: None
  misc_feature: MA Experiment 20001560 PARAMETER Experiment Name: At_Drought_Soil_Dry_P Parameter: Timepoint (day) Value: 14
  misc_feature: MA Experiment 20001560 PARAMETER Experiment Name: At_Drought_Soil_Dry_P Parameter: Treatment Value: Drought vs. No Drought
  misc_feature: MA Experiment ID: 20001757 Result: Down-regulated in Transcription
  misc_feature: MA Experiment 20001757 PARAMETER Experiment Name: At_50mM_NH4NO3_L-to-H_P Parameter: Timepoint (hr) Value: 6
  misc_feature: MA Experiment 20001757 PARAMETER Experiment Name: At_50mM_NH4NO3_L-to-H_P Parameter: Tissue Value: Leaf
  misc_feature: MA Experiment 20001757 PARAMETER Experiment Name: At_50mM_NH4NO3_L-to-H_P Parameter: Treatment Value: 50mM NH4NO3 vs 100mM Mannitol
  misc_feature: MA Experiment ID: 20001760 Result: Up-regulated in Transcription
  misc_feature: MA Experiment 20001760 PARAMETER Experiment Name: At_50mM_NH4NO3_L-to-H_P Parameter: Timepoint (hr) Value: 2
  misc_feature: MA Experiment 20001760 PARAMETER Experiment Name: At_50mM_NH4NO3_L-to-H_P Parameter: Tissue Value: Siliques
  misc_feature: MA Experiment 20001760 PARAMETER Experiment Name: At_50mM_NH4NO3_L-to-H_P Parameter: Treatment Value: 50mM NH4NO3 vs 100mM Mannitol
gaaagaaactcattctgatttttaatctctgacgagcaaagaaccctatagctaaaagactaaaccaatggcgattatctctgagatggaggaggcgagaccctcgatggtgcctttcaccgcaagttttgatccttcaaacccattagcgtttctggagaaagttcttgacgttatcgggaaagagagcaattttctgaagaaagacacggctgagaaggagatcatgattgctgttatggctgcgaagcagaggttgagggaagcggagaagaagaagttggagaaggagagtgttaagtccatggaggttgagaagccaaagaaagatagcttgaagcccacggaggtggagaagccgaaggaggagagcttgatggcgactgatcccatggagattgagaagcctaaagaggagaaagaatcgggtcccatcgttcctaacaaaggcaatgggcttgattttgagaaatactcaagggggacagaatctccaagaggtcacaattaacattccagtgccggaaggcactaaatcaaggtctgttacctgtgaaatcaagaagaaccgtctcaaagttggtctgaaagggcaagagctaatcatcgatggagaattcttcaattctgtcaagcctgacgactgcttctggaatatcgaggatcaaaagatgatatcggtgcttttgacaaagcaagaccagatggagtggtggaagtattgtgtgaagggagaacctgagatagacactcagaaagttgaaccagagaccagcaaacttggtgatctcgaccctgaaactcgcgcatccgttgagaagatgatgtttgatcaaaggcagaagcagatgggactaccaacgagtgatgagatagagaagaaagatatgctcaagaagttcatggctcagaatcctgggatggacttctctaatgcaaagtttaactgatgatctttactcaactcttcttcgtttaagccagttttgtgttccaatataatcttgttatgtcttcaagattacaatcctgcccttttggtttacttcaagacagttgttgattcgttaaatacctacttccttaagaaaacttcatctgtttttttgcttattgaagtgttcatgagtcatgactatgaatatagtttcgttttct

SEQ ID NO: 46923 - protein, 165 aa, Arabidopsis thaliana
  peptide (1)..(165): Ceres Seq. ID no. 13647029
  misc_feature (1)..(149): Pfam Name: Nuclear movement protein Pfam Description: Nuclear movement protein
  misc_feature (12)..(165): Homolog of NCBI NO: 8101760 NR Description: putative nuclear movement protein PNUDC
  misc_feature (1)..(164): Homolog of NCBI NO: 8745009 NR Description: MNUDC-like protein [Leishmania major]
  misc_feature (7)..(165): Homolog of NCBI NO: 12052969 NR Description: hypothetical protein [Homo sapiens]
  misc_feature (2)..(165): Homolog of NCBI NO: 6754910 NR Description: nuclear distribution gene C homolog [Mus
  misc_feature (2)..(165): Homolog of NCBI NO: 5729953 NR Description: nuclear distribution gene C homolog (A. nidulans)
  misc_feature (2)..(165): Homolog of NCBI NO: 8394272 NR Description: nuclear distribution gene C homolog [Rattus
  misc_feature (2)..(165): Homolog of NCBI NO: 30524691 NR Description: salt tolerance protein 5 [Beta vulgaris]
  misc_feature (1)..(165): Homolog of NCBI NO: 15234308 NR Description: expressed protein [Arabidopsis thaliana]
  misc_feature (1)..(165): Homolog of NCBI NO: 15238732 NR Description: expressed protein [Arabidopsis thaliana]
  misc_feature (1)..(165): Homolog of NCBI NO: 21593329 NR Description: unknown [Arabidopsis thaliana]
MGLILRNTQGGQNLQEVTINIPVPEGTKSRSVTCEIKKNRLKVGLKGQELIIDGEFFNSVKPDDCFWNIEDQKMISVLLTKQDQMEWWKYCVKGEPEIDTQKVEPETSKLGDLDPETRASVEKMMFDQRQKQMGLPTSDEIEKKDMLKKFMAQNPGMDFSNAKFN

SEQ ID NO: 46924 - protein, 147 aa, Arabidopsis thaliana
  peptide (1)..(147): Ceres Seq. ID no. 13647030
  misc_feature (29)..(127): Homolog of NCBI NO: 25407880 NR Description: hypothetical protein At2g27280 [imported] -
  misc_feature (1)..(116): Homolog of NCBI NO: 25407880 NR Description: hypothetical protein At2g27280 [imported] -
  misc_feature (1)..(116): Homolog of NCBI NO: 18401379 NR Description: hypothetical protein [Arabidopsis thaliana]
  misc_feature (7)..(127): Homolog of NCBI NO: 18401379 NR Description: hypothetical protein [Arabidopsis thaliana]
  misc_feature (18)..(142): Homolog of NCBI NO: 8394272 NR Description: nuclear distribution gene C homolog [Rattus
  misc_feature (1)..(139): Homolog of NCBI NO: 15234308 NR Description: expressed protein [Arabidopsis thaliana]
  misc_feature (1)..(137): Homolog of NCBI NO: 30524691 NR Description: salt tolerance protein 5 [Beta vulgaris]
  misc_feature (1)..(137): Homolog of NCBI NO: 15238732 NR Description: expressed protein [Arabidopsis thaliana]
  misc_feature (1)..(137): Homolog of NCBI NO: 21593329 NR Description: unknown [Arabidopsis thaliana]
MAIISEMEEARPSMVPFTASFDPSNPLAFLEKVLDVIGKESNFLKKDTAEKEIMIAVMAAKQRLREAEKKKLEKESVKSMEVEKPKKDSLKPTEVEKPKEESLMATDPMEIEKPKEEKESGPIVPNKGNGLDFEKYSRGTESPRGHN

SEQ ID NO: 46925 - protein, 141 aa, Arabidopsis thaliana
  peptide (1)..(141): Ceres Seq. ID no. 13647031
  misc_feature (23)..(121): Homolog of NCBI NO: 25407880 NR Description: hypothetical protein At2g27280 [imported] -
  misc_feature (1)..(110): Homolog of NCBI NO: 25407880 NR Description: hypothetical protein At2g27280 [imported] -
  misc_feature (1)..(110): Homolog of NCBI NO: 18401379 NR Description: hypothetical protein [Arabidopsis thaliana]
  misc_feature (1)..(121): Homolog of NCBI NO: 18401379 NR Description: hypothetical protein [Arabidopsis thaliana]
  misc_feature (12)..(136): Homolog of NCBI NO: 8394272 NR Description: nuclear distribution gene C homolog [Rattus
  misc_feature (1)..(133): Homolog of NCBI NO: 15234308 NR Description: expressed protein [Arabidopsis thaliana]
  misc_feature (1)..(131): Homolog of NCBI NO: 30524691 NR Description: salt tolerance protein 5 [Beta vulgaris]
  misc_feature (1)..(131): Homolog of NCBI NO: 15238732 NR Description: expressed protein [Arabidopsis thaliana]
  misc_feature (1)..(131): Homolog of NCBI NO: 21593329 NR Description: unknown [Arabidopsis thaliana]
MEEARPSMVPFTASFDPSNPLAFLEKVLDVIGKESNFLKKDTAEKEIMIAVMAAKQRLREAEKKKLEKESVKSMEVEKPKKDSLKPTEVEKPKEESLMATDPMEIEKPKEEKESGPIVPNKGNGLDFEKYSRGTESPRGHN

SEQ ID NO: 46926 - DNA, 1525 bp, Arabidopsis thaliana; identical to SEQ ID NO: 42915
  misc_feature (1)..(1525): Ceres Seq. ID no. 12601754
  misc_feature: MA Experiment ID: 108434 Result: Up-regulated in Transcription
  misc_feature: MA Experiment 108434 PARAMETER Experiment Name: At_Root_Tips_cDNA_P Parameter: Tissue Value: Root Tips
  misc_feature: MA Experiment ID: 108461 Result: Up-regulated in Transcription
  misc_feature: MA Experiment 108461 PARAMETER Experiment Name: At_Germinating_Seeds_cDNA_P Parameter: Age (day) Value: 1 vs. 0
  misc_feature: MA Experiment 108461 PARAMETER Experiment Name: At_Germinating_Seeds_cDNA_P Parameter: Tissue Value: Germinating Seeds
  misc_feature: MA Experiment ID: 108462 Result: Up-regulated in Transcription
  misc_feature: MA Experiment 108462 PARAMETER Experiment Name: At_Germinating_Seeds_cDNA_P Parameter: Age (day) Value: 2 vs. 0
  misc_feature: MA Experiment 108462 PARAMETER Experiment Name: At_Germinating_Seeds_cDNA_P Parameter: Tissue Value: Germinating Seeds
  misc_feature: MA Experiment ID: 108463 Result: Up-regulated in Transcription
  misc_feature: MA Experiment 108463 PARAMETER Experiment Name: At_Germinating_Seeds_cDNA_P Parameter: Age (day) Value: 3 vs. 0
  misc_feature: MA Experiment 108463 PARAMETER Experiment Name: At_Germinating_Seeds_cDNA_P Parameter: Tissue Value: Germinating Seeds
  misc_feature: MA Experiment ID: 108464 Result: Up-regulated in Transcription
  misc_feature: MA Experiment 108464 PARAMETER Experiment Name: At_Germinating_Seeds_cDNA_P Parameter: Age (day) Value: 4 vs. 0
  misc_feature: MA Experiment 108464 PARAMETER Experiment Name: At_Germinating_Seeds_cDNA_P Parameter: Tissue Value: Germinating Seeds
  misc_feature: MA Experiment ID: 108595 Result: Down-regulated in Transcription
  misc_feature: MA Experiment 108595 PARAMETER Experiment Name: At_Ler-pi_Ovule_cDNA_P Parameter: Plant Line Value: null
  misc_feature: MA Experiment ID: 20000224 Result: Down-regulated in Transcription
  misc_feature: MA Experiment ID: 20000315 Result: Down-regulated in Transcription
  misc_feature: MA Experiment 20000315 PARAMETER Experiment Name: At_14day_Shoots-Roots_Sub_P Parameter: Age (day) Value: 14
  misc_feature: MA Experiment 20000315 PARAMETER Experiment Name: At_14day_Shoots-Roots_Sub_P Parameter: Organism Value: A. thaliana
  misc_feature: MA Experiment 20000315 PARAMETER Experiment Name: At_14day_Shoots-Roots_Sub_P Parameter: Plant Line Value: WS
  misc_feature: MA Experiment 20000315 PARAMETER Experiment Name: At_14day_Shoots-Roots_Sub_P Parameter: Tissue Value: Shoots vs. Whole Plant

SEQ ID NO: 46927 - protein, 423 aa, Arabidopsis thaliana; identical to SEQ ID NO: 23456
  peptide (1)..(423): Ceres Seq. ID no. 12601755
  misc_feature (42)..(199): Pfam Name: ATP-grasp domain Pfam Description: ATP-grasp domain
  misc_feature (42)..(199): Pfam Name: ATP-grasp domain Pfam Description: ATP-grasp domain
  misc_feature (1)..(416): Homolog of NCBI NO: 28372804 NR Description: LD21334p [Drosophila melanogaster]
  misc_feature (1)..(416): Homolog of NCBI NO: 24653988 NR Description: ATP citrate lyase CG8322-PA
  misc_feature (1)..(416): Homolog of NCBI NO: 9229902 NR Description: ATP citrate-lyase [Ciona intestinalis]
  misc_feature (1)..(416): Homolog of NCBI NO: 31235932 NR Description: ENSANGP00000012364 [Anopheles gambiae]
  misc_feature (1)..(419): Homolog of NCBI NO: 15217510 NR Description: unknown protein; protein id: At1g09430.1
  misc_feature (1)..(416): Homolog of NCBI NO: 28372804 NR Description: LD21334p [Drosophila melanogaster]
  misc_feature (1)..(416): Homolog of NCBI NO: 9229902 NR Description: ATP citrate-lyase [Ciona intestinalis]
  misc_feature (1)..(419): Homolog of NCBI NO: 15217510 NR Description: unknown protein; protein id: At1g09430.1
  misc_feature (1)..(423): Homolog of NCBI NO: 15220186 NR Description: ATP citrate-lyase, putative
  misc_feature (1)..(423): Homolog of NCBI NO: 21593129 NR Description: ATP citrate-lyase, putative [Arabidopsis thaliana]
  misc_feature (1)..(423): Homolog of NCBI NO: 15219818 NR Description: ATP citrate-lyase, putative
  misc_feature (1)..(423): Homolog of NCBI NO: 19698853 NR Description: similar to ATP-citrate-lyase [Arabidopsis
  misc_feature (1)..(423): Homolog of NCBI NO: 15919089 NR Description: ATP citrate lyase b-subunit [Lupinus albus]
  misc_feature (1)..(416): Homolog of NCBI NO: 31235932 NR Description: ENSANGP00000012364 [Anopheles gambiae]
  misc_feature (1)..(416): Homolog of NCBI NO: 24653988 NR Description: ATP citrate lyase CG8322-PA
  misc_feature (1)..(423): Homolog of NCBI NO: 15919089 NR Description: ATP citrate lyase b-subunit [Lupinus albus]
  misc_feature (1)..(423): Homolog of NCBI NO: 19698853 NR Description: similar to ATP-citrate-lyase [Arabidopsis
  misc_feature (1)..(423): Homolog of NCBI NO: 15219818 NR Description: ATP citrate-lyase, putative
  misc_feature (1)..(423): Homolog of NCBI NO: 21593129 NR Description: ATP citrate-lyase, putative [Arabidopsis thaliana]
  misc_feature (1)..(423): Homolog of NCBI NO: 15220186 NR Description: ATP citrate-lyase, putative

SEQ ID NO: 46928 - protein, 363 aa, Arabidopsis thaliana; identical to SEQ ID NO: 23457
  peptide (1)..(363): Ceres Seq. ID no. 12601756
  misc_feature (1)..(139): Pfam Name: ATP-grasp domain Pfam Description: ATP-grasp domain
  misc_feature (1)..(139): Pfam Name: ATP-grasp domain Pfam Description: ATP-grasp domain
  misc_feature (1)..(356): Homolog of NCBI NO: 28372804 NR Description: LD21334p [Drosophila melanogaster]
  misc_feature (1)..(356): Homolog of NCBI NO: 24653988 NR Description: ATP citrate lyase CG8322-PA
  misc_feature (1)..(356): Homolog of NCBI NO: 9229902 NR Description: ATP citrate-lyase [Ciona intestinalis]
  misc_feature (1)..(356): Homolog of NCBI NO: 31235932 NR Description: ENSANGP00000012364 [Anopheles gambiae]
  misc_feature (1)..(359): Homolog of NCBI NO: 15217510 NR Description: unknown protein; protein id: At1g09430.1
  misc_feature (1)..(356): Homolog of NCBI NO: 28372804 NR Description: LD21334p [Drosophila melanogaster]
  misc_feature (1)..(356): Homolog of NCBI NO: 9229902 NR Description: ATP citrate-lyase [Ciona intestinalis]
  misc_feature (1)..(359): Homolog of NCBI NO: 15217510 NR Description: unknown protein; protein id: At1g09430.1
  misc_feature (1)..(363): Homolog of NCBI NO: 15220186 NR Description: ATP citrate-lyase, putative
  misc_feature (1)..(363): Homolog of NCBI NO: 21593129 NR Description: ATP citrate-lyase, putative [Arabidopsis thaliana]
  misc_feature (1)..(363): Homolog of NCBI NO: 15219818 NR Description: ATP citrate-lyase, putative
  misc_feature (1)..(363): Homolog of NCBI NO: 19698853 NR Description: similar to ATP-citrate-lyase [Arabidopsis
  misc_feature (1)..(363): Homolog of NCBI NO: 15919089 NR Description: ATP citrate lyase b-subunit [Lupinus albus]
  misc_feature (1)..(356): Homolog of NCBI NO: 31235932 NR Description: ENSANGP00000012364 [Anopheles gambiae]
  misc_feature (1)..(356): Homolog of NCBI NO: 24653988 NR Description: ATP citrate lyase CG8322-PA
  misc_feature (1)..(363): Homolog of NCBI NO: 15919089 NR Description: ATP citrate lyase b-subunit [Lupinus albus]
  misc_feature (1)..(363): Homolog of NCBI NO: 19698853 NR Description: similar to ATP-citrate-lyase [Arabidopsis
  misc_feature (1)..(363): Homolog of NCBI NO: 15219818 NR Description: ATP citrate-lyase, putative
  misc_feature (1)..(363): Homolog of NCBI NO: 21593129 NR Description: ATP citrate-lyase, putative [Arabidopsis thaliana]
  misc_feature (1)..(363): Homolog of NCBI NO: 15220186 NR Description: ATP citrate-lyase, putative

SEQ ID NO: 46929 - protein, 329 aa, Arabidopsis thaliana; identical to SEQ ID NO: 23458
  peptide (1)..(329): Ceres Seq. ID no. 12601757
  misc_feature (1)..(105): Pfam Name: ATP-grasp domain Pfam Description: ATP-grasp domain
  misc_feature (1)..(105): Pfam Name: ATP-grasp domain Pfam Description: ATP-grasp domain
  misc_feature (1)..(322): Homolog of NCBI NO: 28372804 NR Description: LD21334p [Drosophila melanogaster]
  misc_feature (1)..(322): Homolog of NCBI NO: 24653988 NR Description: ATP citrate lyase CG8322-PA
  misc_feature (1)..(322): Homolog of NCBI NO: 9229902 NR Description: ATP citrate-lyase [Ciona intestinalis]
  misc_feature (1)..(322): Homolog of NCBI NO: 31235932 NR Description: ENSANGP00000012364 [Anopheles gambiae]
  misc_feature (1)..(325): Homolog of NCBI NO: 15217510 NR Description: unknown protein; protein id: At1g09430.1
  misc_feature (1)..(322): Homolog of NCBI NO: 28372804 NR Description: LD21334p [Drosophila melanogaster]
  misc_feature (1)..(322): Homolog of NCBI NO: 9229902 NR Description: ATP citrate-lyase [Ciona intestinalis]
  misc_feature (1)..(325): Homolog of NCBI NO: 15217510 NR Description: unknown protein; protein id: At1g09430.1
  misc_feature (1)..(329): Homolog of NCBI NO: 15220186 NR Description: ATP citrate-lyase, putative
  misc_feature (1)..(329): Homolog of NCBI NO: 21593129 NR Description: ATP citrate-lyase, putative [Arabidopsis thaliana]
  misc_feature (1)..(329): Homolog of NCBI NO: 15219818 NR Description: ATP citrate-lyase, putative
  misc_feature (1)..(329): Homolog of NCBI NO: 19698853 NR Description: similar to ATP-citrate-lyase [Arabidopsis
  misc_feature (1)..(329): Homolog of NCBI NO: 15919089 NR Description: ATP citrate lyase b-subunit [Lupinus albus]
  misc_feature (1)..(322): Homolog of NCBI NO: 31235932 NR Description: ENSANGP00000012364 [Anopheles gambiae]
  misc_feature (1)..(322): Homolog of NCBI NO: 24653988 NR Description: ATP citrate lyase CG8322-PA
  misc_feature (1)..(329): Homolog of NCBI NO: 15919089 NR Description: ATP citrate lyase b-subunit [Lupinus albus]
  misc_feature (1)..(329): Homolog of NCBI NO: 19698853 NR Description: similar to ATP-citrate-lyase [Arabidopsis
  misc_feature (1)..(329): Homolog of NCBI NO: 15219818 NR Description: ATP citrate-lyase, putative
  misc_feature (1)..(329): Homolog of NCBI NO: 21593129 NR Description: ATP citrate-lyase, putative [Arabidopsis thaliana]
  misc_feature (1)..(329): Homolog of NCBI NO: 15220186 NR Description: ATP citrate-lyase, putative

SEQ ID NO: 46930 - DNA, 1606 bp, Arabidopsis thaliana
  misc_feature (1)..(1606): Ceres Seq. ID no. 13592120
  misc_feature: MA Experiment ID: 108462 Result: Up-regulated in Transcription
  misc_feature: MA Experiment 108462 PARAMETER Experiment Name: At_Germinating_Seeds_cDNA_P Parameter: Age (day) Value: 2 vs. 0
  misc_feature: MA Experiment 108462 PARAMETER Experiment Name: At_Germinating_Seeds_cDNA_P Parameter: Tissue Value: Germinating Seeds
  misc_feature: MA Experiment ID: 108463 Result: Up-regulated in Transcription
  misc_feature: MA Experiment 108463 PARAMETER Experiment Name: At_Germinating_Seeds_cDNA_P Parameter: Age (day) Value: 3 vs. 0
  misc_feature: MA Experiment 108463 PARAMETER Experiment Name: At_Germinating_Seeds_cDNA_P Parameter: Tissue Value: Germinating Seeds
  misc_feature: MA Experiment ID: 108464 Result: Up-regulated in Transcription
  misc_feature: MA Experiment 108464 PARAMETER Experiment Name: At_Germinating_Seeds_cDNA_P Parameter: Age (day) Value: 4 vs. 0
  misc_feature: MA Experiment 108464 PARAMETER Experiment Name: At_Germinating_Seeds_cDNA_P Parameter: Tissue Value: Germinating Seeds
  misc_feature: MA Experiment ID: 108469 Result: Down-regulated in Transcription
  misc_feature: MA Experiment ID: 108577 Result: Up-regulated in Transcription
  misc_feature: MA Experiment 108577 PARAMETER Experiment Name: At_42deg_Heat_cDNA_P Parameter: Temperature (deg C) Value: 42 vs. 22
  misc_feature: MA Experiment 108577 PARAMETER Experiment Name: At_42deg_Heat_cDNA_P Parameter: Timepoint (hr) Value: 6
  misc_feature: MA Experiment 108577 PARAMETER Experiment Name: At_42deg_Heat_cDNA_P Parameter: Tissue Value: Aerial
  misc_feature: MA Experiment ID: 20000087 Result: Down-regulated in Transcription
  misc_feature: MA Experiment 20000087 PARAMETER Experiment Name: At_100uM_ABA_Mutants_cDNA_P Parameter: Plant Line Value: WS
  misc_feature: MA Experiment 20000087 PARAMETER Experiment Name: At_100uM_ABA_Mutants_cDNA_P Parameter: Timepoint (hr) Value: 6
  misc_feature: MA Experiment 20000087 PARAMETER Experiment Name: At_100uM_ABA_Mutants_cDNA_P Parameter: Tissue Value: Aerial
  misc_feature: MA Experiment 20000087 PARAMETER Experiment Name: At_100uM_ABA_Mutants_cDNA_P Parameter: Treatment Value: 100uM ABA vs. No Treatment
  misc_feature: MA Experiment ID: 20000179 Result: Up-regulated in Transcription
  misc_feature: MA Experiment 20000179 PARAMETER Experiment Name: At_Germinating_Seeds_P Parameter: Age (hr) Value: 6 vs. 0
  misc_feature: MA Experiment 20000179 PARAMETER Experiment Name: At_Germinating_Seeds_P Parameter: Tissue Value: Germinating Seeds
  misc_feature: MA Experiment ID: 20000180 Result: Up-regulated in Transcription
  misc_feature: MA Experiment 20000180 PARAMETER Experiment Name: At_Germinating_Seeds_P Parameter: Age (hr) Value: 24 vs. 0
  misc_feature: MA Experiment 20000180 PARAMETER Experiment Name: At_Germinating_Seeds_P Parameter: Tissue Value: Germinating Seeds
  misc_feature: MA Experiment ID: 20000794 Result: Down-regulated in Transcription
  misc_feature: MA Experiment 20000794 PARAMETER Experiment Name: At_Petals_P Parameter: Age (day) Value: 23-25 days
  misc_feature: MA Experiment 20000794 PARAMETER Experiment Name: At_Petals_P Parameter: Plant Line Value: WS
  misc_feature: MA Experiment 20000794 PARAMETER Experiment Name: At_Petals_P Parameter: Tissue Value: Petals vs. Whole plant
  misc_feature: MA Experiment ID: 20001451 Result: Down-regulated in Transcription
  misc_feature: MA Experiment 20001451 PARAMETER Experiment Name: At_Far-red-induction_P Parameter: Age (day) Value: 7
  misc_feature: MA Experiment 20001451 PARAMETER Experiment Name: At_Far-red-induction_P Parameter: Light Value: Far-red vs. White
  misc_feature: MA Experiment 20001451 PARAMETER Experiment Name: At_Far-red-induction_P Parameter: Organism Value: A. thaliana
  misc_feature: MA Experiment 20001451 PARAMETER Experiment Name: At_Far-red-induction_P Parameter: Plant Line Value: Columbia
  misc_feature: MA Experiment 20001451 PARAMETER Experiment Name: At_Far-red-induction_P Parameter: Timepoint (hr) Value: 24
  misc_feature: MA Experiment 20001451 PARAMETER Experiment Name: At_Far-red-induction_P Parameter: Tissue Value: Whole Plant
tgtttcttcaatatctctttctctccaacaaaatcaaaatcaagaaaacaaaaaagaaaaactctcaagaaacaatggatgcttcattgtctccattcgatcaccaaaaaactcaaaacacagagccaaagaaaagcttcattacctcactaatcactctccgttcaaacaacatcaaagaagacacatacttcgtctcagaactcaaacccacggagcaaaaatcacttcaagaactcaaagaaaagctctcagcttcatcctccaaagcttcttcaatgtggggagtctcactcctcggtggagacgacaaagctgacgtaatcctcctcaagttcctcagagcaagagatttcaaagtagcagactctttgagaatgcttgagaagtgtttggagtggagagaagagttcaaagcagagaaattgacagaagaagatctgggttttaaagatttggaaggtaaagttgcttacatgagaggctacgacaaagaaggacacccagtttgttacaatgcttatggtgtgtttaaagagaaagagatgtatgagagagtgtttggtgatgaagagaagcttaacaagtttctgagatggagagttcaggttttggagagaggtgttaaaatgcttcattttaaacctggtggtgttaattccattattcaagttacagatcttaaagatatgcctaagagagagcttagagttgcttctaatcagatcctctctctttttcaagataattaccctgaattggttgctactaagatattcataaacgtgccttggtacttcagtgtgatctactcaatgttcagcccattcctgactcagagaacaaagagcaagtttgtgatgtccaaagaaggcaatgcagcagaaacactctacaagttcattaggccagaagatattccggtgcaatacggtggtcttagccgtcctactgattcgcaaaacggaccgccaaaaccggcgtctgaattctccatcaagggtggtgagaaagttaacattcagattgaaggcattgagggtggagcaaccataacatgggatatagtagttggaggatgggatttagagtacagtgcagagtttgttccaaacgctgaagagagttacgcgatcgttgtcgagaaaccgaagaagatgaaagctacagatgaagctgtttgcaactctttcactacagtagaagctgggaagctcattctctctgttgacaatactctctctcgcaagaagaaagttgctgcttaccgttacactgtccggaaatctactacaaccgtctaatctataaccggtttttcagaagattggttgctttcttactactactttttgtgggtgtgttgaggggttttctttcttgggtttgagtactaggtttgttttgcttactcaacggttcatgttgaaccggaaatatcgataaatttgcgaggaaatcatatgtataaaaactatgatttgtatgacatttgatgtttggccttaatattttaactagagattgaagttttagtctgcaaagtgtaagcttatgtactctcttgtaccatgtttagctattgaagaccagtggtccattgctt

SEQ ID NO: 46931 - protein, 433 aa, Arabidopsis thaliana
  peptide (1)..(433): Ceres Seq. ID no. 13592121
  misc_feature (161)..(318): Pfam Name: CRAL/TRIO domain Pfam Description: CRAL/TRIO domain
  misc_feature (161)..(318): Pfam Name: CRAL/TRIO domain Pfam Description: CRAL/TRIO domain
  misc_feature (12)..(432): Homolog of NCBI NO: 14334978 NR Description: unknown protein [Arabidopsis thaliana]
  misc_feature (12)..(432): Homolog of NCBI NO: 18397616 NR Description: expressed protein [Arabidopsis thaliana]
  misc_feature (12)..(433): Homolog of NCBI NO: 34907288 NR Description: contains ESTs
  misc_feature (82)..(423): Homolog of NCBI NO: 8894548 NR Description: hypothetical protein [Cicer arietinum]
  misc_feature (350)..(427): Homolog of NCBI NO: 25407487 NR Description: hypothetical protein AT4g09160 [imported] -
  misc_feature (12)..(432): Homolog of NCBI NO: 14334978 NR Description: unknown protein [Arabidopsis thaliana]
  misc_feature (12)..(433): Homolog of NCBI NO: 34907288 NR Description: contains ESTs
  misc_feature (350)..(427): Homolog of NCBI NO: 25407487 NR Description: hypothetical protein AT4g09160 [imported] -
  misc_feature (25)..(433): Homolog of NCBI NO: 15230555 NR Description: expressed protein [Arabidopsis thaliana]
  misc_feature (15)..(427): Homolog of NCBI NO: 15218383 NR Description: cytosolic factor -related [Arabidopsis thaliana]
  misc_feature (57)..(427): Homolog of NCBI NO: 30680992 NR Description: expressed protein [Arabidopsis thaliana]
  misc_feature (50)..(427): Homolog of NCBI NO: 15081614 NR Description: At1g72160/T9N14_8 [Arabidopsis thaliana]
  misc_feature (57)..(342): Homolog of NCBI NO: 25407487 NR Description: hypothetical protein AT4g09160 [imported] -
  misc_feature (82)..(423): Homolog of NCBI NO: 8894548 NR Description: hypothetical protein [Cicer arietinum]
  misc_feature (12)..(432): Homolog of NCBI NO: 18397616 NR Description: expressed protein [Arabidopsis thaliana]
  misc_feature (57)..(342): Homolog of NCBI NO: 25407487 NR Description: hypothetical protein AT4g09160 [imported] -
  misc_feature (50)..(427): Homolog of NCBI NO: 15081614 NR Description: At1g72160/T9N14_8 [Arabidopsis thaliana]
  misc_feature (57)..(427): Homolog of NCBI NO: 30680992 NR Description: expressed protein [Arabidopsis thaliana]
  misc_feature (15)..(427): Homolog of NCBI NO: 15218383 NR Description: cytosolic factor -related [Arabidopsis thaliana]
  misc_feature (25)..(433): Homolog of NCBI NO: 15230555 NR Description: expressed protein [Arabidopsis thaliana]
FLQYLFLSNKIKIKKTKKKNSQETMDASLSPFDHQKTQNTEPKKSFITSLITLRSNNIKEDTYFVSELKPTEQKSLQELKEKLSASSSKASSMWGVSLLGGDDKADVILLKFLRARDFKVADSLRMLEKCLEWREEFKAEKLTEEDLGFKDLEGKVAYMRGYDKEGHPVCYNAYGVFKEKEMYERVFGDEEKLNKFLRWRVQVLERGVKMLHFKPGGVNSIIQVTDLKDMPKRELRVASNQILSLFQDNYPELVATKIFINVPWYFSVIYSMFSPFLTQRTKSKFVMSKEGNAAETLYKFIRPEDIPVQYGGLSRPTDSQNGPPKPASEFSIKGGEKVNIQIEGIEGGATITWDIVVGGWDLEYSAEFVPNAEESYAIVVEKPKKMKATDEAVCNSFTTVEAGKLILSVDNTLSRKKKVAAYRYTVRKSTTTV

SEQ ID NO: 46932 - protein, 409 aa, Arabidopsis thaliana
  peptide (1)..(409): Ceres Seq. ID no. 13592122
  misc_feature (137)..(294): Pfam Name: CRAL/TRIO domain Pfam Description: CRAL/TRIO domain
  misc_feature (137)..(294): Pfam Name: CRAL/TRIO domain Pfam Description: CRAL/TRIO domain
  misc_feature (1)..(408): Homolog of NCBI NO: 14334978 NR Description: unknown protein [Arabidopsis thaliana]
  misc_feature (1)..(408): Homolog of NCBI NO: 18397616 NR Description: expressed protein [Arabidopsis thaliana]
  misc_feature (1)..(409): Homolog of NCBI NO: 34907288 NR Description: contains ESTs
  misc_feature (58)..(399): Homolog of NCBI NO: 8894548 NR Description: hypothetical protein [Cicer arietinum]
  misc_feature (326)..(403): Homolog of NCBI NO: 25407487 NR Description: hypothetical protein AT4g09160 [imported] -
  misc_feature (1)..(408): Homolog of NCBI NO: 14334978 NR Description: unknown protein [Arabidopsis thaliana]
  misc_feature (1)..(409): Homolog of NCBI NO: 34907288 NR Description: contains ESTs
  misc_feature (326)..(403): Homolog of NCBI NO: 25407487 NR Description: hypothetical protein AT4g09160 [imported] -
  misc_feature (1)..(409): Homolog of NCBI NO: 15230555 NR Description: expressed protein [Arabidopsis thaliana]
  misc_feature (1)..(403): Homolog of NCBI NO: 15218383 NR Description: cytosolic factor -related [Arabidopsis thaliana]
  misc_feature (33)..(403): Homolog of NCBI NO: 30680992 NR Description: expressed protein [Arabidopsis thaliana]
  misc_feature (26)..(403): Homolog of NCBI NO: 15081614 NR Description: At1g72160/T9N14_8 [Arabidopsis thaliana]
  misc_feature (33)..(318): Homolog of NCBI NO: 25407487 NR Description: hypothetical protein AT4g09160 [imported] -
  misc_feature (58)..(399): Homolog of NCBI NO: 8894548 NR Description: hypothetical protein [Cicer arietinum]
  misc_feature (1)..(408): Homolog of NCBI NO: 18397616 NR Description: expressed protein [Arabidopsis thaliana]
  misc_feature (33)..(318): Homolog of NCBI NO: 25407487 NR Description: hypothetical protein AT4g09160 [imported] -
  misc_feature (26)..(403): Homolog of NCBI NO: 15081614 NR Description: At1g72160/T9N14_8 [Arabidopsis thaliana]
  misc_feature (33)..(403): Homolog of NCBI NO: 30680992 NR Description: expressed protein [Arabidopsis thaliana]
  misc_feature (1)..(403): Homolog of NCBI NO: 15218383 NR Description: cytosolic factor -related [Arabidopsis thaliana]
  misc_feature (1)..(409): Homolog of NCBI NO: 15230555 NR Description: expressed protein [Arabidopsis thaliana]
MDASLSPFDHQKTQNTEPKKSFITSLITLRSNNIKEDTYFVSELKPTEQKSLQELKEKLSASSSKASSMWGVSLLGGDDKADVILLKFLRARDFKVADSLRMLEKCLEWREEFKAEKLTEEDLGFKDLEGKVAYMRGYDKEGHPVCYNAYGVFKEKEMYERVFGDEEKLNKFLRWRVQVLERGVKMLHFKPGGVNSIIQVTDLKDMPKRELRVASNQILSLFQDNYPELVATKIFINVPWYFSVIYSMFSPFLTQRTKSKFVMSKEGNAAETLYKFIRPEDIPVQYGGLSRPTDSQNGPPKPASEFSIKGGEKVNIQIEGIEGGATITWDIVVGGWDLEYSAEFVPNAEESYAIVVEKPKKMKATDEAVCNSFTTVEAGKLILSVDNTLSRKKKVAAYRYTVRKSTTTV

SEQ ID NO: 46933 - protein, 341 aa, Arabidopsis thaliana
  peptide (1)..(341): Ceres Seq. ID no. 13592123
  misc_feature (69)..(226): Pfam Name: CRAL/TRIO domain Pfam Description: CRAL/TRIO domain
  misc_feature (69)..(226): Pfam Name: CRAL/TRIO domain Pfam Description: CRAL/TRIO domain
  misc_feature (1)..(340): Homolog of NCBI NO: 14334978 NR Description: unknown protein [Arabidopsis thaliana]
  misc_feature (1)..(340): Homolog of NCBI NO: 18397616 NR Description: expressed protein [Arabidopsis thaliana]
  misc_feature (1)..(341): Homolog of NCBI NO: 34907288 NR Description: contains ESTs
  misc_feature (1)..(331): Homolog of NCBI NO: 8894548 NR Description: hypothetical protein [Cicer arietinum]
  misc_feature (258)..(335): Homolog of NCBI NO: 25407487 NR Description: hypothetical protein AT4g09160 [imported] -
  misc_feature (1)..(340): Homolog of NCBI NO: 14334978 NR Description: unknown protein [Arabidopsis thaliana]
  misc_feature (1)..(341): Homolog of NCBI NO: 34907288 NR Description: contains ESTs
  misc_feature (258)..(335): Homolog of NCBI NO: 25407487 NR Description: hypothetical protein AT4g09160 [imported] -
  misc_feature (1)..(341): Homolog of NCBI NO: 15230555 NR Description: expressed protein [Arabidopsis thaliana]
  misc_feature (1)..(335): Homolog of NCBI NO: 15218383 NR Description: cytosolic factor -related [Arabidopsis thaliana]
  misc_feature (1)..(335): Homolog of NCBI NO: 30680992 NR Description: expressed protein [Arabidopsis thaliana]
  misc_feature (1)..(335): Homolog of NCBI NO: 15081614 NR Description: At1g72160/T9N14_8 [Arabidopsis thaliana]
  misc_feature (1)..(250): Homolog of NCBI NO: 25407487 NR Description: hypothetical protein AT4g09160 [imported] -
  misc_feature (1)..(331): Homolog of NCBI NO: 8894548 NR Description: hypothetical protein [Cicer arietinum]
  misc_feature (1)..(340): Homolog of NCBI NO: 18397616 NR Description: expressed protein [Arabidopsis thaliana]
  misc_feature (1)..(250): Homolog of NCBI NO: 25407487 NR Description: hypothetical protein AT4g09160 [imported] -
  misc_feature (1)..(335): Homolog of NCBI NO: 15081614 NR Description: At1g72160/T9N14_8 [Arabidopsis thaliana]
  misc_feature (1)..(335): Homolog of NCBI NO: 30680992 NR Description: expressed protein [Arabidopsis thaliana]
  misc_feature (1)..(335): Homolog of NCBI NO: 15218383 NR Description: cytosolic factor -related [Arabidopsis thaliana]
  misc_feature (1)..(341): Homolog of NCBI NO: 15230555 NR Description: expressed protein [Arabidopsis thaliana]
MWGVSLLGGDDKADVILLKFLRARDFKVADSLRMLEKCLEWREEFKAEKLTEEDLGFKDLEGKVAYMRGYDKEGHPVCYNAYGVFKEKEMYERVFGDEEKLNKFLRWRVQVLERGVKMLHFKPGGVNSIIQVTDLKDMPKRELRVASNQILSLFQDNYPELVATKIFINVPWYFSVIYSMFSPFLTQRTKSKFVMSKEGNAAETLYKFIRPEDIPVQYGGLSRPTDSQNGPPKPASEFSIKGGEKVNIQIEGIEGGATITWDIVVGGWDLEYSAEFVPNAEESYAIVVEKPKKMKATDEAVCNSFTTVEAGKLILSVDNTLSRKKKVAAYRYTVRKSTTTV

SEQ ID NO: 46934 - DNA, 1021 bp, Arabidopsis thaliana
  misc_feature (1)..(1021): Ceres Seq. ID no. 12574941
  misc_feature: MA Experiment ID: 20000185 Result: Down-regulated in Transcription
  misc_feature: MA Experiment 20000185 PARAMETER Experiment Name: At_Roots__P Parameter: Age (day) Value: 7 vs. 21
  misc_feature: MA Experiment 20000185 PARAMETER Experiment Name: At_Roots__P Parameter: Organism Value: A. thaliana
  misc_feature: MA Experiment 20000185 PARAMETER Experiment Name: At_Roots__P Parameter: Tissue Value: Roots vs. Whole Plant
  misc_feature: MA Experiment ID: 20000439 Result: Down-regulated in Transcription
  misc_feature: MA Experiment 20000439 PARAMETER Experiment Name: At_Roots__P Parameter: Age (day) Value: 14 vs. 21
  misc_feature: MA Experiment 20000439 PARAMETER Experiment Name: At_Roots__P Parameter: Organism Value: A. thaliana
  misc_feature: MA Experiment 20000439 PARAMETER Experiment Name: At_Roots__P Parameter: Tissue Value: Roots vs. Whole Plant
  misc_feature: MA Experiment ID: 20001557 Result: Down-regulated in Transcription
  misc_feature: MA Experiment 20001557 PARAMETER Experiment Name: At_Drought_Soil_Dry_P Parameter: Age (day) Value: 27
  misc_feature: MA Experiment 20001557 PARAMETER Experiment Name: At_Drought_Soil_Dry_P Parameter: Organism Value: A. thaliana
  misc_feature: MA Experiment 20001557 PARAMETER Experiment Name: At_Drought_Soil_Dry_P Parameter: Plant Line Value: WS
  misc_feature: MA Experiment 20001557 PARAMETER Experiment Name: At_Drought_Soil_Dry_P Parameter: Post Timepoint (hr) Value: 3
  misc_feature: MA Experiment 20001557 PARAMETER Experiment Name: At_Drought_Soil_Dry_P Parameter: Post-Treatment Value: Re-Water vs. No Drought
  misc_feature: MA Experiment 20001557 PARAMETER Experiment Name: At_Drought_Soil_Dry_P Parameter: Timepoint (day) Value: 13
  misc_feature: MA Experiment 20001557 PARAMETER Experiment Name: At_Drought_Soil_Dry_P Parameter: Treatment Value: Drought vs. No Drought
  misc_feature: MA Experiment ID: 20001905 Result: Down-regulated in Transcription
  misc_feature: MA Experiment 20001905 PARAMETER Experiment Name: At_Drought_Reproduction_P Parameter: Age (day) Value: 40
  misc_feature: MA Experiment 20001905 PARAMETER Experiment Name: At_Drought_Reproduction_P Parameter: Organism Value: A. thaliana
  misc_feature: MA Experiment 20001905 PARAMETER Experiment Name: At_Drought_Reproduction_P Parameter: Plant Line Value: WS
  misc_feature: MA Experiment 20001905 PARAMETER Experiment Name: At_Drought_Reproduction_P Parameter: Timepoint (day) Value: 10
  misc_feature: MA Experiment 20001905 PARAMETER Experiment Name: At_Drought_Reproduction_P Parameter: Tissue Value: Rosettes
  misc_feature: MA Experiment 20001905 PARAMETER Experiment Name: At_Drought_Reproduction_P Parameter: Treatment Value: Drought vs. No Drought
gagagagcaagccattgcaggaaatggcgattccagtgacgagaatgatggttcctcacgcaataccatcgcttcgtctctcacatccaaaccctagtcgcgttgacttcctctgtcgctgtgctccatcagaaatccaaccacttcggcctgaactctctttatctgtcggaattcacgcaatccctcatccagataaggtagagaaaggtggtgaagatgctttctttgtaagtagttatagaggtggagtcatggctgttgcagatggtgtctccggttgggctgaacaagatgttgatccttccttgttctctaaagaacttatggctaacgcttctcgtttagttgatgaccaagaggtcagatatgatcctggttttctcattgacaaagctcataccgcaactacttctagaggttctgccacaattattctagctatgcttgaggaagtgggtattctcaaaataggcaatgttggtgactgtggacttaagcttcttcgggaaggtcagattatttttgccactgctccacaagagcactattttgactgtccttaccaactaagctctgaggggtctgctcaaacttatctagatgcatcgtttagcatagtggaagtacagaagggagacgtgatcgtgatgggttcagacggacttttcgataatgtgtttgatcatgagatcgtttctatagtgaccaagcatacagatgttgcagagtcatcaaggttattagctgaagtggcgagtagccattcaagagatacagagtttgagtctccatatgcattagaagcaagagccaaggggtttgatgttcctctctggaagaaggtactaggaaagaagcttacaggagggaagcttgatgatgtcactgtgatcgttgccaaagttgttagctcatgaatcactctgttcatgataagatcttctctttattctttttgtacaagtccttgtaagaaacttgttcttcacagaaattgataaatggtatttcaaagttc

SEQ ID NO: 46935 - protein, 305 aa, Arabidopsis thaliana
  peptide (1)..(305): Ceres Seq. ID no. 12574942
  misc_feature (64)..(258): Pfam Name: Protein phosphatase 2C Pfam Description: Protein phosphatase 2C
  misc_feature (61)..(302): Homolog of NCBI NO: 23507897 NR Description: hypothetical protein [Plasmodium falciparum 3D7]
  misc_feature (21)..(305): Homolog of NCBI NO: 18418226 NR Description: putative protein
  misc_feature (52)..(305): Homolog of NCBI NO: 30683717 NR Description: expressed protein [Arabidopsis thaliana]
  misc_feature (52)..(305): Homolog of NCBI NO: 25366932 NR Description: hypothetical protein dl4315c [imported] -
  misc_feature (42)..(305): Homolog of NCBI NO: 15240071 NR Description: putative protein; protein id: At5g66720.1
  misc_feature (8)..(118): Homolog of NCBI NO: 13359435 NR Description: putative senescence-associated protein [Pisum
  misc_feature (141)..(296): Homolog of NCBI NO: 13359435 NR Description: putative senescence-associated protein [Pisum
  misc_feature (43)..(302): Homolog of NCBI NO: 34896100 NR Description: B1189A09.35 [Oryza sativa (japonica
  misc_feature (8)..(272): Homolog of NCBI NO: 7487482 NR Description: hypothetical protein At2g30170 [imported] -
  misc_feature (8)..(305): Homolog of NCBI NO: 18402284 NR Description: expressed protein
ESKPLQEMAIPVTRMMVPHAIPSLRLSHPNPSRVDFLCRCAPSEIQPLRPELSLSVGIHAIPHPDKVEKGGEDAFFVSSYRGGVMAVADGVSGWAEQDVDPSLFSKELMANASRLVDDQEVRYDPGFLIDKAHTATTSRGSATIILAMLEEVGILKIGNVGDCGLKLLREGQIIFATAPQEHYFDCPYQLSSEGSAQTYLDASFSIVEVQKGDVIVMGSDGLFDNVFDHEIVSIVTKHTDVAESSRLLAEVASSHSRDTEFESPYALEARAKGFDVPLWKKVLGKKLTGGKLDDVTVIVAKVVSS

SEQ ID NO: 46936 - protein, 298 aa, Arabidopsis thaliana
  peptide (1)..(298): Ceres Seq. ID no. 12574943
  misc_feature (57)..(251): Pfam Name: Protein phosphatase 2C Pfam Description: Protein phosphatase 2C
  misc_feature (54)..(295): Homolog of NCBI NO: 23507897 NR Description: hypothetical protein [Plasmodium falciparum 3D7]
  misc_feature (14)..(298): Homolog of NCBI NO: 18418226 NR Description: putative protein
  misc_feature (45)..(298): Homolog of NCBI NO: 30683717 NR Description: expressed protein [Arabidopsis thaliana]
  misc_feature (45)..(298): Homolog of NCBI NO: 25366932 NR Description: hypothetical protein dl4315c [imported] -
  misc_feature (35)..(298): Homolog of NCBI NO: 15240071 NR Description: putative protein; protein id: At5g66720.1
  misc_feature (1)..(111): Homolog of NCBI NO: 13359435 NR Description: putative senescence-associated protein [Pisum
  misc_feature (134)..(289): Homolog of NCBI NO: 13359435 NR Description: putative senescence-associated protein [Pisum
  misc_feature (36)..(295): Homolog of NCBI NO: 34896100 NR Description: B1189A09.35 [Oryza sativa (japonica
  misc_feature (1)..(265): Homolog of NCBI NO: 7487482 NR Description: hypothetical protein At2g30170 [imported] -
  misc_feature (1)..(298): Homolog of NCBI NO: 18402284 NR Description: expressed protein
MAIPVTRMMVPHAIPSLRLSHPNPSRVDFLCRCAPSEIQPLRPELSLSVGIHAIPHPDKVEKGGEDAFFVSSYRGGVMAVADGVSGWAEQDVDPSLFSKELMANASRLVDDQEVRYDPGFLIDKAHTATTSRGSATIILAMLEEVGILKIGNVGDCGLKLLREGQIIFATAPQEHYFDCPYQLSSEGSAQTYLDASFSIVEVQKGDVIVMGSDGLFDNVFDHEIVSIVTKHTDVAESSRLLAEVASSHSRDTEFESPYALEARAKGFDVPLWKKVLGKKLTGGKLDDVTVIVAKVVSS

SEQ ID NO: 46937 - protein, 291 aa, Arabidopsis thaliana
  peptide (1)..(291): Ceres Seq. ID no. 12574944
  misc_feature (50)..(244): Pfam Name: Protein phosphatase 2C Pfam Description: Protein phosphatase 2C
  misc_feature (47)..(288): Homolog of NCBI NO: 23507897 NR Description: hypothetical protein [Plasmodium falciparum 3D7]
  misc_feature (7)..(291): Homolog of NCBI NO: 18418226 NR Description: putative protein
  misc_feature (38)..(291): Homolog of NCBI NO: 30683717 NR Description: expressed protein [Arabidopsis thaliana]
  misc_feature (38)..(291): Homolog of NCBI NO: 25366932 NR Description: hypothetical protein dl4315c [imported] -
  misc_feature (28)..(291): Homolog of NCBI NO: 15240071 NR Description: putative protein; protein id: At5g66720.1
  misc_feature (1)..(104): Homolog of NCBI NO: 13359435 NR Description: putative senescence-associated protein [Pisum
  misc_feature (127)..(282): Homolog of NCBI NO: 13359435 NR Description: putative senescence-associated protein [Pisum
  misc_feature (29)..(288): Homolog of NCBI NO: 34896100 NR Description: B1189A09.35 [Oryza sativa (japonica
  misc_feature (1)..(258): Homolog of NCBI NO: 7487482 NR Description: hypothetical protein At2g30170 [imported] -
  misc_feature (1)..(291): Homolog of NCBI NO: 18402284 NR Description: expressed protein
MMVPHAIPSLRLSHPNPSRVDFLCRCAPSEIQPLRPELSLSVGIHAIPHPDKVEKGGEDAFFVSSYRGGVMAVADGVSGWAEQDVDPSLFSKELMANASRLVDDQEVRYDPGFLIDKAHTATTSRGSATIILAMLEEVGILKIGNVGDCGLKLLREGQIIFATAPQEHYFDCPYQLSSEGSAQTYLDASFSIVEVQKGDVIVMGSDGLFDNVFDHEIVSIVTKHTDVAESSRLLAEVASSHSRDTEFESPYALEARAKGFDVPLWKKVLGKKLTGGKLDDVTVIVAKVVSS

SEQ ID NO: 46938 - DNA, 2714 bp, Arabidopsis thaliana; identical to SEQ ID NO: 44952
  misc_feature (1)..(2714): Ceres Seq. ID no. 12600111
  misc_feature: MA Experiment ID: 20000169 Result: Up-regulated in Transcription
  misc_feature: MA Experiment 20000169 PARAMETER Experiment Name: At_100uM_ABA_P Parameter: Age (day) Value: 14
  misc_feature: MA Experiment 20000169 PARAMETER Experiment Name: At_100uM_ABA_P Parameter: Organism Value: A. thaliana
  misc_feature: MA Experiment 20000169 PARAMETER Experiment Name: At_100uM_ABA_P Parameter: Plant Line Value: WS
  misc_feature: MA Experiment 20000169 PARAMETER Experiment Name: At_100uM_ABA_P Parameter: Timepoint (hr) Value: 6
  misc_feature: MA Experiment 20000169 PARAMETER Experiment Name: At_100uM_ABA_P Parameter: Tissue Value: Aerial
  misc_feature: MA Experiment 20000169 PARAMETER Experiment Name: At_100uM_ABA_P Parameter: Treatment Value: 100uM ABA vs. No Treatment
  misc_feature: MA Experiment ID: 20000173 Result: Up-regulated in Transcription
  misc_feature: MA Experiment 20000173 PARAMETER Experiment Name: At_42deg_Heat_P Parameter: Age (day) Value: 14
  misc_feature: MA Experiment 20000173 PARAMETER Experiment Name: At_42deg_Heat_P Parameter: Organism Value: A. thaliana
  misc_feature: MA Experiment 20000173 PARAMETER Experiment Name: At_42deg_Heat_P Parameter: Plant Line Value: WS
  misc_feature: MA Experiment 20000173 PARAMETER Experiment Name: At_42deg_Heat_P Parameter: Temperature (deg C) Value: 42 vs. 22
  misc_feature: MA Experiment 20000173 PARAMETER Experiment Name: At_42deg_Heat_P Parameter: Timepoint (hr) Value: 6
  misc_feature: MA Experiment 20000173 PARAMETER Experiment Name: At_42deg_Heat_P Parameter: Tissue Value: Aerial
  misc_feature: MA Experiment ID: 20000179 Result: Down-regulated in Transcription
  misc_feature: MA Experiment 20000179 PARAMETER Experiment Name: At_Germinating_Seeds_P Parameter: Age (hr) Value: 6 vs. 0
  misc_feature: MA Experiment 20000179 PARAMETER Experiment Name: At_Germinating_Seeds_P Parameter: Tissue Value: Germinating Seeds
  misc_feature: MA Experiment ID: 20000180 Result: Down-regulated in Transcription
  misc_feature: MA Experiment 20000180 PARAMETER Experiment Name: At_Germinating_Seeds_P Parameter: Age (hr) Value: 24 vs. 0
  misc_feature: MA Experiment 20000180 PARAMETER Experiment Name: At_Germinating_Seeds_P Parameter: Tissue Value: Germinating Seeds
  misc_feature: MA Experiment ID: 20000182 Result: Up-regulated in Transcription
  misc_feature: MA Experiment 20000182 PARAMETER Experiment Name: At_2mM_SA_P Parameter: Age (day) Value: 14
  misc_feature: MA Experiment 20000182 PARAMETER Experiment Name: At_2mM_SA_P Parameter: Organism Value: A. thaliana
  misc_feature: MA Experiment 20000182 PARAMETER Experiment Name: At_2mM_SA_P Parameter: Plant Line Value: WS
  misc_feature: MA Experiment 20000182 PARAMETER Experiment Name: At_2mM_SA_P Parameter: Timepoint (hr) Value: 6
  misc_feature: MA Experiment 20000182 PARAMETER Experiment Name: At_2mM_SA_P Parameter: Tissue Value: Aerial
  misc_feature: MA Experiment 20000182 PARAMETER Experiment Name: At_2mM_SA_P Parameter: Treatment Value: 2mM SA vs. No Treatment
  misc_feature: MA Experiment ID: 20000184 Result: Down-regulated in Transcription
  misc_feature: MA Experiment 20000184 PARAMETER Experiment Name: At_Shoots__P Parameter: Age (day) Value: 7
  misc_feature: MA Experiment 20000184 PARAMETER Experiment Name: At_Shoots__P Parameter: Tissue Value: Shoots vs. Whole Plant
  misc_feature: MA Experiment ID: 20000185 Result: Down-regulated in Transcription
  misc_feature: MA Experiment 20000185 PARAMETER Experiment Name: At_Roots__P Parameter: Age (day) Value: 7 vs. 21
  misc_feature: MA Experiment 20000185 PARAMETER Experiment Name: At_Roots__P Parameter: Organism Value: A. thaliana
  misc_feature: MA Experiment 20000185 PARAMETER Experiment Name: At_Roots__P Parameter: Tissue Value: Roots vs. Whole Plant
  misc_feature: MA Experiment ID: 20000211 Result: Up-regulated in Transcription
  misc_feature: MA Experiment 20000211 PARAMETER Experiment Name: At_0.001percent_MeJA__P Parameter: Age (day) Value: 14
  misc_feature: MA Experiment 20000211 PARAMETER Experiment Name: At_0.001percent_MeJA__P Parameter: Organism Value: A. thaliana
  misc_feature: MA Experiment 20000211 PARAMETER Experiment Name: At_0.001percent_MeJA__P Parameter: Plant Line Value: WS
  misc_feature: MA Experiment 20000211 PARAMETER Experiment Name: At_0.001percent_MeJA__P Parameter: Timepoint (hr) Value: 1
  misc_feature: MA Experiment 20000211 PARAMETER Experiment Name: At_0.001percent_MeJA__P Parameter: Tissue Value: Aerial
  misc_feature: MA Experiment 20000211 PARAMETER Experiment Name: At_0.001percent_MeJA__P Parameter: Treatment Value: 0.001percent MeJA vs. No Treatment
  misc_feature: MA Experiment ID: 20000264 Result: Down-regulated in Transcription
  misc_feature: MA Experiment 20000264 PARAMETER Experiment Name: At_Open_Flower_P Parameter: Age (day) Value: 21
  misc_feature: MA Experiment 20000264 PARAMETER Experiment Name: At_Open_Flower_P Parameter: Plant Line Value: WS
  misc_feature: MA Experiment 20000264 PARAMETER Experiment Name: At_Open_Flower_P Parameter: Tissue Value: Open Flower vs. Whole Plant
  misc_feature: MA Experiment ID: 20000265 Result: Down-regulated in Transcription
  misc_feature: MA Experiment 20000265 PARAMETER Experiment Name: At_Open_Flower_P Parameter: Age (day) Value: 21
  misc_feature: MA Experiment 20000265 PARAMETER Experiment Name: At_Open_Flower_P Parameter: Plant Line Value: WS
  misc_feature: MA Experiment 20000265 PARAMETER Experiment Name: At_Open_Flower_P Parameter: Tissue Value: Closed Flower vs. Whole Plant
  misc_feature: MA Experiment ID: 20000267 Result: Up-regulated in Transcription
  misc_feature: MA Experiment 20000267 PARAMETER Experiment Name: At_Drought_P Parameter: Age (day) Value: 7
  misc_feature: MA Experiment 20000267 PARAMETER Experiment Name: At_Drought_P Parameter: Organism Value: A. thaliana
  misc_feature: MA Experiment 20000267 PARAMETER Experiment Name: At_Drought_P Parameter: Plant Line Value: WS
  misc_feature: MA Experiment 20000267 PARAMETER Experiment Name: At_Drought_P Parameter: Timepoint (hr) Value: 6
  misc_feature: MA Experiment 20000267 PARAMETER Experiment Name: At_Drought_P Parameter: Tissue Value: Whole Plant
  misc_feature: MA Experiment 20000267 PARAMETER Experiment Name: At_Drought_P Parameter: Treatment Value: Drought vs. No Drought
  misc_feature: MA Experiment ID: 20000436 Result: Up-regulated in Transcription
  misc_feature: MA Experiment 20000436 PARAMETER Experiment Name: At_Drought_P Parameter: Age (day) Value: 7
  misc_feature: MA Experiment 20000436 PARAMETER Experiment Name: At_Drought_P Parameter: Organism Value: A. thaliana
  misc_feature: MA Experiment 20000436 PARAMETER Experiment Name: At_Drought_P Parameter: Plant Line Value: WS
  misc_feature: MA Experiment 20000436 PARAMETER Experiment Name: At_Drought_P Parameter: Timepoint (hr) Value: 12
  misc_feature: MA Experiment 20000436 PARAMETER Experiment Name: At_Drought_P Parameter: Tissue Value: Whole Plant
  misc_feature: MA Experiment 20000436 PARAMETER Experiment Name: At_Drought_P Parameter: Treatment Value: Drought vs. No Drought
  misc_feature: MA Experiment ID: 20000437 Result: Up-regulated in Transcription
  misc_feature: MA Experiment 20000437 PARAMETER Experiment Name: At_Drought_P Parameter: Age (day) Value: 8
  misc_feature: MA Experiment 20000437 PARAMETER Experiment Name: At_Drought_P Parameter: Organism Value: A. thaliana
  misc_feature: MA Experiment 20000437 PARAMETER Experiment Name: At_Drought_P Parameter: Plant Line Value: WS
  misc_feature: MA Experiment 20000437 PARAMETER Experiment Name: At_Drought_P Parameter: Timepoint (hr) Value: 24
  misc_feature: MA Experiment 20000437 PARAMETER Experiment Name: At_Drought_P Parameter: Tissue Value: Whole Plant
  misc_feature: MA Experiment 20000437 PARAMETER Experiment Name: At_Drought_P Parameter: Treatment Value: Drought vs. No Drought
  misc_feature: MA Experiment ID: 20000438 Result: Down-regulated in Transcription
  misc_feature: MA Experiment 20000438 PARAMETER Experiment Name: At_Shoots__P Parameter: Age (day) Value: 14
  misc_feature: MA Experiment 20000438 PARAMETER Experiment Name: At_Shoots__P Parameter: Tissue Value: Shoots vs. Whole Plant
  misc_feature: MA Experiment ID: 20000439 Result: Down-regulated in Transcription
  misc_feature: MA Experiment 20000439 PARAMETER Experiment Name: At_Roots__P Parameter: Age (day) Value: 14 vs. 21
  misc_feature: MA Experiment 20000439 PARAMETER Experiment Name: At_Roots__P Parameter: Organism Value: A. thaliana
  misc_feature: MA Experiment 20000439 PARAMETER Experiment Name: At_Roots__P Parameter: Tissue Value: Roots vs. Whole Plant
  misc_feature: MA Experiment ID: 20000441 Result: Up-regulated in Transcription
  misc_feature: MA Experiment 20000441 PARAMETER Experiment Name: At_1uM_BR-BRZ__P Parameter: Tissue Value: Shoot Apices
  misc_feature: MA Experiment 20000441 PARAMETER Experiment Name: At_1uM_BR-BRZ__P Parameter: Treatment Value: 1uM BR vs. No Treatment
  misc_feature: MA Experiment ID: 20000452 Result: Down-regulated in Transcription
  misc_feature: MA Experiment 20000452 PARAMETER Experiment Name: At_CS6879_Shoots-Roots_P Parameter: Age (day) Value: 14
  misc_feature: MA Experiment 20000452 PARAMETER Experiment Name: At_CS6879_Shoots-Roots_P Parameter: Organism Value: A. thaliana
  misc_feature: MA Experiment 20000452 PARAMETER Experiment Name: At_CS6879_Shoots-Roots_P Parameter: Plant Line Value: CS6879 vs. WS
  misc_feature: MA Experiment 20000452 PARAMETER Experiment Name: At_CS6879_Shoots-Roots_P Parameter: Tissue Value: Shoots
  misc_feature: MA Experiment ID: 20000453 Result: Up-regulated in Transcription
  misc_feature: MA Experiment 20000453 PARAMETER Experiment Name: At_100uM_ABA_P Parameter: Age (day) Value: 15
  misc_feature: MA Experiment 20000453 PARAMETER Experiment Name: At_100uM_ABA_P Parameter: Organism Value: A. thaliana
  misc_feature: MA Experiment 20000453 PARAMETER Experiment Name: At_100uM_ABA_P Parameter: Plant Line Value: WS
  misc_feature: MA Experiment 20000453 PARAMETER Experiment Name: At_100uM_ABA_P Parameter: Timepoint (hr) Value: 24
  misc_feature: MA Experiment 20000453 PARAMETER Experiment Name: At_100uM_ABA_P Parameter: Tissue Value: Aerial
  misc_feature: MA Experiment 20000453 PARAMETER Experiment Name: At_100uM_ABA_P Parameter: Treatment Value: 100uM ABA vs. No Treatment
  misc_feature: MA Experiment ID: 20000527 Result: Up-regulated in Transcription
  misc_feature: MA Experiment 20000527 PARAMETER Experiment Name: At_10percent_PEG_P Parameter: Age (day) Value: 20
  misc_feature: MA Experiment 20000527 PARAMETER Experiment Name: At_10percent_PEG_P Parameter: Organism Value: A. thaliana
  misc_feature: MA Experiment 20000527 PARAMETER Experiment Name: At_10percent_PEG_P Parameter: Plant Line Value: WS
  misc_feature: MA Experiment 20000527 PARAMETER Experiment Name: At_10percent_PEG_P Parameter: Timepoint (day) Value: 20
  misc_feature: MA Experiment 20000527 PARAMETER Experiment Name: At_10percent_PEG_P Parameter: Tissue Value: Whole Plant
  misc_feature: MA Experiment 20000527 PARAMETER Experiment Name: At_10percent_PEG_P Parameter: Treatment Value: 10percent PEG vs. No Treatment
  misc_feature: MA Experiment ID: 20000573 Result: Up-regulated in Transcription
  misc_feature: MA Experiment 20000573 PARAMETER Experiment Name: At_100uM_ABA_Mutants__P Parameter: Organism Value: A. thaliana
  misc_feature: MA Experiment 20000573 PARAMETER Experiment Name: At_100uM_ABA_Mutants__P Parameter: Plant Line Value: CS22 vs. Ler wt
  misc_feature: MA Experiment 20000573 PARAMETER Experiment Name: At_100uM_ABA_Mutants__P Parameter: Timepoint (hr) Value: N/A
  misc_feature: MA Experiment 20000573 PARAMETER Experiment Name: At_100uM_ABA_Mutants__P Parameter: Tissue Value: Whole Plant
  misc_feature: MA Experiment 20000573 PARAMETER Experiment Name: At_100uM_ABA_Mutants__P Parameter: Treatment Value: None
  misc_feature: MA Experiment ID: 20000578 Result: Up-regulated in Transcription
  misc_feature: MA Experiment 20000578 PARAMETER Experiment Name: At_CS3726__P Parameter: Organism Value: A. thaliana
  misc_feature: MA Experiment 20000578 PARAMETER Experiment Name: At_CS3726__P Parameter: Plant Line Value: CS3726
  misc_feature: MA Experiment 20000578 PARAMETER Experiment Name: At_CS3726__P Parameter: Tissue Value: Whole Plant
  misc_feature: MA Experiment ID: 20000606 Result: Up-regulated in Transcription
  misc_feature: MA Experiment 20000606 PARAMETER Experiment Name: At_CS8548_Mutant_P Parameter: Age (day) Value: 14
  misc_feature: MA Experiment 20000606 PARAMETER Experiment Name: At_CS8548_Mutant_P Parameter: Plant Line Value: CS8548 vs. wt
  misc_feature: MA Experiment 20000606 PARAMETER Experiment Name: At_CS8548_Mutant_P Parameter: Tissue Value: Whole Plant
  misc_feature: MA Experiment ID: 20000709 Result: Up-regulated in Transcription
  misc_feature: MA Experiment 20000709 PARAMETER Experiment Name: At_15mM_NH4NO3_L-to-H_P Parameter: Age (hr) Value: 14
  misc_feature: MA Experiment 20000709 PARAMETER Experiment Name: At_15mM_NH4NO3_L-to-H_P Parameter: Organism Value: A. thaliana
  misc_feature: MA Experiment 20000709 PARAMETER Experiment Name: At_15mM_NH4NO3_L-to-H_P Parameter: Plant Line Value: WS
  misc_feature: MA Experiment 20000709 PARAMETER Experiment Name: At_15mM_NH4NO3_L-to-H_P Parameter: Timepoint (hr) Value: 4
  misc_feature: MA Experiment 20000709 PARAMETER Experiment Name: At_15mM_NH4NO3_L-to-H_P Parameter: Tissue Value: Aerial
  misc_feature: MA Experiment 20000709 PARAMETER Experiment Name: At_15mM_NH4NO3_L-to-H_P Parameter: Treatment Value: 15mM NH4NO3 vs. 30mM Mannitol
  misc_feature: MA Experiment ID: 20001248 Result: Up-regulated in Transcription
  misc_feature: MA Experiment 20001248 PARAMETER Experiment Name: At_Far-red-induction_P Parameter: Age (day) Value: 7
  misc_feature: MA Experiment 20001248 PARAMETER Experiment Name: At_Far-red-induction_P Parameter: Light Value: Far-red vs. White
  misc_feature: MA Experiment 20001248 PARAMETER Experiment Name: At_Far-red-induction_P Parameter: Organism Value: A. thaliana
  misc_feature: MA Experiment 20001248 PARAMETER Experiment Name: At_Far-red-induction_P Parameter: Plant Line Value: Columbia
  misc_feature: MA Experiment 20001248 PARAMETER Experiment Name: At_Far-red-induction_P Parameter: Timepoint (hr) Value: 4
  misc_feature: MA Experiment 20001248 PARAMETER Experiment Name: At_Far-red-induction_P Parameter: Tissue Value: Whole Plant
  misc_feature: MA Experiment ID: 20001450 Result: Up-regulated in Transcription
  misc_feature: MA Experiment 20001450 PARAMETER Experiment Name: At_Far-red-induction_P Parameter: Age (day) Value: 7
  misc_feature: MA Experiment 20001450 PARAMETER Experiment Name: At_Far-red-induction_P Parameter: Light Value: Far-red vs. White
  misc_feature: MA Experiment 20001450 PARAMETER Experiment Name: At_Far-red-induction_P Parameter: Organism Value: A. thaliana
  misc_feature: MA Experiment 20001450 PARAMETER Experiment Name: At_Far-red-induction_P Parameter: Plant Line Value: Columbia
  misc_feature: MA Experiment 20001450 PARAMETER Experiment Name: At_Far-red-induction_P Parameter: Timepoint (hr) Value: 8
  misc_feature: MA Experiment 20001450 PARAMETER Experiment Name: At_Far-red-induction_P Parameter: Tissue Value: Whole Plant
  misc_feature: MA Experiment ID: 20001451 Result: Up-regulated in Transcription
  misc_feature: MA Experiment 20001451 PARAMETER Experiment Name: At_Far-red-induction_P Parameter: Age (day) Value: 7
  misc_feature: MA Experiment 20001451 PARAMETER Experiment Name: At_Far-red-induction_P Parameter: Light Value: Far-red vs. White
  misc_feature: MA Experiment 20001451 PARAMETER Experiment Name: At_Far-red-induction_P Parameter: Organism Value: A. thaliana
  misc_feature: MA Experiment 20001451 PARAMETER Experiment Name: At_Far-red-induction_P Parameter: Plant Line Value: Columbia
  misc_feature: MA Experiment 20001451 PARAMETER Experiment Name: At_Far-red-induction_P Parameter: Timepoint (hr) Value: 24
  misc_feature: MA Experiment 20001451 PARAMETER Experiment Name: At_Far-red-induction_P Parameter: Tissue Value: Whole Plant
  misc_feature: MA Experiment ID: 20001554 Result: Up-regulated in Transcription
  misc_feature: MA Experiment 20001554 PARAMETER Experiment Name: At_Drought_Soil_Dry_P Parameter: Age (day) Value: 21
  misc_feature: MA Experiment 20001554 PARAMETER Experiment Name: At_Drought_Soil_Dry_P Parameter: Organism Value: A. thaliana
  misc_feature: MA Experiment 20001554 PARAMETER Experiment Name: At_Drought_Soil_Dry_P Parameter: Plant Line Value: WS
  misc_feature: MA Experiment 20001554 PARAMETER Experiment Name: At_Drought_Soil_Dry_P Parameter: Post Timepoint (hr) Value: None
  misc_feature: MA Experiment 20001554 PARAMETER Experiment Name: At_Drought_Soil_Dry_P Parameter: Post-Treatment Value: None
  misc_feature: MA Experiment 20001554 PARAMETER Experiment Name: At_Drought_Soil_Dry_P Parameter: Timepoint (day) Value: 7
  misc_feature: MA Experiment 20001554 PARAMETER Experiment Name: At_Drought_Soil_Dry_P Parameter: Treatment Value: Drought vs. No Drought
  misc_feature: MA Experiment ID: 20001555 Result: Up-regulated in Transcription
  misc_feature: MA Experiment 20001555 PARAMETER Experiment Name: At_Drought_Soil_Dry_P Parameter: Age (day) Value: 24
  misc_feature: MA Experiment 20001555 PARAMETER Experiment Name: At_Drought_Soil_Dry_P Parameter: Organism Value: A. thaliana
  misc_feature: MA Experiment 20001555 PARAMETER Experiment Name: At_Drought_Soil_Dry_P Parameter: Plant Line Value: WS
  misc_feature: MA Experiment 20001555 PARAMETER Experiment Name: At_Drought_Soil_Dry_P Parameter: Post Timepoint (hr) Value: None
  misc_feature: MA Experiment 20001555 PARAMETER Experiment Name: At_Drought_Soil_Dry_P Parameter: Post-Treatment Value: None
  misc_feature: MA Experiment 20001555 PARAMETER Experiment Name: At_Drought_Soil_Dry_P Parameter: Timepoint (day) Value: 10
  misc_feature: MA Experiment 20001555 PARAMETER Experiment Name: At_Drought_Soil_Dry_P Parameter: Treatment Value: Drought vs. No Drought
  misc_feature: MA Experiment ID: 20001556 Result: Up-regulated in Transcription
  misc_feature: MA Experiment 20001556 PARAMETER Experiment Name: At_Drought_Soil_Dry_P Parameter: Age (day) Value: 26
  misc_feature: MA Experiment 20001556 PARAMETER Experiment Name: At_Drought_Soil_Dry_P Parameter: Organism Value: A. thaliana
  misc_feature: MA Experiment 20001556 PARAMETER Experiment Name: At_Drought_Soil_Dry_P Parameter: Plant Line Value: WS
  misc_feature: MA Experiment 20001556 PARAMETER Experiment Name: At_Drought_Soil_Dry_P Parameter: Post Timepoint (hr) Value: None
  misc_feature: MA Experiment 20001556 PARAMETER Experiment Name: At_Drought_Soil_Dry_P Parameter: Post-Treatment Value: None
  misc_feature: MA Experiment 20001556 PARAMETER Experiment Name: At_Drought_Soil_Dry_P Parameter: Timepoint (day) Value: 12
  misc_feature: MA Experiment 20001556 PARAMETER Experiment Name: At_Drought_Soil_Dry_P Parameter: Treatment Value: Drought vs. No Drought
  misc_feature: MA Experiment ID: 20001557 Result: Up-regulated in Transcription
  misc_feature: MA Experiment 20001557 PARAMETER Experiment Name: At_Drought_Soil_Dry_P Parameter: Age (day) Value: 27
  misc_feature: MA Experiment 20001557 PARAMETER Experiment Name: At_Drought_Soil_Dry_P Parameter: Organism Value: A. thaliana
  misc_feature: MA Experiment 20001557 PARAMETER Experiment Name: At_Drought_Soil_Dry_P Parameter: Plant Line Value: WS
  misc_feature: MA Experiment 20001557 PARAMETER Experiment Name: At_Drought_Soil_Dry_P Parameter: Post Timepoint (hr) Value: 3
  misc_feature: MA Experiment 20001557 PARAMETER Experiment Name: At_Drought_Soil_Dry_P Parameter: Post-Treatment Value: Re-Water vs. No Drought
  misc_feature: MA Experiment 20001557 PARAMETER Experiment Name: At_Drought_Soil_Dry_P Parameter: Timepoint (day) Value: 13
  misc_feature: MA Experiment 20001557 PARAMETER Experiment Name: At_Drought_Soil_Dry_P Parameter: Treatment Value: Drought vs. No Drought
  misc_feature: MA Experiment ID: 20001558 Result: Up-regulated in Transcription
  misc_feature: MA Experiment 20001558 PARAMETER Experiment Name: At_Drought_Soil_Dry_P Parameter: Age (day) Value: 27
  misc_feature: MA Experiment 20001558 PARAMETER Experiment Name: At_Drought_Soil_Dry_P Parameter: Organism Value: A. thaliana
  misc_feature: MA Experiment 20001558 PARAMETER Experiment Name: At_Drought_Soil_Dry_P Parameter: Plant Line Value: WS
  misc_feature: MA Experiment 20001558 PARAMETER Experiment Name: At_Drought_Soil_Dry_P Parameter: Post Timepoint (hr) Value: 6
  misc_feature: MA Experiment 20001558 PARAMETER Experiment Name: At_Drought_Soil_Dry_P Parameter: Post-Treatment Value: Re-Water vs. No Drought
  misc_feature: MA Experiment 20001558 PARAMETER Experiment Name: At_Drought_Soil_Dry_P Parameter: Timepoint (day) Value: 13
  misc_feature: MA Experiment 20001558 PARAMETER Experiment Name: At_Drought_Soil_Dry_P Parameter: Treatment Value: Drought vs. No Drought
  misc_feature: MA Experiment ID: 20001757 Result: Up-regulated in Transcription
  misc_feature: MA Experiment 20001757 PARAMETER Experiment Name: At_50mM_NH4NO3_L-to-H_P Parameter: Timepoint (hr) Value: 6
  misc_feature: MA Experiment 20001757 PARAMETER Experiment Name: At_50mM_NH4NO3_L-to-H_P Parameter: Tissue Value: Leaf
  misc_feature: MA Experiment 20001757 PARAMETER Experiment Name: At_50mM_NH4NO3_L-to-H_P Parameter: Treatment Value: 50mM NH4NO3 vs 100mM Mannitol
  misc_feature: MA Experiment ID: 20001905 Result: Up-regulated in Transcription
  misc_feature: MA Experiment 20001905 PARAMETER Experiment Name: At_Drought_Reproduction_P Parameter: Age (day) Value: 40
  misc_feature: MA Experiment 20001905 PARAMETER Experiment Name: At_Drought_Reproduction_P Parameter: Organism Value: A. thaliana
  misc_feature: MA Experiment 20001905 PARAMETER Experiment Name: At_Drought_Reproduction_P Parameter: Plant Line Value: WS
  misc_feature: MA Experiment 20001905 PARAMETER Experiment Name: At_Drought_Reproduction_P Parameter: Timepoint (day) Value: 10
  misc_feature: MA Experiment 20001905 PARAMETER Experiment Name: At_Drought_Reproduction_P Parameter: Tissue Value: Rosettes
  misc_feature: MA Experiment 20001905 PARAMETER Experiment Name: At_Drought_Reproduction_P Parameter: Treatment Value: Drought vs. No Drought
  misc_feature: MA Experiment ID: 20001908 Result: Up-regulated in Transcription
  misc_feature: MA Experiment 20001908 PARAMETER Experiment Name: At_Drought_Reproduction_P Parameter: Age (day) Value: 40
  misc_feature: MA Experiment 20001908 PARAMETER Experiment Name: At_Drought_Reproduction_P Parameter: Organism Value: A. thaliana
  misc_feature: MA Experiment 20001908 PARAMETER Experiment Name: At_Drought_Reproduction_P Parameter: Plant Line Value: WS
  misc_feature: MA Experiment 20001908 PARAMETER Experiment Name: At_Drought_Reproduction_P Parameter: Timepoint (day) Value: 10
  misc_feature: MA Experiment 20001908 PARAMETER Experiment Name: At_Drought_Reproduction_P Parameter: Tissue Value: Siliques
  misc_feature: MA Experiment 20001908 PARAMETER Experiment Name: At_Drought_Reproduction_P Parameter: Treatment Value: Drought vs. No Drought
  misc_feature: MA Experiment ID: 20001911 Result: Up-regulated in Transcription
  misc_feature: MA Experiment 20001911 PARAMETER Experiment Name: At_Drought_Reproduction_P Parameter: Age (day) Value: 40
  misc_feature: MA Experiment 20001911 PARAMETER Experiment Name: At_Drought_Reproduction_P Parameter: Organism Value: A. thaliana
  misc_feature: MA Experiment 20001911 PARAMETER Experiment Name: At_Drought_Reproduction_P Parameter: Plant Line Value: WS
  misc_feature: MA Experiment 20001911 PARAMETER Experiment Name: At_Drought_Reproduction_P Parameter: Timepoint (day) Value: 10
  misc_feature: MA Experiment 20001911 PARAMETER Experiment Name: At_Drought_Reproduction_P Parameter: Tissue Value: Flowers
  misc_feature: MA Experiment 20001911 PARAMETER Experiment Name: At_Drought_Reproduction_P Parameter: Treatment Value: Drought vs. No Drought

SEQ ID NO: 46939 - protein, 773 aa, Arabidopsis thaliana; identical to SEQ ID NO: 44953
  peptide (1)..(773): Ceres Seq. ID no. 12600112
  misc_feature (714)..(769): Homolog of NCBI NO: 30687712 NR Description: glycosyl hydrolase family 36 [Arabidopsis
  misc_feature (1)..(680): Homolog of NCBI NO: 30687712 NR Description: glycosyl hydrolase family 36 [Arabidopsis
  misc_feature (706)..(771): Homolog of NCBI NO: 15222768 NR Description: glycosyl hydrolase family 36; protein id:
  misc_feature (1)..(680): Homolog of NCBI NO: 15222768 NR Description: glycosyl hydrolase family 36; protein id:
  misc_feature (713)..(771): Homolog of NCBI NO: 23452226 NR Description: alkaline alpha-galactosidase seed imbibition
  misc_feature (1)..(680): Homolog of NCBI NO: 23452226 NR Description: alkaline alpha-galactosidase seed imbibition
  misc_feature (707)..(771): Homolog of NCBI NO: 29838629 NR Description: alkaline alpha galactosidase I [Cucumis melo]
  misc_feature (1)..(684): Homolog of NCBI NO: 29838629 NR Description: alkaline alpha galactosidase I [Cucumis melo]
  misc_feature (712)..(773): Homolog of NCBI NO: 282994 NR Description: Sip1 protein - barley
  misc_feature (1)..(689): Homolog of NCBI NO: 282994 NR Description: Sip1 protein - barley
  misc_feature (714)..(769): Homolog of NCBI NO: 30687712 NR Description: glycosyl hydrolase family 36 [Arabidopsis
  misc_feature (1)..(680): Homolog of NCBI NO: 30687712 NR Description: glycosyl hydrolase family 36 [Arabidopsis
  misc_feature (706)..(771): Homolog of NCBI NO: 15222768 NR Description: glycosyl hydrolase family 36; protein id:
  misc_feature (1)..(680): Homolog of NCBI NO: 15222768 NR Description: glycosyl hydrolase family 36; protein id:
  misc_feature (713)..(771): Homolog of NCBI NO: 23452226 NR Description: alkaline alpha-galactosidase seed imbibition
  misc_feature (1)..(680): Homolog of NCBI NO: 23452226 NR Description: alkaline alpha-galactosidase seed imbibition
  misc_feature (707)..(771): Homolog of NCBI NO: 29838629 NR Description: alkaline alpha galactosidase I [Cucumis melo]
  misc_feature (1)..(684): Homolog of NCBI NO: 29838629 NR Description: alkaline alpha galactosidase I [Cucumis melo]
  misc_feature (712)..(773): Homolog of NCBI NO: 282994 NR Description: Sip1 protein - barley
  misc_feature (1)..(689): Homolog of NCBI NO: 282994 NR Description: Sip1 protein - barley
  misc_feature (714)..(769): Homolog of NCBI NO: 30687712 NR Description: glycosyl hydrolase family 36 [Arabidopsis
  misc_feature (1)..(680): Homolog of NCBI NO: 30687712 NR Description: glycosyl hydrolase family 36 [Arabidopsis
  misc_feature (706)..(771): Homolog of NCBI NO: 15222768 NR Description: glycosyl hydrolase family 36; protein id:
  misc_feature (1)..(680): Homolog of NCBI NO: 15222768 NR Description: glycosyl hydrolase family 36; protein id:
  misc_feature (713)..(771): Homolog of NCBI NO: 23452226 NR Description: alkaline alpha-galactosidase seed imbibition
  misc_feature (1)..(680): Homolog of NCBI NO: 23452226 NR Description: alkaline alpha-galactosidase seed imbibition
  misc_feature (707)..(771): Homolog of NCBI NO: 29838629 NR Description: alkaline alpha galactosidase I [Cucumis melo]
  misc_feature (1)..(684): Homolog of NCBI NO: 29838629 NR Description: alkaline alpha galactosidase I [Cucumis melo]
  misc_feature (712)..(773): Homolog of NCBI NO: 282994 NR Description: Sip1 protein - barley
  misc_feature (1)..(689): Homolog of NCBI NO: 282994 NR Description: Sip1 protein - barley

SEQ ID NO: 46940 - protein, 705 aa, Arabidopsis thaliana; identical to SEQ ID NO: 44954
  peptide (1)..(705): Ceres Seq. ID no. 12600113
  misc_feature (646)..(701): Homolog of NCBI NO: 30687712 NR Description: glycosyl hydrolase family 36 [Arabidopsis
  misc_feature (1)..(612): Homolog of NCBI NO: 30687712 NR Description: glycosyl hydrolase family 36 [Arabidopsis
  misc_feature (638)..(703): Homolog of NCBI NO: 15222768 NR Description: glycosyl hydrolase family 36; protein id:
  misc_feature (1)..(612): Homolog of NCBI NO: 15222768 NR Description: glycosyl hydrolase family 36; protein id:
  misc_feature (645)..(703): Homolog of NCBI NO: 23452226 NR Description: alkaline alpha-galactosidase seed imbibition
  misc_feature (1)..(612): Homolog of NCBI NO: 23452226 NR Description: alkaline alpha-galactosidase seed imbibition
  misc_feature (639)..(703): Homolog of NCBI NO: 29838629 NR Description: alkaline alpha galactosidase I [Cucumis melo]
  misc_feature (1)..(616): Homolog of NCBI NO: 29838629 NR Description: alkaline alpha galactosidase I [Cucumis melo]
  misc_feature (644)..(705): Homolog of NCBI NO: 282994 NR Description: Sip1 protein - barley
  misc_feature (1)..(621): Homolog of NCBI NO: 282994 NR Description: Sip1 protein - barley
  misc_feature (646)..(701): Homolog of NCBI NO: 30687712 NR Description: glycosyl hydrolase family 36 [Arabidopsis
  misc_feature (1)..(612): Homolog of NCBI NO: 30687712 NR Description: glycosyl hydrolase family 36 [Arabidopsis
  misc_feature (638)..(703): Homolog of NCBI NO: 15222768 NR Description: glycosyl hydrolase family 36; protein id:
  misc_feature (1)..(612): Homolog of NCBI NO: 15222768 NR Description: glycosyl hydrolase family 36; protein id:
  misc_feature (645)..(703): Homolog of NCBI NO: 23452226 NR Description: alkaline alpha-galactosidase seed imbibition
  misc_feature (1)..(612): Homolog of NCBI NO: 23452226 NR Description: alkaline alpha-galactosidase seed imbibition
  misc_feature (639)..(703): Homolog of NCBI NO: 29838629 NR Description: alkaline alpha galactosidase I [Cucumis melo]
  misc_feature (1)..(616): Homolog of NCBI NO: 29838629 NR Description: alkaline alpha galactosidase I [Cucumis melo]
  misc_feature (644)..(705): Homolog of NCBI NO: 282994 NR Description: Sip1 protein - barley
  misc_feature (1)..(621): Homolog of NCBI NO: 282994 NR Description: Sip1 protein - barley
  misc_feature (646)..(701): Homolog of NCBI NO: 30687712 NR Description: glycosyl hydrolase family 36 [Arabidopsis
  misc_feature (1)..(612): Homolog of NCBI NO: 30687712 NR Description: glycosyl hydrolase family 36 [Arabidopsis
  misc_feature (638)..(703): Homolog of NCBI NO: 15222768 NR Description: glycosyl hydrolase family 36; protein id:
  misc_feature (1)..(612): Homolog of NCBI NO: 15222768 NR Description: glycosyl hydrolase family 36; protein id:
  misc_feature (645)..(703): Homolog of NCBI NO: 23452226 NR Description: alkaline alpha-galactosidase seed imbibition
  misc_feature (1)..(612): Homolog of NCBI NO: 23452226 NR Description: alkaline alpha-galactosidase seed imbibition
  misc_feature (639)..(703): Homolog of NCBI NO: 29838629 NR Description: alkaline alpha galactosidase I [Cucumis melo]
  misc_feature (1)..(616): Homolog of NCBI NO: 29838629 NR Description: alkaline alpha galactosidase I [Cucumis melo]
  misc_feature (644)..(705): Homolog of NCBI NO: 282994 NR Description: Sip1 protein - barley
  misc_feature (1)..(621): Homolog of NCBI NO: 282994 NR Description: Sip1 protein - barley

SEQ ID NO: 46941 - protein, 695 aa, Arabidopsis thaliana; identical to SEQ ID NO: 44955
  peptide (1)..(695): Ceres Seq. ID no. 12600114
  misc_feature (636)..(691): Homolog of NCBI NO: 30687712 NR Description: glycosyl hydrolase family 36 [Arabidopsis
  misc_feature (1)..(602): Homolog of NCBI NO: 30687712 NR Description: glycosyl hydrolase family 36 [Arabidopsis
  misc_feature (628)..(693): Homolog of NCBI NO: 15222768 NR Description: glycosyl hydrolase family 36; protein id:
  misc_feature (1)..(602): Homolog of NCBI NO: 15222768 NR Description: glycosyl hydrolase family 36; protein id:
  misc_feature (635)..(693): Homolog of NCBI NO: 23452226 NR Description: alkaline alpha-galactosidase seed imbibition
  misc_feature (1)..(602): Homolog of NCBI NO: 23452226 NR Description: alkaline alpha-galactosidase seed imbibition
  misc_feature (629)..(693): Homolog of NCBI NO: 29838629 NR Description: alkaline alpha galactosidase I [Cucumis melo]
  misc_feature (1)..(606): Homolog of NCBI NO: 29838629 NR Description: alkaline alpha galactosidase I [Cucumis melo]
  misc_feature (634)..(695): Homolog of NCBI NO: 282994 NR Description: Sip1 protein - barley
  misc_feature (1)..(611): Homolog of NCBI NO: 282994 NR Description: Sip1 protein - barley
  misc_feature (636)..(691): Homolog of NCBI NO: 30687712 NR Description: glycosyl hydrolase family 36 [Arabidopsis
  misc_feature (1)..(602): Homolog of NCBI NO: 30687712 NR Description: glycosyl hydrolase family 36 [Arabidopsis
  misc_feature (628)..(693): Homolog of NCBI NO: 15222768 NR Description: glycosyl hydrolase family 36; protein id:
  misc_feature (1)..(602): Homolog of NCBI NO: 15222768 NR Description: glycosyl hydrolase family 36; protein id:
  misc_feature (635)..(693): Homolog of NCBI NO: 23452226 NR Description: alkaline alpha-galactosidase seed imbibition
  misc_feature (1)..(602): Homolog of NCBI NO: 23452226 NR Description: alkaline alpha-galactosidase seed imbibition
  misc_feature (629)..(693): Homolog of NCBI NO: 29838629 NR Description: alkaline alpha galactosidase I [Cucumis melo]
  misc_feature (1)..(606): Homolog of NCBI NO: 29838629 NR Description: alkaline alpha galactosidase I [Cucumis melo]
  misc_feature (634)..(695): Homolog of NCBI NO: 282994 NR Description: Sip1 protein - barley
  misc_feature (1)..(611): Homolog of NCBI NO: 282994 NR Description: Sip1 protein - barley
  misc_feature (636)..(691): Homolog of NCBI NO: 30687712 NR Description: glycosyl hydrolase family 36 [Arabidopsis
  misc_feature (1)..(602): Homolog of NCBI NO: 30687712 NR Description: glycosyl hydrolase family 36 [Arabidopsis
  misc_feature (628)..(693): Homolog of NCBI NO: 15222768 NR Description: glycosyl hydrolase family 36; protein id:
  misc_feature (1)..(602): Homolog of NCBI NO: 15222768 NR Description: glycosyl hydrolase family 36; protein id:
  misc_feature (635)..(693): Homolog of NCBI NO: 23452226 NR Description: alkaline alpha-galactosidase seed imbibition
  misc_feature (1)..(602): Homolog of NCBI NO: 23452226 NR Description: alkaline alpha-galactosidase seed imbibition
  misc_feature (629)..(693): Homolog of NCBI NO: 29838629 NR Description: alkaline alpha galactosidase I [Cucumis melo]
  misc_feature (1)..(606): Homolog of NCBI NO: 29838629 NR Description: alkaline alpha galactosidase I [Cucumis melo]
  misc_feature (634)..(695): Homolog of NCBI NO: 282994 NR Description: Sip1 protein - barley
  misc_feature (1)..(611): Homolog of NCBI NO: 282994 NR Description: Sip1 protein - barley

SEQ ID NO: 46942 - DNA, 1934 bp, Arabidopsis thaliana
  misc_feature (1)..(1934): Ceres Seq. ID no. 12600878
  misc_feature: MA Experiment ID: 20000180 Result: Down-regulated in Transcription
  misc_feature: MA Experiment 20000180 PARAMETER Experiment Name: At_Germinating_Seeds_P Parameter: Age (hr) Value: 24 vs. 0
  misc_feature: MA Experiment 20000180 PARAMETER Experiment Name: At_Germinating_Seeds_P Parameter: Tissue Value: Germinating Seeds
  misc_feature: MA Experiment ID: 20000794 Result: Down-regulated in Transcription
  misc_feature: MA Experiment 20000794 PARAMETER Experiment Name: At_Petals_P Parameter: Age (day) Value: 23-25 days
  misc_feature: MA Experiment 20000794 PARAMETER Experiment Name: At_Petals_P Parameter: Plant Line Value: WS
  misc_feature: MA Experiment 20000794 PARAMETER Experiment Name: At_Petals_P Parameter: Tissue Value: Petals vs. Whole plant
  misc_feature: MA Experiment ID: 20001558 Result: Up-regulated in Transcription
  misc_feature: MA Experiment 20001558 PARAMETER Experiment Name: At_Drought_Soil_Dry_P Parameter: Age (day) Value: 27
  misc_feature: MA Experiment 20001558 PARAMETER Experiment Name: At_Drought_Soil_Dry_P Parameter: Organism Value: A. thaliana
  misc_feature: MA Experiment 20001558 PARAMETER Experiment Name: At_Drought_Soil_Dry_P Parameter: Plant Line Value: WS
  misc_feature: MA Experiment 20001558 PARAMETER Experiment Name: At_Drought_Soil_Dry_P Parameter: Post Timepoint (hr) Value: 6
  misc_feature: MA Experiment 20001558 PARAMETER Experiment Name: At_Drought_Soil_Dry_P Parameter: Post-Treatment Value: Re-Water vs. No Drought
  misc_feature: MA Experiment 20001558 PARAMETER Experiment Name: At_Drought_Soil_Dry_P Parameter: Timepoint (day) Value: 13
  misc_feature: MA Experiment 20001558 PARAMETER Experiment Name: At_Drought_Soil_Dry_P Parameter: Treatment Value: Drought vs. No Drought
tctctctctctctctgctccatttctctcactttcttcacatctctgaagctcttcgtcacgcatctacaatggcatcgatgatgcaaccgcagatcatactgctgaaggaagggacggacacatctcagggcaaagcgcaactagtaagcaacatcaacgcttgcactgctgttggagatgtagttcgaaccacgctcgggccacgagggatggacaaactcattcacgacgataaaggatccgtcaccatttctaacgatggtgctaccatcatgaagctcctcgacattgttcatcctgctgctaagatcctcgtcgatatcgccaaatcccaagactccgaggtgggtgatgggacaactacagtggttcttcttgcagcagagtttttgaaggaagcgaagccatttattgaggatggtgttcacgctcagaatctaattaggagttaccgcactgcaagcactttggcaattgccaaggttaaagaactcgctgttagcattgaggggaagagtgtagaggaaaagaaaggtttattggctaaatgtgctgctacgactctctcatctaagcttatcggtggagaaaaggagttttttgctacaatggttgttgatgctgttatggccattgggaatgacgacaggctaaatctgattgggatcaagaaggttcctggtggcaatatgcgagactctttcctcgttgatggtgtagctttcaaaaaaacattctcgtatgctggttttgagcaacagccaaagaaatttcttaaccccaaaattctcttgcttaacatcgaattggagttgaaatctgagaaggaaaacgctgaaattaggctgtcagatccatcacagtaccagtcaatagttgatgcagaatggaatatcatttatgacaaactagacaaatgtgttgagagtggagcaaaagttgttctttctcgattggctattggtgatctagctactcagtattttgccgatcgtgatattttctgtgctggtcgtgttgctgaggaagatcttaaccgtgtggctgctgcagctggaggaacagttcagacaagtgttaacaacataatagatgaggttcttggaacttgtgagatttttgaggaaaaacaagttggtggggagagatttaatatattcagtggttgcccttcaggacgaacagcaactattgttctccgtggtggagctgatcagttcatcgaagaagctgagcggagtttacatgatgcgattatgattgtgagaagagctgtgaagaactcaactgttgttcctggaggtggagctatagatatggagataagcaagtacctgaggcagcattcaagaacaattgctgggaagtcacagcttttcatcaactcttatgcgaaggctctagaggttattccacgacagttatgtgataatgctggatttgatgcaactgacgtcttgaataaacttagacaaaaacacgccatgcaaagcggtgaaggagcttcgtatggagtggacattaacactggtggcatagcagattcttttgctaacttcgtttgggaaccagcagttgtgaagatcaacgcaataaatgctgcgactgaagcggcttgcctcattcttagtgtcgacgaaaccgtgaagaaccctaaatctgagagcgcacagggagacgccgcaggtgcaatggggagaggacgcggtggaggtcgtggccgtggaatgcgaaggcgataagctccgtctctaatgccaaacttgtgggattcttcttcttcttctctaatttcgattttgttgaatttttgttttgaagttaaaaaacctattattgggtttgtgtttgttcaattagaatactggttgggtatgtatgtctatacaatctgtgaaacataagttttagtgttgttttggttaaggagtt

SEQ ID NO: 46943 - protein, 580 aa, Arabidopsis thaliana
  peptide (1)..(580): Ceres Seq. ID no. 12600879
  misc_feature (58)..(553): Pfam Name: TCP-1/cpn60 chaperonin family Pfam Description: TCP-1/cpn60 chaperonin family
  misc_feature (27)..(566): Homolog of NCBI NO: 39581773 NR Description: Hypothetical protein CBG21817 [Caenorhabditis
  misc_feature (30)..(580): Homolog of NCBI NO: 32419813 NR Description: hypothetical protein [Neurospora crassa]
  misc_feature (30)..(580): Homolog of NCBI NO: 40743616 NR Description: conserved hypothetical protein [Aspergillus
  misc_feature (28)..(573): Homolog of NCBI NO: 16611916 NR Description: chaperonin subunit 1 [Artemia franciscana]
  misc_feature (27)..(573): Homolog of NCBI NO: 5453607 NR Description: chaperonin containing TCP1, subunit 7 (eta)
  misc_feature (27)..(573): Homolog of NCBI NO: 27712178 NR Description: similar to chaperonin subunit 7 (eta)
  misc_feature (27)..(573): Homolog of NCBI NO: 27545245 NR Description: chaperonin containing TCP1, subunit 7 (eta)
  misc_feature (20)..(569): Homolog of NCBI NO: 28277344 NR Description: Similar to chaperonin subunit 7 (eta) [Xenopus
  misc_feature (20)..(569): Homolog of NCBI NO: 27769226 NR Description: Similar to chaperonin subunit 7 (eta) [Xenopus
  misc_feature (24)..(580): Homolog of NCBI NO: 15229866 NR Description: putative T-complex protein 1, ETA subunit
LSLSLLHFSHFLHISEALRHASTMASMMQPQIILLKEGTDTSQGKAQLVSNINACTAVGDVVRTTLGPRGMDKLIHDDKGSVTISNDGATIMKLLDIVHPAAKILVDIAKSQDSEVGDGTTTVVLLAAEFLKEAKPFIEDGVHAQNLIRSYRTASTLAIAKVKELAVSIEGKSVEEKKGLLAKCAATTLSSKLIGGEKEFFATMVVDAVMAIGNDDRLNLIGIKKVPGGNMRDSFLVDGVAFKKTFSYAGFEQQPKKFLNPKILLLNIELELKSEKENAEIRLSDPSQYQSIVDAEWNIIYDKLDKCVESGAKVVLSRLAIGDLATQYFADRDIFCAGRVAEEDLNRVAAAAGGTVQTSVNNIIDEVLGTCEIFEEKQVGGERFNIFSGCPSGRTATIVLRGGADQFIEEAERSLHDAIMIVRRAVKNSTVVPGGGAIDMEISKYLRQHSRTIAGKSQLFINSYAKALEVIPRQLCDNAGFDATDVLNKLRQKHAMQSGEGASYGVDINTGGIADSFANFVWEPAVVKINAINAATEAACLILSVDETVKNPKSESAQGDAAGAMGRGRGGGRGRGMRRR

SEQ ID NO: 46944 - protein, 557 aa, Arabidopsis thaliana
  peptide (1)..(557): Ceres Seq. ID no. 12600880
  misc_feature (35)..(530): Pfam Name: TCP-1/cpn60 chaperonin family Pfam Description: TCP-1/cpn60 chaperonin family
  misc_feature (4)..(543): Homolog of NCBI NO: 39581773 NR Description: Hypothetical protein CBG21817 [Caenorhabditis
  misc_feature (7)..(557): Homolog of NCBI NO: 32419813 NR Description: hypothetical protein [Neurospora crassa]
  misc_feature (7)..(557): Homolog of NCBI NO: 40743616 NR Description: conserved hypothetical protein [Aspergillus
  misc_feature (5)..(550): Homolog of NCBI NO: 16611916 NR Description: chaperonin subunit 1 [Artemia franciscana]
  misc_feature (4)..(550): Homolog of NCBI NO: 5453607 NR Description: chaperonin containing TCP1, subunit 7 (eta)
  misc_feature (4)..(550): Homolog of NCBI NO: 27712178 NR Description: similar to chaperonin subunit 7 (eta)
  misc_feature (4)..(550): Homolog of NCBI NO: 27545245 NR Description: chaperonin containing TCP1, subunit 7 (eta)
  misc_feature (1)..(546): Homolog of NCBI NO: 28277344 NR Description: Similar to chaperonin subunit 7 (eta) [Xenopus
  misc_feature (1)..(546): Homolog of NCBI NO: 27769226 NR Description: Similar to chaperonin subunit 7 (eta) [Xenopus
  misc_feature (1)..(557): Homolog of NCBI NO: 15229866 NR Description: putative T-complex protein 1, ETA subunit
MASMMQPQIILLKEGTDTSQGKAQLVSNINACTAVGDVVRTTLGPRGMDKLIHDDKGSVTISNDGATIMKLLDIVHPAAKILVDIAKSQDSEVGDGTTTVVLLAAEFLKEAKPFIEDGVHAQNLIRSYRTASTLAIAKVKELAVSIEGKSVEEKKGLLAKCAATTLSSKLIGGEKEFFATMVVDAVMAIGNDDRLNLIGIKKVPGGNMRDSFLVDGVAFKKTFSYAGFEQQPKKFLNPKILLLNIELELKSEKENAEIRLSDPSQYQSIVDAEWNIIYDKLDKCVESGAKVVLSRLAIGDLATQYFADRDIFCAGRVAEEDLNRVAAAAGGTVQTSVNNIIDEVLGTCEIFEEKQVGGERFNIFSGCPSGRTATIVLRGGADQFIEEAERSLHDAIMIVRRAVKNSTVVPGGGAIDMEISKYLRQHSRTIAGKSQLFINSYAKALEVIPRQLCDNAGFDATDVLNKLRQKHAMQSGEGASYGVDINTGGIADSFANFVWEPAVVKINAINAATEAACLILSVDETVKNPKSESAQGDAAGAMGRGRGGGRGRGMRRR

SEQ ID NO: 46945 - protein, 554 aa, Arabidopsis thaliana
  peptide (1)..(554): Ceres Seq. ID no. 12600881
  misc_feature (32)..(527): Pfam Name: TCP-1/cpn60 chaperonin family Pfam Description: TCP-1/cpn60 chaperonin family
  misc_feature (1)..(540): Homolog of NCBI NO: 39581773 NR Description: Hypothetical protein CBG21817 [Caenorhabditis
  misc_feature (4)..(554): Homolog of NCBI NO: 32419813 NR Description: hypothetical protein [Neurospora crassa]
  misc_feature (4)..(554): Homolog of NCBI NO: 40743616 NR Description: conserved hypothetical protein [Aspergillus
  misc_feature (2)..(547): Homolog of NCBI NO: 16611916 NR Description: chaperonin subunit 1 [Artemia franciscana]
  misc_feature (1)..(547): Homolog of NCBI NO: 5453607 NR Description: chaperonin containing TCP1, subunit 7 (eta)
  misc_feature (1)..(547): Homolog of NCBI NO: 27712178 NR Description: similar to chaperonin subunit 7 (eta)
  misc_feature (1)..(547): Homolog of NCBI NO: 27545245 NR Description: chaperonin containing TCP1, subunit 7 (eta)
  misc_feature (1)..(543): Homolog of NCBI NO: 28277344 NR Description: Similar to chaperonin subunit 7 (eta) [Xenopus
  misc_feature (1)..(543): Homolog of NCBI NO: 27769226 NR Description: Similar to chaperonin subunit 7 (eta) [Xenopus
  misc_feature (1)..(554): Homolog of NCBI NO: 15229866 NR Description: putative T-complex protein 1, ETA subunit
MMQPQIILLKEGTDTSQGKAQLVSNINACTAVGDVVRTTLGPRGMDKLIHDDKGSVTISNDGATIMKLLDIVHPAAKILVDIAKSQDSEVGDGTTTVVLLAAEFLKEAKPFIEDGVHAQNLIRSYRTASTLAIAKVKELAVSIEGKSVEEKKGLLAKCAATTLSSKLIGGEKEFFATMVVDAVMAIGNDDRLNLIGIKKVPGGNMRDSFLVDGVAFKKTFSYAGFEQQPKKFLNPKILLLNIELELKSEKENAEIRLSDPSQYQSIVDAEWNIIYDKLDKCVESGAKVVLSRLAIGDLATQYFADRDIFCAGRVAEEDLNRVAAAAGGTVQTSVNNIIDEVLGTCEIFEEKQVGGERFNIFSGCPSGRTATIVLRGGADQFIEEAERSLHDAIMIVRRAVKNSTVVPGGGAIDMEISKYLRQHSRTIAGKSQLFINSYAKALEVIPRQLCDNAGFDATDVLNKLRQKHAMQSGEGASYGVDINTGGIADSFANFVWEPAVVKINAINAATEAACLILSVDETVKNPKSESAQGDAAGAMGRGRGGGRGRGMRRR

SEQ ID NO: 46946 - DNA, 3299 bp, Arabidopsis thaliana
  misc_feature (1)..(3299): Ceres Seq. ID no. 12575618
  misc_feature: MA Experiment ID: 20000171 Result: Down-regulated in Transcription
  misc_feature: MA Experiment 20000171 PARAMETER Experiment Name: At_42deg_Heat_P Parameter: Age (day) Value: 14
  misc_feature: MA Experiment 20000171 PARAMETER Experiment Name: At_42deg_Heat_P Parameter: Organism Value: A. thaliana
  misc_feature: MA Experiment 20000171 PARAMETER Experiment Name: At_42deg_Heat_P Parameter: Plant Line Value: WS
  misc_feature: MA Experiment 20000171 PARAMETER Experiment Name: At_42deg_Heat_P Parameter: Temperature (deg C) Value: 42 vs. 22
  misc_feature: MA Experiment 20000171 PARAMETER Experiment Name: At_42deg_Heat_P Parameter: Timepoint (hr) Value: 1
  misc_feature: MA Experiment 20000171 PARAMETER Experiment Name: At_42deg_Heat_P Parameter: Tissue Value: Aerial
  misc_feature: MA Experiment ID: 20000173 Result: Down-regulated in Transcription
  misc_feature: MA Experiment 20000173 PARAMETER Experiment Name: At_42deg_Heat_P Parameter: Age (day) Value: 14
  misc_feature: MA Experiment 20000173 PARAMETER Experiment Name: At_42deg_Heat_P Parameter: Organism Value: A. thaliana
  misc_feature: MA Experiment 20000173 PARAMETER Experiment Name: At_42deg_Heat_P Parameter: Plant Line Value: WS
  misc_feature: MA Experiment 20000173 PARAMETER Experiment Name: At_42deg_Heat_P Parameter: Temperature (deg C) Value: 42 vs. 22
  misc_feature: MA Experiment 20000173 PARAMETER Experiment Name: At_42deg_Heat_P Parameter: Timepoint (hr) Value: 6
  misc_feature: MA Experiment 20000173 PARAMETER Experiment Name: At_42deg_Heat_P Parameter: Tissue Value: Aerial
  misc_feature: MA Experiment ID: 20000179 Result: Down-regulated in Transcription
  misc_feature: MA Experiment 20000179 PARAMETER Experiment Name: At_Germinating_Seeds_P Parameter: Age (hr) Value: 6 vs. 0
  misc_feature: MA Experiment 20000179 PARAMETER Experiment Name: At_Germinating_Seeds_P Parameter: Tissue Value: Germinating Seeds
  misc_feature: MA Experiment ID: 20000180 Result: Down-regulated in Transcription
  misc_feature: MA Experiment 20000180 PARAMETER Experiment Name: At_Germinating_Seeds_P Parameter: Age (hr) Value: 24 vs. 0
  misc_feature: MA Experiment 20000180 PARAMETER Experiment Name: At_Germinating_Seeds_P Parameter: Tissue Value: Germinating Seeds
  misc_feature: MA Experiment ID: 20000182 Result: Up-regulated in Transcription
  misc_feature: MA Experiment 20000182 PARAMETER Experiment Name: At_2mM_SA_P Parameter: Age (day) Value: 14
  misc_feature: MA Experiment 20000182 PARAMETER Experiment Name: At_2mM_SA_P Parameter: Organism Value: A. thaliana
  misc_feature: MA Experiment 20000182 PARAMETER Experiment Name: At_2mM_SA_P Parameter: Plant Line Value: WS
  misc_feature: MA Experiment 20000182 PARAMETER Experiment Name: At_2mM_SA_P Parameter: Timepoint (hr) Value: 6
  misc_feature: MA Experiment 20000182 PARAMETER Experiment Name: At_2mM_SA_P Parameter: Tissue Value: Aerial
  misc_feature: MA Experiment 20000182 PARAMETER Experiment Name: At_2mM_SA_P Parameter: Treatment Value: 2mM SA vs. No Treatment
  misc_feature: MA Experiment ID: 20000184 Result: Down-regulated in Transcription
  misc_feature: MA Experiment 20000184 PARAMETER Experiment Name: At_Shoots__P Parameter: Age (day) Value: 7
  misc_feature: MA Experiment 20000184 PARAMETER Experiment Name: At_Shoots__P Parameter: Tissue Value: Shoots vs. Whole Plant
  misc_feature: MA Experiment ID: 20000185 Result: Down-regulated in Transcription
  misc_feature: MA Experiment 20000185 PARAMETER Experiment Name: At_Roots__P Parameter: Age (day) Value: 7 vs. 21
  misc_feature: MA Experiment 20000185 PARAMETER Experiment Name: At_Roots__P Parameter: Organism Value: A. thaliana
  misc_feature: MA Experiment 20000185 PARAMETER Experiment Name: At_Roots__P Parameter: Tissue Value: Roots vs. Whole Plant
  misc_feature: MA Experiment ID: 20000264 Result: Up-regulated in Transcription
  misc_feature: MA Experiment 20000264 PARAMETER Experiment Name: At_Open_Flower_P Parameter: Age (day) Value: 21
  misc_feature: MA Experiment 20000264 PARAMETER Experiment Name: At_Open_Flower_P Parameter: Plant Line Value: WS
  misc_feature: MA Experiment 20000264 PARAMETER Experiment Name: At_Open_Flower_P Parameter: Tissue Value: Open Flower vs. Whole Plant
  misc_feature: MA Experiment ID: 20000438 Result: Down-regulated in Transcription
  misc_feature: MA Experiment 20000438 PARAMETER Experiment Name: At_Shoots__P Parameter: Age (day) Value: 14
  misc_feature: MA Experiment 20000438 PARAMETER Experiment Name: At_Shoots__P Parameter: Tissue Value: Shoots vs. Whole Plant
  misc_feature: MA Experiment ID: 20000439 Result: Down-regulated in Transcription
  misc_feature: MA Experiment 20000439 PARAMETER Experiment Name: At_Roots__P Parameter: Age (day) Value: 14 vs. 21
  misc_feature: MA Experiment 20000439 PARAMETER Experiment Name: At_Roots__P Parameter: Organism Value: A. thaliana
  misc_feature: MA Experiment 20000439 PARAMETER Experiment Name: At_Roots__P Parameter: Tissue Value: Roots vs. Whole Plant
  misc_feature: MA Experiment ID: 20001451 Result: Down-regulated in Transcription
  misc_feature: MA Experiment 20001451 PARAMETER Experiment Name: At_Far-red-induction_P Parameter: Age (day) Value: 7
  misc_feature: MA Experiment 20001451 PARAMETER Experiment Name: At_Far-red-induction_P Parameter: Light Value: Far-red vs. White
  misc_feature: MA Experiment 20001451 PARAMETER Experiment Name: At_Far-red-induction_P Parameter: Organism Value: A. thaliana
  misc_feature: MA Experiment 20001451 PARAMETER Experiment Name: At_Far-red-induction_P Parameter: Plant Line Value: Columbia
  misc_feature: MA Experiment 20001451 PARAMETER Experiment Name: At_Far-red-induction_P Parameter: Timepoint (hr) Value: 24
  misc_feature: MA Experiment 20001451 PARAMETER Experiment Name: At_Far-red-induction_P Parameter: Tissue Value: Whole Plant
  misc_feature: MA Experiment ID: 20001904 Result: Down-regulated in Transcription
  misc_feature: MA Experiment 20001904 PARAMETER Experiment Name: At_Drought_Reproduction_P Parameter: Age (day) Value: 37
  misc_feature: MA Experiment 20001904 PARAMETER Experiment Name: At_Drought_Reproduction_P Parameter: Organism Value: A. thaliana
  misc_feature: MA Experiment 20001904 PARAMETER Experiment Name: At_Drought_Reproduction_P Parameter: Plant Line Value: WS
  misc_feature: MA Experiment 20001904 PARAMETER Experiment Name: At_Drought_Reproduction_P Parameter: Timepoint (day) Value: 7
  misc_feature: MA Experiment 20001904 PARAMETER Experiment Name: At_Drought_Reproduction_P Parameter: Tissue Value: Rosettes
  misc_feature: MA Experiment 20001904 PARAMETER Experiment Name: At_Drought_Reproduction_P Parameter: Treatment Value: Drought vs. No Drought
  misc_feature: MA Experiment ID: 20001905 Result: Down-regulated in Transcription
  misc_feature: MA Experiment 20001905 PARAMETER Experiment Name: At_Drought_Reproduction_P Parameter: Age (day) Value: 40
  misc_feature: MA Experiment 20001905 PARAMETER Experiment Name: At_Drought_Reproduction_P Parameter: Organism Value: A. thaliana
  misc_feature: MA Experiment 20001905 PARAMETER Experiment Name: At_Drought_Reproduction_P Parameter: Plant Line Value: WS
  misc_feature: MA Experiment 20001905 PARAMETER Experiment Name: At_Drought_Reproduction_P Parameter: Timepoint (day) Value: 10
  misc_feature: MA Experiment 20001905 PARAMETER Experiment Name: At_Drought_Reproduction_P Parameter: Tissue Value: Rosettes
  misc_feature: MA Experiment 20001905 PARAMETER Experiment Name: At_Drought_Reproduction_P Parameter: Treatment Value: Drought vs. No Drought
ataatcgacatgaagctgtccttttcacttgttttcaatgctctcacgttgcttcttcaagtttgcatctttgctcaagccaggttttctaatgagactgatatgcaagctttgcttgagttcaagtctcaagtttctgaaaacaacaagagagaggtcttggcttcatggaatcactcctccccattttgtaattggattggagtcacatgtggccgcaggagagaaagagttataagtttgaaccttggaggattcaagttaaccggtgtgatctcaccctccattggtaatctctcctttcttagattacttaatcttgcagacaactcttttggaagtaccatccctcaaaaggtgggaaggctatttaggcttcagtacttgaacatgagctataatcttctcgaaggaaggattccgtctagtctttctaactgctctagactgtcgaccgttgatttatcgtcaaaccatcttggacatggtgttccttcagaactaggttcactttctaagcttgccattctggatcttagcaaaaacaaccttactggaaattttcctgcatctttaggaaacttgacgtcacttcagaagcttgactttgcatataaccagatgagaggtgagattccagacgaagtagctagattgactcaaatggtgtttttccaaatagcactgaatagtttttcaggtggttttcctcctgcattgtacaacatctcctctcttgagtctctatctctagctgacaatagcttttcgggtaatcttagggctgattttggttatcttctaccaaatctaagaagacttcttttgggaacaaatcagttcactggagctattcccaaaacacttgccaatatctcaagccttgaaaggtttgatatctcatctaattacctgtctggtagtatccctttgagctttggaaagttacgtaatctgtggtggttagggattcgtaataactctcttggaaataactcgtccagtggtcttgaatttattggggctgtggcgaactgcactcaattagagtacttagatgttggttacaatagacttggaggtgagcttcctgcttctatagccaatctgtccactacattgactagtctgttccttggacaaaatcttatctctggaaccattcctcatgacatcgggaatcttgtaagcctgcaagaactcagcttagaaacaaatatgttgagtggagaacttcccgtctctttcgggaagcttttgaacttgcaggttgtggatctgtattcaaatgcaatatcgggggaaataccatcttattttggcaacatgactcggttgcagaagctccatttgaatagcaatagtttccacggaagaatccctcagagtcttggacgttgtcgatacttgctagacctgtggatggatacaaataggttgaatgggactatacctcaggaaatactgcaaattccatccctcgcttacatagatttgtcaaacaatttcttgacaggccattttccagaagaagttggaaagttagaacttcttgttggactaggtgcttcgtacaacaaattatcaggaaagatgccacaagctatagggggttgtctttcgatggaatttctctttatgcaaggaaattcgtttgacggagccattccagatataagccggttggtaagcctaaagaatgttgacttctccaacaacaatctctctggccggatacctcgatatctggccagtcttccttcgctgcgaaatctgaatctttctatgaacaagtttgagggaagggtgccaacaacaggagtgtttcgaaatgctacagcagtttctgtttttggtaacacaaatatttgcggaggcgtccgagaaatgcaactaaagccatgcattgtacaggcatctccaaggaagagaaagcctctgtcagttagaaagaaagttgtcagtggtatttgtataggtatagcttcgcttttgttaatcataattgtggcttctctgtgttggttcatgaagaggaaaaagaaaaacaatgccagtgatggtaacccatctgattctactactttggggatgttccatgagaaggtaagttatgaagagcttcatagtgcaacaagtcgcttctcttcaaccaatttgattggttcaggcaatttcggtaatgtgtttaaaggattgcttggccctgagaataaactcgtcgcggttaaagttttgaacctcctaaagcatggagcgacgaaaagctttatggcggaatgtgaaaccttcaagggtatacgacatcgtaaccttgtaaaactgataacggtttgttcaagccttgattccgagggaaatgatttcagagctctggtctatgagttcatgccaaaaggaagtctggatatgtggctgcagctagaagatctggaaagggtaaacgatcactcgagatctttaacacccgcagagaaactcaacatagcaatagatgtggcttcagctttggagtatctgcacgttcattgtcatgaccctgtagctcactgtgatattaagccaagcaacattcttctagacgatgatctgactgctcatgttagtgactttggtttggctcagctcctctataaatacgatcgagaatcctttctaaaccagtttagttctgctggtgtcagaggcaccattggctatgccgcgccagagtatggaatgggaggccaaccatcaatacaaggagatgtgtacagcttcggaattctacttttggagatgtttagtggaaagaaaccaacagatgaatcatttgcaggcgattataacctccacagctacacaaagtctatattatcgggttgcacgagcagtggaggcagcaacgccattgatgaggggttgagactggttttgcaggtggggataaagtgttctgaagaatatccgagggataggatgagaacggatgaagcagtacgagaattaatctcaataagatctaagttcttcagttccaagacgactattacagagagtcctcgagatgctccgcaaagttctcctcaggaatggatgttaaatacggacatgcatactatgtagacccttctcaactacttatggggacacagtaaaagtgtatttgcgtgtgcatcatcgaaacagaacaaatgttgggaggaggagagactactagttataataagagaataaattaaaatctatctctgctgtagcctttttttttttgttgtgggtgaaaatgattatgatcacatatatatggtcgttgaata

SEQ ID NO: 46947 - protein, 1034 aa, Arabidopsis thaliana
  peptide (1)..(1034): Ceres Seq. ID no. 12575619
  misc_feature (8)..(620): Homolog of NCBI NO: 34911420 NR Description: putative leucine rich repeat containing protein
  misc_feature (788)..(952): Homolog of NCBI NO: 34911420 NR Description: putative leucine rich repeat containing protein
  misc_feature (81)..(810): Homolog of NCBI NO: 34911420 NR Description: putative leucine rich repeat containing protein
  misc_feature (81)..(832): Homolog of NCBI NO: 38424017 NR Description: putative protein kinase Xa21
  misc_feature (6)..(1000): Homolog of NCBI NO: 2130082 NR Description: protein kinase Xa21 (EC 2.7.1.-), receptor type
  misc_feature (4)..(1009): Homolog of NCBI NO: 11260272 NR Description: receptor-kinase like protein - Arabidopsis
  misc_feature (4)..(1009): Homolog of NCBI NO: 17381114 NR Description: putative receptor kinase [Arabidopsis thaliana]
  misc_feature (4)..(1009): Homolog of NCBI NO: 18408454 NR Description: leucine-rich repeat transmembrane protein kinase,
  misc_feature (4)..(1009): Homolog of NCBI NO: 15228201 NR Description: leucine-rich repeat transmembrane protein kinase,
  misc_feature (4)..(1009): Homolog of NCBI NO: 15232726 NR Description: leucine-rich repeat transmembrane protein kinase,
IIDMKLSFSLVFNALTLLLQVCIFAQARFSNETDMQALLEFKSQVSENNKREVLASWNHSSPFCNWIGVTCGRRRERVISLNLGGFKLTGVISPSIGNLSFLRLLNLADNSFGSTIPQKVGRLFRLQYLNMSYNLLEGRIPSSLSNCSRLSTVDLSSNHLGHGVPSELGSLSKLAILDLSKNNLTGNFPASLGNLTSLQKLDFAYNQMRGEIPDEVARLTQMVFFQIALNSFSGGFPPALYNISSLESLSLADNSFSGNLRADFGYLLPNLRRLLLGTNQFTGAIPKTLANISSLERFDISSNYLSGSIPLSFGKLRNLWWLGIRNNSLGNNSSSGLEFIGAVANCTQLEYLDVGYNRLGGELPASIANLSTTLTSLFLGQNLISGTIPHDIGNLVSLQELSLETNMLSGELPVSFGKLLNLQVVDLYSNAISGEIPSYFGNMTRLQKLHLNSNSFHGRIPQSLGRCRYLLDLWMDTNRLNGTIPQEILQIPSLAYIDLSNNFLTGHFPEEVGKLELLVGLGASYNKLSGKMPQAIGGCLSMEFLFMQGNSFDGAIPDISRLVSLKNVDFSNNNLSGRIPRYLASLPSLRNLNLSMNKFEGRVPTTGVFRNATAVSVFGNTNICGGVREMQLKPCIVQASPRKRKPLSVRKKVVSGICIGIASLLLIIIVASLCWFMKRKKKNNASDGNPSDSTTLGMFHEKVSYEELHSATSRFSSTNLIGSGNFGNVFKGLLGPENKLVAVKVLNLLKHGATKSFMAECETFKGIRHRNLVKLITVCSSLDSEGNDFRALVYEFMPKGSLDMWLQLEDLERVNDHSRSLTPAEKLNIAIDVASALEYLHVHCHDPVAHCDIKPSNILLDDDLTAHVSDFGLAQLLYKYDRESFLNQFSSAGVRGTIGYAAPEYGMGGQPSIQGDVYSFGILLLEMFSGKKPTDESFAGDYNLHSYTKSILSGCTSSGGSNAIDEGLRLVLQVGIKCSEEYPRDRMRTDEAVRELISIRSKFFSSKTTITESPRDAPQSSPQEWMLNTDMHTM

SEQ ID NO: 46948 - protein, 1031 aa, Arabidopsis thaliana
  peptide (1)..(1031): Ceres Seq. ID no. 12575620
  misc_feature (5)..(617): Homolog of NCBI NO: 34911420 NR Description: putative leucine rich repeat containing protein
  misc_feature (785)..(949): Homolog of NCBI NO: 34911420 NR Description: putative leucine rich repeat containing protein
  misc_feature (78)..(807): Homolog of NCBI NO: 34911420 NR Description: putative leucine rich repeat containing protein
  misc_feature (78)..(829): Homolog of NCBI NO: 38424017 NR Description: putative protein kinase Xa21
  misc_feature (3)..(997): Homolog of NCBI NO: 2130082 NR Description: protein kinase Xa21 (EC 2.7.1.-), receptor type
  misc_feature (1)..(1006): Homolog of NCBI NO: 11260272 NR Description: receptor-kinase like protein - Arabidopsis
  misc_feature (1)..(1006): Homolog of NCBI NO: 17381114 NR Description: putative receptor kinase [Arabidopsis thaliana]
  misc_feature (1)..(1006): Homolog of NCBI NO: 18408454 NR Description: leucine-rich repeat transmembrane protein kinase,
  misc_feature (1)..(1006): Homolog of NCBI NO: 15228201 NR Description: leucine-rich repeat transmembrane protein kinase,
  misc_feature (1)..(1006): Homolog of NCBI NO: 15232726 NR Description: leucine-rich repeat transmembrane protein kinase,
MKLSFSLVFNALTLLLQVCIFAQARFSNETDMQALLEFKSQVSENNKREVLASWNHSSPFCNWIGVTCGRRRERVISLNLGGFKLTGVISPSIGNLSFLRLLNLADNSFGSTIPQKVGRLFRLQYLNMSYNLLEGRIPSSLSNCSRLSTVDLSSNHLGHGVPSELGSLSKLAILDLSKNNLTGNFPASLGNLTSLQKLDFAYNQMRGEIPDEVARLTQMVFFQIALNSFSGGFPPALYNISSLESLSLADNSFSGNLRADFGYLLPNLRRLLLGTNQFTGAIPKTLANISSLERFDISSNYLSGSIPLSFGKLRNLWWLGIRNNSLGNNSSSGLEFIGAVANCTQLEYLDVGYNRLGGELPASIANLSTTLTSLFLGQNLISGTIPHDIGNLVSLQELSLETNMLSGELPVSFGKLLNLQVVDLYSNAISGEIPSYFGNMTRLQKLHLNSNSFHGRIPQSLGRCRYLLDLWMDTNRLNGTIPQEILQIPSLAYIDLSNNFLTGHFPEEVGKLELLVGLGASYNKLSGKMPQAIGGCLSMEFLFMQGNSFDGAIPDISRLVSLKNVDFSNNNLSGRIPRYLASLPSLRNLNLSMNKFEGRVPTTGVFRNATAVSVFGNTNICGGVREMQLKPCIVQASPRKRKPLSVRKKVVSGICIGIASLLLIIIVASLCWFMKRKKKNNASDGNPSDSTTLGMFHEKVSYEELHSATSRFSSTNLIGSGNFGNVFKGLLGPENKLVAVKVLNLLKHGATKSFMAECETFKGIRHRNLVKLITVCSSLDSEGNDFRALVYEFMPKGSLDMWLQLEDLERVNDHSRSLTPAEKLNIAIDVASALEYLHVHCHDPVAHCDIKPSNILLDDDLTAHVSDFGLAQLLYKYDRESFLNQFSSAGVRGTIGYAAPEYGMGGQPSIQGDVYSFGILLLEMFSGKKPTDESFAGDYNLHSYTKSILSGCTSSGGSNAIDEGLRLVLQVGIKCSEEYPRDRMRTDEAVRELISIRSKFFSSKTTITESPRDAPQSSPQEWMLNTDMHTM

SEQ ID NO: 46949 - protein, 1000 aa, Arabidopsis thaliana
  peptide (1)..(1000): Ceres Seq. ID no. 12575621
  misc_feature (1)..(586): Homolog of NCBI NO: 34911420 NR Description: putative leucine rich repeat containing protein
  misc_feature (754)..(918): Homolog of NCBI NO: 34911420 NR Description: putative leucine rich repeat containing protein
  misc_feature (47)..(776): Homolog of NCBI NO: 34911420 NR Description: putative leucine rich repeat containing protein
  misc_feature (47)..(798): Homolog of NCBI NO: 38424017 NR Description: putative protein kinase Xa21
  misc_feature (1)..(966): Homolog of NCBI NO: 2130082 NR Description: protein kinase Xa21 (EC 2.7.1.-), receptor type
  misc_feature (1)..(975): Homolog of NCBI NO: 11260272 NR Description: receptor-kinase like protein - Arabidopsis
  misc_feature (1)..(975): Homolog of NCBI NO: 17381114 NR Description: putative receptor kinase [Arabidopsis thaliana]
  misc_feature (1)..(975): Homolog of NCBI NO: 18408454 NR Description: leucine-rich repeat transmembrane protein kinase,
  misc_feature (1)..(975): Homolog of NCBI NO: 15228201 NR Description: leucine-rich repeat transmembrane protein kinase,
  misc_feature (1)..(975): Homolog of NCBI NO: 15232726 NR Description: leucine-rich repeat transmembrane protein kinase,
MQALLEFKSQVSENNKREVLASWNHSSPFCNWIGVTCGRRRERVISLNLGGFKLTGVISPSIGNLSFLRLLNLADNSFGSTIPQKVGRLFRLQYLNMSYNLLEGRIPSSLSNCSRLSTVDLSSNHLGHGVPSELGSLSKLAILDLSKNNLTGNFPASLGNLTSLQKLDFAYNQMRGEIPDEVARLTQMVFFQIALNSFSGGFPPALYNISSLESLSLADNSFSGNLRADFGYLLPNLRRLLLGTNQFTGAIPKTLANISSLERFDISSNYLSGSIPLSFGKLRNLWWLGIRNNSLGNNSSSGLEFIGAVANCTQLEYLDVGYNRLGGELPASIANLSTTLTSLFLGQNLISGTIPHDIGNLVSLQELSLETNMLSGELPVSFGKLLNLQVVDLYSNAISGEIPSYFGNMTRLQKLHLNSNSFHGRIPQSLGRCRYLLDLWMDTNRLNGTIPQEILQIPSLAYIDLSNNFLTGHFPEEVGKLELLVGLGASYNKLSGKMPQAIGGCLSMEFLFMQGNSFDGAIPDISRLVSLKNVDFSNNNLSGRIPRYLASLPSLRNLNLSMNKFEGRVPTTGVFRNATAVSVFGNTNICGGVREMQLKPCIVQASPRKRKPLSVRKKVVSGICIGIASLLLIIIVASLCWFMKRKKKNNASDGNPSDSTTLGMFHEKVSYEELHSATSRFSSTNLIGSGNFGNVFKGLLGPENKLVAVKVLNLLKHGATKSFMAECETFKGIRHRNLVKLITVCSSLDSEGNDFRALVYEFMPKGSLDMWLQLEDLERVNDHSRSLTPAEKLNIAIDVASALEYLHVHCHDPVAHCDIKPSNILLDDDLTAHVSDFGLAQLLYKYDRESFLNQFSSAGVRGTIGYAAPEYGMGGQPSIQGDVYSFGILLLEMFSGKKPTDESFAGDYNLHSYTKSILSGCTSSGGSNAIDEGLRLVLQVGIKCSEEYPRDRMRTDEAVRELISIRSKFFSSKTTITESPRDAPQSSPQEWMLNTDMHTM

SEQ ID NO: 46950 - DNA, 853 bp, Arabidopsis thaliana
  misc_feature (1)..(853): Ceres Seq. ID no. 13646928
  misc_feature: MA Experiment ID: 20000437 Result: Down-regulated in Transcription
  misc_feature: MA Experiment 20000437 PARAMETER Experiment Name: At_Drought_P Parameter: Age (day) Value: 8
  misc_feature: MA Experiment 20000437 PARAMETER Experiment Name: At_Drought_P Parameter: Organism Value: A. thaliana
  misc_feature: MA Experiment 20000437 PARAMETER Experiment Name: At_Drought_P Parameter: Plant Line Value: WS
  misc_feature: MA Experiment 20000437 PARAMETER Experiment Name: At_Drought_P Parameter: Timepoint (hr) Value: 24
  misc_feature: MA Experiment 20000437 PARAMETER Experiment Name: At_Drought_P Parameter: Tissue Value: Whole Plant
  misc_feature: MA Experiment 20000437 PARAMETER Experiment Name: At_Drought_P Parameter: Treatment Value: Drought vs. No Drought
  misc_feature: MA Experiment ID: 20000495 Result: Down-regulated in Transcription
  misc_feature: MA Experiment 20000495 PARAMETER Experiment Name: At_Guard_Cells_P Parameter: Harvest Date Value: 8/2/2002
  misc_feature: MA Experiment 20000495 PARAMETER Experiment Name: At_Guard_Cells_P Parameter: Organism Value: A. thaliana
  misc_feature: MA Experiment 20000495 PARAMETER Experiment Name: At_Guard_Cells_P Parameter: Tissue Value: Guard Cells vs. Leaves
  misc_feature: MA Experiment ID: 20001450 Result: Down-regulated in Transcription
  misc_feature: MA Experiment 20001450 PARAMETER Experiment Name: At_Far-red-induction_P Parameter: Age (day) Value: 7
  misc_feature: MA Experiment 20001450 PARAMETER Experiment Name: At_Far-red-induction_P Parameter: Light Value: Far-red vs. White
  misc_feature: MA Experiment 20001450 PARAMETER Experiment Name: At_Far-red-induction_P Parameter: Organism Value: A. thaliana
  misc_feature: MA Experiment 20001450 PARAMETER Experiment Name: At_Far-red-induction_P Parameter: Plant Line Value: Columbia
  misc_feature: MA Experiment 20001450 PARAMETER Experiment Name: At_Far-red-induction_P Parameter: Timepoint (hr) Value: 8
  misc_feature: MA Experiment 20001450 PARAMETER Experiment Name: At_Far-red-induction_P Parameter: Tissue Value: Whole Plant
  misc_feature: MA Experiment ID: 20001451 Result: Down-regulated in Transcription
  misc_feature: MA Experiment 20001451 PARAMETER Experiment Name: At_Far-red-induction_P Parameter: Age (day) Value: 7
  misc_feature: MA Experiment 20001451 PARAMETER Experiment Name: At_Far-red-induction_P Parameter: Light Value: Far-red vs. White
  misc_feature: MA Experiment 20001451 PARAMETER Experiment Name: At_Far-red-induction_P Parameter: Organism Value: A. thaliana
  misc_feature: MA Experiment 20001451 PARAMETER Experiment Name: At_Far-red-induction_P Parameter: Plant Line Value: Columbia
  misc_feature: MA Experiment 20001451 PARAMETER Experiment Name: At_Far-red-induction_P Parameter: Timepoint (hr) Value: 24
  misc_feature: MA Experiment 20001451 PARAMETER Experiment Name: At_Far-red-induction_P Parameter: Tissue Value: Whole Plant
  misc_feature: MA Experiment ID: 20001560 Result: Up-regulated in Transcription
  misc_feature: MA Experiment 20001560 PARAMETER Experiment Name: At_Drought_Soil_Dry_P Parameter: Age (day) Value: 28
  misc_feature: MA Experiment 20001560 PARAMETER Experiment Name: At_Drought_Soil_Dry_P Parameter: Organism Value: A. thaliana
  misc_feature: MA Experiment 20001560 PARAMETER Experiment Name: At_Drought_Soil_Dry_P Parameter: Plant Line Value: WS
  misc_feature: MA Experiment 20001560 PARAMETER Experiment Name: At_Drought_Soil_Dry_P Parameter: Post Timepoint (hr) Value: None
  misc_feature: MA Experiment 20001560 PARAMETER Experiment Name: At_Drought_Soil_Dry_P Parameter: Post-Treatment Value: None
  misc_feature: MA Experiment 20001560 PARAMETER Experiment Name: At_Drought_Soil_Dry_P Parameter: Timepoint (day) Value: 14
  misc_feature: MA Experiment 20001560 PARAMETER Experiment Name: At_Drought_Soil_Dry_P Parameter: Treatment Value: Drought vs. No Drought
  misc_feature: MA Experiment ID: 20001911 Result: Down-regulated in Transcription
  misc_feature: MA Experiment 20001911 PARAMETER Experiment Name: At_Drought_Reproduction_P Parameter: Age (day) Value: 40
  misc_feature: MA Experiment 20001911 PARAMETER Experiment Name: At_Drought_Reproduction_P Parameter: Organism Value: A. thaliana
  misc_feature: MA Experiment 20001911 PARAMETER Experiment Name: At_Drought_Reproduction_P Parameter: Plant Line Value: WS
  misc_feature: MA Experiment 20001911 PARAMETER Experiment Name: At_Drought_Reproduction_P Parameter: Timepoint (day) Value: 10
  misc_feature: MA Experiment 20001911 PARAMETER Experiment Name: At_Drought_Reproduction_P Parameter: Tissue Value: Flowers
  misc_feature: MA Experiment 20001911 PARAMETER Experiment Name: At_Drought_Reproduction_P Parameter: Treatment Value: Drought vs. No Drought
gagtgttcttcttccacagtcgagagtcgaaaaccctaatctctgtactcaagcaacattttcagacgaaagcaatcagaaactcaggtgaatcagaagcatgattcgagttacgaaaccaaaagcgatcatcgaatcactgagttaccatcttatccaaagatgctccgcaagtggaactcctaaaggaaaagcaaagctgaagacaggtcagccattgaagcgtaacaaactctccatcaagaaaggtggtggcggcggcggagcacctgttgaaggagaggaagcagttaaaggaaaaggtagaatttccgatgagaagcagaaactctacgagcaatgcttaaacgctccttgtcctgttcgctacttgaccccccaagagatcgagcgtgaggcgcaacgtgagaagctaggtttgattagtaaagagaagcaacgagatatggagatccagaagaaaggaggagctgcttcaatgggagtcaccgatgagccgatgcgaattgggacgccaggtttggattacatttcgttagggatttttgaagctgaggaattgcctaagtataagcttacggaagaagatggagagagacttgcgaaggagtatagtaaagtgttgatgagagagcatagagagcgtcgtgcagctgaaactgcgcttttgaatttgaagaaatctgctattgaggcattgccggagaatctgaagaaggcggcgttagagcctgatttgacaccgtttccggcgaatcgaggtatggctactcttacaccgcctattgaagggtatcttgagaaggttatggatgcagctaagaagagttcaagtaaagagaagttgagatga

SEQ ID NO: 46951 - protein, 250 aa, Arabidopsis thaliana
  peptide (1)..(250): Ceres Seq. ID no. 13646929
  misc_feature (16)..(250): Homolog of NCBI NO: 34914612 NR Description: P0520B06.19 [Oryza sativa (japonica
  misc_feature (1)..(231): Homolog of NCBI NO: 15233539 NR Description: hypothetical protein [Arabidopsis thaliana]
  misc_feature (1)..(250): Homolog of NCBI NO: 15235571 NR Description: expressed protein [Arabidopsis thaliana]
MIRVTKPKAIIESLSYHLIQRCSASGTPKGKAKLKTGQPLKRNKLSIKKGGGGGGAPVEGEEAVKGKGRISDEKQKLYEQCLNAPCPVRYLTPQEIEREAQREKLGLISKEKQRDMEIQKKGGAASMGVTDEPMRIGTPGLDYISLGIFEAEELPKYKLTEEDGERLAKEYSKVLMREHRERRAAETALLNLKKSAIEALPENLKKAALEPDLTPFPANRGMATLTPPIEGYLEKVMDAAKKSSSKEKLR

SEQ ID NO: 46952 - protein, 135 aa, Arabidopsis thaliana
  peptide (1)..(135): Ceres Seq. ID no. 13646930
  misc_feature (1)..(135): Homolog of NCBI NO: 34914612 NR Description: P0520B06.19 [Oryza sativa (japonica
  misc_feature (1)..(116): Homolog of NCBI NO: 15233539 NR Description: hypothetical protein [Arabidopsis thaliana]
  misc_feature (1)..(135): Homolog of NCBI NO: 15235571 NR Description: expressed protein [Arabidopsis thaliana]
MEIQKKGGAASMGVTDEPMRIGTPGLDYISLGIFEAEELPKYKLTEEDGERLAKEYSKVLMREHRERRAAETALLNLKKSAIEALPENLKKAALEPDLTPFPANRGMATLTPPIEGYLEKVMDAAKKSSSKEKLR

SEQ ID NO: 46953 - DNA, 1140 bp, Arabidopsis thaliana
  misc_feature (1)..(1140): Ceres Seq. ID no. 13579027
  misc_feature: MA Experiment ID: 20000173 Result: Down-regulated in Transcription
  misc_feature: MA Experiment 20000173 PARAMETER Experiment Name: At_42deg_Heat_P Parameter: Age (day) Value: 14
  misc_feature: MA Experiment 20000173 PARAMETER Experiment Name: At_42deg_Heat_P Parameter: Organism Value: A. thaliana
  misc_feature: MA Experiment 20000173 PARAMETER Experiment Name: At_42deg_Heat_P Parameter: Plant Line Value: WS
  misc_feature: MA Experiment 20000173 PARAMETER Experiment Name: At_42deg_Heat_P Parameter: Temperature (deg C) Value: 42 vs. 22
  misc_feature: MA Experiment 20000173 PARAMETER Experiment Name: At_42deg_Heat_P Parameter: Timepoint (hr) Value: 6
  misc_feature: MA Experiment 20000173 PARAMETER Experiment Name: At_42deg_Heat_P Parameter: Tissue Value: Aerial
  misc_feature: MA Experiment ID: 20000180 Result: Up-regulated in Transcription
  misc_feature: MA Experiment 20000180 PARAMETER Experiment Name: At_Germinating_Seeds_P Parameter: Age (hr) Value: 24 vs. 0
  misc_feature: MA Experiment 20000180 PARAMETER Experiment Name: At_Germinating_Seeds_P Parameter: Tissue Value: Germinating Seeds
  misc_feature: MA Experiment ID: 20000264 Result: Down-regulated in Transcription
  misc_feature: MA Experiment 20000264 PARAMETER Experiment Name: At_Open_Flower_P Parameter: Age (day) Value: 21
  misc_feature: MA Experiment 20000264 PARAMETER Experiment Name: At_Open_Flower_P Parameter: Plant Line Value: WS
  misc_feature: MA Experiment 20000264 PARAMETER Experiment Name: At_Open_Flower_P Parameter: Tissue Value: Open Flower vs. Whole Plant
  misc_feature: MA Experiment ID: 20000452 Result: Up-regulated in Transcription
  misc_feature: MA Experiment 20000452 PARAMETER Experiment Name: At_CS6879_Shoots-Roots_P Parameter: Age (day) Value: 14
  misc_feature: MA Experiment 20000452 PARAMETER Experiment Name: At_CS6879_Shoots-Roots_P Parameter: Organism Value: A. thaliana
  misc_feature: MA Experiment 20000452 PARAMETER Experiment Name: At_CS6879_Shoots-Roots_P Parameter: Plant Line Value: CS6879 vs. WS
  misc_feature: MA Experiment 20000452 PARAMETER Experiment Name: At_CS6879_Shoots-Roots_P Parameter: Tissue Value: Shoots
  misc_feature: MA Experiment ID: 20000794 Result: Down-regulated in Transcription
  misc_feature: MA Experiment 20000794 PARAMETER Experiment Name: At_Petals_P Parameter: Age (day) Value: 23-25 days
  misc_feature: MA Experiment 20000794 PARAMETER Experiment Name: At_Petals_P Parameter: Plant Line Value: WS
  misc_feature: MA Experiment 20000794 PARAMETER Experiment Name: At_Petals_P Parameter: Tissue Value: Petals vs. Whole plant
  misc_feature: MA Experiment ID: 20001451 Result: Up-regulated in Transcription
  misc_feature: MA Experiment 20001451 PARAMETER Experiment Name: At_Far-red-induction_P Parameter: Age (day) Value: 7
  misc_feature: MA Experiment 20001451 PARAMETER Experiment Name: At_Far-red-induction_P Parameter: Light Value: Far-red vs. White
  misc_feature: MA Experiment 20001451 PARAMETER Experiment Name: At_Far-red-induction_P Parameter: Organism Value: A. thaliana
  misc_feature: MA Experiment 20001451 PARAMETER Experiment Name: At_Far-red-induction_P Parameter: Plant Line Value: Columbia
  misc_feature: MA Experiment 20001451 PARAMETER Experiment Name: At_Far-red-induction_P Parameter: Timepoint (hr) Value: 24
  misc_feature: MA Experiment 20001451 PARAMETER Experiment Name: At_Far-red-induction_P Parameter: Tissue Value: Whole Plant
atgatgaaagggatctcttcagtttctcaatcgatcaattataatccatacatcgaattcaatcgaccgcagcttcagatcagtactgtgaatcccaatccagctcaatctcgattttcccgccctcgatccctccgtgttctctcactctccgccgatccatcggcaaatcggaatcctaaatcagccgttgacgcacacgcgccgccactggtggttgtgggatctgcgaacgccgatatctatgtggagatcgagagattacccaaggaaggggaaacgatttcggccaagacagggcaaacgctcgccggaggaaaaggcgcgaatcaggcggcgtgtggagcgaagctaatgtatccgacttacttcgttggtcgtttgggagaggacgcgcacgggaagctaatagctgaggcgttgggcgatgatgggtgtggggttcacttggactacgtgagatctgtgaataatgagccgacgggacacgcggtggtgatgcttcagtcggacggtcagaattcgatcattatcgttggtggtgcaaatatgaaagcttggcctgagattatgagcgatgatgatcttgagattgtgaggaatgctggtattgtgcttctgcaaagggagatcccagattccatcaatattcaagttgctaaggctgtgaagaaagcaggtgttccagtcatccttgatgtgggaggaatggatacgcctataccaaatgagctattggattccattgatatcttgagccccaatgaaactgagctcagtcgcttgacaggaatgccaactgaaacttttgaacagattagccaagctgttgcaaagtgccataagttgggagttaagcaagttctagtaaaactcgggtccaaaggatctgcactattcatacaaggggaaaaaccaatccagcagtctatcataccggctgcacaagtggttgatactacaggagctggggatactttcactgcagcatttgcagtcgctatggtagagggcaagtcccatgaggaatgcttgagatttgctgctgcagctgcctctctttgtgtccaagtaaagggtgcaataccgagcatgcctgaccgaaaatctgttttgaagctccttaaatttagtatctaa

SEQ ID NO: 46954 - protein, 379 aa, Arabidopsis thaliana
  peptide (1)..(379): Ceres Seq. ID no. 13579028
  misc_feature (68)..(368): Pfam Name: pfkB family carbohydrate kinase Pfam Description: pfkB family carbohydrate kinase
  misc_feature (71)..(376): Homolog of NCBI NO: 16272449 NR Description: ribokinase [Haemophilus influenzae Rd]
  misc_feature (69)..(378): Homolog of NCBI NO: 22973117 NR Description: hypothetical protein [Chloroflexus aurantiacus]
  misc_feature (71)..(371): Homolog of NCBI NO: 23061262 NR Description: hypothetical protein [Pseudomonas fluorescens
  misc_feature (71)..(370): Homolog of NCBI NO: 23039770 NR Description: hypothetical protein [Trichodesmium erythraeum
  misc_feature (71)..(376): Homolog of NCBI NO: 23002722 NR Description: hypothetical protein [Lactobacillus gasseri]
  misc_feature (71)..(375): Homolog of NCBI NO: 23466669 NR Description: hypothetical protein [Haemophilus somnus 129PT]
  misc_feature (284)..(376): Homolog of NCBI NO: 34910896 NR Description: P0003E08.15 [Oryza sativa (japonica
  misc_feature (24)..(305): Homolog of NCBI NO: 34910896 NR Description: P0003E08.15 [Oryza sativa (japonica
  misc_feature (2)..(379): Homolog of NCBI NO: 25518633 NR Description: hypothetical protein F20D23.14 - Arabidopsis
  misc_feature (1)..(379): Homolog of NCBI NO: 15220039 NR Description: putative ribokinase; protein id: At1g17160.1
MMKGISSVSQSINYNPYIEFNRPQLQISTVNPNPAQSRFSRPRSLRVLSLSADPSANRNPKSAVDAHAPPLVVVGSANADIYVEIERLPKEGETISAKTGQTLAGGKGANQAACGAKLMYPTYFVGRLGEDAHGKLIAEALGDDGCGVHLDYVRSVNNEPTGHAVVMLQSDGQNSIIIVGGANMKAWPEIMSDDDLEIVRNAGIVLLQREIPDSINIQVAKAVKKAGVPVILDVGGMDTPIPNELLDSIDILSPNETELSRLTGMPTETFEQISQAVAKCHKLGVKQVLVKLGSKGSALFIQGEKPIQQSIIPAAQVVDTTGAGDTFTAAFAVAMVEGKSHEECLRFAAAAASLCVQVKGAIPSMPDRKSVLKLLKFSI

SEQ ID NO: 46955 - protein, 378 aa, Arabidopsis thaliana
  peptide (1)..(378): Ceres Seq. ID no. 13579029
  misc_feature (67)..(367): Pfam Name: pfkB family carbohydrate kinase Pfam Description: pfkB family carbohydrate kinase
  misc_feature (70)..(375): Homolog of NCBI NO: 16272449 NR Description: ribokinase [Haemophilus influenzae Rd]
  misc_feature (68)..(377): Homolog of NCBI NO: 22973117 NR Description: hypothetical protein [Chloroflexus aurantiacus]
  misc_feature (70)..(370): Homolog of NCBI NO: 23061262 NR Description: hypothetical protein [Pseudomonas fluorescens
  misc_feature (70)..(369): Homolog of NCBI NO: 23039770 NR Description: hypothetical protein [Trichodesmium erythraeum
  misc_feature (70)..(375): Homolog of NCBI NO: 23002722 NR Description: hypothetical protein [Lactobacillus gasseri]
  misc_feature (70)..(374): Homolog of NCBI NO: 23466669 NR Description: hypothetical protein [Haemophilus somnus 129PT]
  misc_feature (283)..(375): Homolog of NCBI NO: 34910896 NR Description: P0003E08.15 [Oryza sativa (japonica
  misc_feature (23)..(304): Homolog of NCBI NO: 34910896 NR Description: P0003E08.15 [Oryza sativa (japonica
  misc_feature (1)..(378): Homolog of NCBI NO: 25518633 NR Description: hypothetical protein F20D23.14 - Arabidopsis
  misc_feature (1)..(378): Homolog of NCBI NO: 15220039 NR Description: putative ribokinase; protein id: At1g17160.1
MKGISSVSQSINYNPYIEFNRPQLQISTVNPNPAQSRFSRPRSLRVLSLSADPSANRNPKSAVDAHAPPLVVVGSANADIYVEIERLPKEGETISAKTGQTLAGGKGANQAACGAKLMYPTYFVGRLGEDAHGKLIAEALGDDGCGVHLDYVRSVNNEPTGHAVVMLQSDGQNSIIIVGGANMKAWPEIMSDDDLEIVRNAGIVLLQREIPDSINIQVAKAVKKAGVPVILDVGGMDTPIPNELLDSIDILSPNETELSRLTGMPTETFEQISQAVAKCHKLGVKQVLVKLGSKGSALFIQGEKPIQQSIIPAAQVVDTTGAGDTFTAAFAVAMVEGKSHEECLRFAAAAASLCVQVKGAIPSMPDRKSVLKLLKFSI

SEQ ID NO: 46956 - protein, 261 aa, Arabidopsis thaliana
  peptide (1)..(261): Ceres Seq. ID no. 13579030
  misc_feature (1)..(250): Pfam Name: pfkB family carbohydrate kinase Pfam Description: pfkB family carbohydrate kinase
  misc_feature (1)..(258): Homolog of NCBI NO: 16272449 NR Description: ribokinase [Haemophilus influenzae Rd]
  misc_feature (1)..(260): Homolog of NCBI NO: 22973117 NR Description: hypothetical protein [Chloroflexus aurantiacus]
  misc_feature (1)..(253): Homolog of NCBI NO: 23061262 NR Description: hypothetical protein [Pseudomonas fluorescens
  misc_feature (1)..(252): Homolog of NCBI NO: 23039770 NR Description: hypothetical protein [Trichodesmium erythraeum
  misc_feature (1)..(258): Homolog of NCBI NO: 23002722 NR Description: hypothetical protein [Lactobacillus gasseri]
  misc_feature (1)..(257): Homolog of NCBI NO: 23466669 NR Description: hypothetical protein [Haemophilus somnus 129PT]
  misc_feature (166)..(258): Homolog of NCBI NO: 34910896 NR Description: P0003E08.15 [Oryza sativa (japonica
  misc_feature (1)..(187): Homolog of NCBI NO: 34910896 NR Description: P0003E08.15 [Oryza sativa (japonica
  misc_feature (1)..(261): Homolog of NCBI NO: 25518633 NR Description: hypothetical protein F20D23.14 - Arabidopsis
  misc_feature (1)..(261): Homolog of NCBI NO: 15220039 NR Description: putative ribokinase; protein id: At1g17160.1
MYPTYFVGRLGEDAHGKLIAEALGDDGCGVHLDYVRSVNNEPTGHAVVMLQSDGQNSIIIVGGANMKAWPEIMSDDDLEIVRNAGIVLLQREIPDSINIQVAKAVKKAGVPVILDVGGMDTPIPNELLDSIDILSPNETELSRLTGMPTETFEQISQAVAKCHKLGVKQVLVKLGSKGSALFIQGEKPIQQSIIPAAQVVDTTGAGDTFTAAFAVAMVEGKSHEECLRFAAAAASLCVQVKGAIPSMPDRKSVLKLLKFSI

SEQ ID NO: 46957 - DNA, 2204 bp, Arabidopsis thaliana
  misc_feature (1)..(2204): Ceres Seq. ID no. 13592016
  misc_feature: MA Experiment ID: 20000184 Result: Down-regulated in Transcription
  misc_feature: MA Experiment 20000184 PARAMETER Experiment Name: At_Shoots__P Parameter: Age (day) Value: 7
  misc_feature: MA Experiment 20000184 PARAMETER Experiment Name: At_Shoots__P Parameter: Tissue Value: Shoots vs. Whole Plant
ctctttcctttgtcactatccgttgagaacccaaacggctctctctcttgtctgactctctctctctctctctctctcgatcggtcgaaattttctctgtaactctcttctctctttacgaatcccgatatgagccacgggtggttatggttatgaataatcctgcaaacaacaacccagtagcagcgtcttcagcgtcagccgtagctttagctccgccgccacatccgccgcagcctcaccgtccttctacttcctgtgatcgtcacccggatgagcgtttcaccggattttgcccttcttgtctctttgaccgtctctctgttctagacatcaccggaaaaaacaacaacgccgtcgcgtcttcttctaagaaaccaccgtcttcttccgccgctcttaaagcaatcttcaaaccctcttcctcctccggttcgttcttcccggaacttcggaggacgaaatcgttttcagcatcaaaggctgaagctttttctctaggtgcgtttgagccacagagaagatcctgtgatgttagggttaggaacactctttggtctctgtttcacgaagacgccgagcataattctcaaaccaaagagggtttatcagtaaattgcagtgagattgatctcgaacgcatcaattcaatagtaaagtctcctgttttcgaggaggaaactgaaattgaaagtgagcaagacaacgagaaagacataaagtttgagactttcaaggaacccagaagtgtaatcgacgaaatcgttgaagaagaagaagaagaggaaacgaagaaagttgaggactttacaatggagtttaatccacagacaacggcgaagaagacgaacagagacttcaaagagattgcagggagtttctggtcagcggcgtcagtattcagcaagaaattgcagaaatggagacaaaagcagaagcttaagaagcatagaaccggaaatctcggagccggatcctctgctttaccggtggagaaggcaatcgggagacaacttagagatactcaatctgaaatcgctgagtatggttacggaaggagatcgtgtgatacagatccaagattctcaattgacgctggaagattctcgcttgatgctggtagggtttcggttgatgaccctcgttactcttttgaggagccacgcgcttcgtgggatggatatttgattggaagagctgctgctccgatgcgaatgccgtcgatgttatctgtagtggaagattctccggttcggaatcatgttcaccggtcagatactcacattccggtggaaaagtcaccacaagtatcagaagctgtgattgatgagattgttcctggtggatctgcacagaccagagagtattacttagactcatcatcttcacgaaggaggaagagccttgaccgttctagctccactaggaagttatcagcctctgtcatggctgaaattgatgaactaaagctgactcaagacagagaggctaaagacttggtttcacattcgaattcactgagagacgattgttgctctgttgagaacaactatgagatgggtgttagagaaaatgtagggactatagaatgcaacaagaagaggacgaagaaatctcgatggagttggaacatattcgggttgcttcatcgaaaaaacgggaacaaatacgaggaagaagaaagaagaagcggtgtggatagaacgttttcggggtcgtggaatgtagaaccgaggaacgggtttgatccgaagatgattaggagcaatagtagtgtgagttggagaagttccggaaccactggaggagggttgcaacggaatagtgtggatggatacattagtgggaagaagaaagttagtaaggctgagaatggaatgctcaagttttacttgacaccgggtaaaggaaggcgaagaggaagcggcaattcgaccgcaccgacaagccggcctgttccggcttctcaaccttttggtagtagaaatgttatgaacttttactaacaacattgtaatgagctcgagtcttctttttagatgtagttggaataatgtgtgatgaagttgcattgacagaaaatgttcaaagatttacatattttttttttgggttcaatctgattcttgtgttgggatttgattttgccaattttagaaatttgtagttcaaagtgttaatccatcttctttggtcatgaatgt

SEQ ID NO: 46958 - protein, 619 aa, Arabidopsis thaliana
  peptide (1)..(619): Ceres Seq. ID no. 13592017
  misc_feature (24)..(595): Pfam Name: Protein of unknown function (DUF740) Pfam Description: Protein of unknown function (DUF740)
  misc_feature (282)..(509): Homolog of NCBI NO: 15232706 NR Description: hypothetical protein [Arabidopsis thaliana]
  misc_feature (162)..(550): Homolog of NCBI NO: 28393630 NR Description: unknown protein [Arabidopsis thaliana]
  misc_feature (162)..(550): Homolog of NCBI NO: 15240904 NR Description: glycine-rich protein [Arabidopsis thaliana]
  misc_feature (176)..(476): Homolog of NCBI NO: 15232012 NR Description: glycine-rich protein [Arabidopsis thaliana]
  misc_feature (3)..(330): Homolog of NCBI NO: 28393630 NR Description: unknown protein [Arabidopsis thaliana]
  misc_feature (3)..(330): Homolog of NCBI NO: 15240904 NR Description: glycine-rich protein [Arabidopsis thaliana]
  misc_feature (25)..(587): Homolog of NCBI NO: 34908360 NR Description: P0529H11.33 [Oryza sativa (japonica
  misc_feature (303)..(598): Homolog of NCBI NO: 15232012 NR Description: glycine-rich protein [Arabidopsis thaliana]
  misc_feature (5)..(344): Homolog of NCBI NO: 15232012 NR Description: glycine-rich protein [Arabidopsis thaliana]
MVMNNPANNNPVAASSASAVALAPPPHPPQPHRPSTSCDRHPDERFTGFCPSCLFDRLSVLDITGKNNNAVASSSKKPPSSSAALKAIFKPSSSSGSFFPELRRTKSFSASKAEAFSLGAFEPQRRSCDVRVRNTLWSLFHEDAEHNSQTKEGLSVNCSEIDLERINSIVKSPVFEEETEIESEQDNEKDIKFETFKEPRSVIDEIVEEEEEEETKKVEDFTMEFNPQTTAKKTNRDFKEIAGSFWSAASVFSKKLQKWRQKQKLKKHRTGNLGAGSSALPVEKAIGRQLRDTQSEIAEYGYGRRSCDTDPRFSIDAGRFSLDAGRVSVDDPRYSFEEPRASWDGYLIGRAAAPMRMPSMLSVVEDSPVRNHVHRSDTHIPVEKSPQVSEAVIDEIVPGGSAQTREYYLDSSSSRRRKSLDRSSSTRKLSASVMAEIDELKLTQDREAKDLVSHSNSLRDDCCSVENNYEMGVRENVGTIECNKKRTKKSRWSWNIFGLLHRKNGNKYEEEERRSGVDRTFSGSWNVEPRNGFDPKMIRSNSSVSWRSSGTTGGGLQRNSVDGYISGKKKVSKAENGMLKFYLTPGKGRRRGSGNSTAPTSRPVPASQPFGSRNVMNFY

SEQ ID NO: 46959 - protein, 617 aa, Arabidopsis thaliana
  peptide (1)..(617): Ceres Seq. ID no. 13592018
  misc_feature (22)..(593): Pfam Name: Protein of unknown function (DUF740) Pfam Description: Protein of unknown function (DUF740)
  misc_feature (280)..(507): Homolog of NCBI NO: 15232706 NR Description: hypothetical protein [Arabidopsis thaliana]
  misc_feature (160)..(548): Homolog of NCBI NO: 28393630 NR Description: unknown protein [Arabidopsis thaliana]
  misc_feature (160)..(548): Homolog of NCBI NO: 15240904 NR Description: glycine-rich protein [Arabidopsis thaliana]
  misc_feature (174)..(474): Homolog of NCBI NO: 15232012 NR Description: glycine-rich protein [Arabidopsis thaliana]
  misc_feature (1)..(328): Homolog of NCBI NO: 28393630 NR Description: unknown protein [Arabidopsis thaliana]
  misc_feature (1)..(328): Homolog of NCBI NO: 15240904 NR Description: glycine-rich protein [Arabidopsis thaliana]
  misc_feature (23)..(585): Homolog of NCBI NO: 34908360 NR Description: P0529H11.33 [Oryza sativa (japonica
  misc_feature (301)..(596): Homolog of NCBI NO: 15232012 NR Description: glycine-rich protein [Arabidopsis thaliana]
  misc_feature (3)..(342): Homolog of NCBI NO: 15232012 NR Description: glycine-rich protein [Arabidopsis thaliana]
MNNPANNNPVAASSASAVALAPPPHPPQPHRPSTSCDRHPDERFTGFCPSCLFDRLSVLDITGKNNNAVASSSKKPPSSSAALKAIFKPSSSSGSFFPELRRTKSFSASKAEAFSLGAFEPQRRSCDVRVRNTLWSLFHEDAEHNSQTKEGLSVNCSEIDLERINSIVKSPVFEEETEIESEQDNEKDIKFETFKEPRSVIDEIVEEEEEEETKKVEDFTMEFNPQTTAKKTNRDFKEIAGSFWSAASVFSKKLQKWRQKQKLKKHRTGNLGAGSSALPVEKAIGRQLRDTQSEIAEYGYGRRSCDTDPRFSIDAGRFSLDAGRVSVDDPRYSFEEPRASWDGYLIGRAAAPMRMPSMLSVVEDSPVRNHVHRSDTHIPVEKSPQVSEAVIDEIVPGGSAQTREYYLDSSSSRRRKSLDRSSSTRKLSASVMAEIDELKLTQDREAKDLVSHSNSLRDDCCSVENNYEMGVRENVGTIECNKKRTKKSRWSWNIFGLLHRKNGNKYEEEERRSGVDRTFSGSWNVEPRNGFDPKMIRSNSSVSWRSSGTTGGGLQRNSVDGYISGKKKVSKAENGMLKFYLTPGKGRRRGSGNSTAPTSRPVPASQPFGSRNVMNFY

SEQ ID NO: 46960 - protein, 397 aa, Arabidopsis thaliana
  peptide (1)..(397): Ceres Seq. ID no. 13592019
  misc_feature (1)..(373): Pfam Name: Protein of unknown function (DUF740) Pfam Description: Protein of unknown function (DUF740)
  misc_feature (60)..(287): Homolog of NCBI NO: 15232706 NR Description: hypothetical protein [Arabidopsis thaliana]
  misc_feature (1)..(328): Homolog of NCBI NO: 28393630 NR Description: unknown protein [Arabidopsis thaliana]
  misc_feature (1)..(328): Homolog of NCBI NO: 15240904 NR Description: glycine-rich protein [Arabidopsis thaliana]
  misc_feature (1)..(254): Homolog of NCBI NO: 15232012 NR Description: glycine-rich protein [Arabidopsis thaliana]
  misc_feature (1)..(108): Homolog of NCBI NO: 28393630 NR Description: unknown protein [Arabidopsis thaliana]
  misc_feature (1)..(108): Homolog of NCBI NO: 15240904 NR Description: glycine-rich protein [Arabidopsis thaliana]
  misc_feature (1)..(365): Homolog of NCBI NO: 34908360 NR Description: P0529H11.33 [Oryza sativa (japonica
  misc_feature (81)..(376): Homolog of NCBI NO: 15232012 NR Description: glycine-rich protein [Arabidopsis thaliana]
  misc_feature (1)..(122): Homolog of NCBI NO: 15232012 NR Description: glycine-rich protein [Arabidopsis thaliana]
MEFNPQTTAKKTNRDFKEIAGSFWSAASVFSKKLQKWRQKQKLKKHRTGNLGAGSSALPVEKAIGRQLRDTQSEIAEYGYGRRSCDTDPRFSIDAGRFSLDAGRVSVDDPRYSFEEPRASWDGYLIGRAAAPMRMPSMLSVVEDSPVRNHVHRSDTHIPVEKSPQVSEAVIDEIVPGGSAQTREYYLDSSSSRRRKSLDRSSSTRKLSASVMAEIDELKLTQDREAKDLVSHSNSLRDDCCSVENNYEMGVRENVGTIECNKKRTKKSRWSWNIFGLLHRKNGNKYEEEERRSGVDRTFSGSWNVEPRNGFDPKMIRSNSSVSWRSSGTTGGGLQRNSVDGYISGKKKVSKAENGMLKFYLTPGKGRRRGSGNSTAPTSRPVPASQPFGSRNVMNFY

SEQ ID NO: 46961 - DNA, 2794 bp, Arabidopsis thaliana; identical to SEQ ID NO: 45202
  misc_feature (1)..(2794): Ceres Seq. ID no. 12601525
  misc_feature: MA Experiment ID: 20000184 Result: Down-regulated in Transcription
  misc_feature: MA Experiment 20000184 PARAMETER Experiment Name: At_Shoots__P Parameter: Age (day) Value: 7
  misc_feature: MA Experiment 20000184 PARAMETER Experiment Name: At_Shoots__P Parameter: Tissue Value: Shoots vs. Whole Plant
  misc_feature: MA Experiment ID: 20000234 Result: Up-regulated in Transcription
  misc_feature: MA Experiment 20000234 PARAMETER Experiment Name: At_Siliques_P Parameter: Age (day) Value: 21
  misc_feature: MA Experiment 20000234 PARAMETER Experiment Name: At_Siliques_P Parameter: Organism Value: A. thaliana
  misc_feature: MA Experiment 20000234 PARAMETER Experiment Name: At_Siliques_P Parameter: Plant Line Value: WS
  misc_feature: MA Experiment 20000234 PARAMETER Experiment Name: At_Siliques_P Parameter: Tissue Value: Less Than 5mm Siliques vs. Whole Plant
  misc_feature: MA Experiment ID: 20000235 Result: Up-regulated in Transcription
  misc_feature: MA Experiment 20000235 PARAMETER Experiment Name: At_Siliques_P Parameter: Age (day) Value: 21
  misc_feature: MA Experiment 20000235 PARAMETER Experiment Name: At_Siliques_P Parameter: Organism Value: A. thaliana
  misc_feature: MA Experiment 20000235 PARAMETER Experiment Name: At_Siliques_P Parameter: Plant Line Value: WS
  misc_feature: MA Experiment 20000235 PARAMETER Experiment Name: At_Siliques_P Parameter: Tissue Value: 5-10mm Siliques vs. Whole Plant
  misc_feature: MA Experiment ID: 20000264 Result: Up-regulated in Transcription
  misc_feature: MA Experiment 20000264 PARAMETER Experiment Name: At_Open_Flower_P Parameter: Age (day) Value: 21
  misc_feature: MA Experiment 20000264 PARAMETER Experiment Name: At_Open_Flower_P Parameter: Plant Line Value: WS
  misc_feature: MA Experiment 20000264 PARAMETER Experiment Name: At_Open_Flower_P Parameter: Tissue Value: Open Flower vs. Whole Plant
  misc_feature: MA Experiment ID: 20000265 Result: Up-regulated in Transcription
  misc_feature: MA Experiment 20000265 PARAMETER Experiment Name: At_Open_Flower_P Parameter: Age (day) Value: 21
  misc_feature: MA Experiment 20000265 PARAMETER Experiment Name: At_Open_Flower_P Parameter: Plant Line Value: WS
  misc_feature: MA Experiment 20000265 PARAMETER Experiment Name: At_Open_Flower_P Parameter: Tissue Value: Closed Flower vs. Whole Plant
  misc_feature: MA Experiment ID: 20000286 Result: Up-regulated in Transcription
  misc_feature: MA Experiment 20000286 PARAMETER Experiment Name: At_Open_Flower_P Parameter: Age (day) Value: 21
  misc_feature: MA Experiment 20000286 PARAMETER Experiment Name: At_Open_Flower_P Parameter: Plant Line Value: WS
  misc_feature: MA Experiment 20000286 PARAMETER Experiment Name: At_Open_Flower_P Parameter: Tissue Value: Half Open vs. Whole Plant
  misc_feature: MA Experiment ID: 20000794 Result: Up-regulated in Transcription
  misc_feature: MA Experiment 20000794 PARAMETER Experiment Name: At_Petals_P Parameter: Age (day) Value: 23-25 days
  misc_feature: MA Experiment 20000794 PARAMETER Experiment Name: At_Petals_P Parameter: Plant Line Value: WS
  misc_feature: MA Experiment 20000794 PARAMETER Experiment Name: At_Petals_P Parameter: Tissue Value: Petals vs. Whole plant
  misc_feature: MA Experiment ID: 20001757 Result: Down-regulated in Transcription
  misc_feature: MA Experiment 20001757 PARAMETER Experiment Name: At_50mM_NH4NO3_L-to-H_P Parameter: Timepoint (hr) Value: 6
  misc_feature: MA Experiment 20001757 PARAMETER Experiment Name: At_50mM_NH4NO3_L-to-H_P Parameter: Tissue Value: Leaf
  misc_feature: MA Experiment 20001757 PARAMETER Experiment Name: At_50mM_NH4NO3_L-to-H_P Parameter: Treatment Value: 50mM NH4NO3 vs 100mM Mannitol

SEQ ID NO: 46962 - protein, 845 aa, Arabidopsis thaliana; identical to SEQ ID NO: 45203
  peptide (1)..(845): Ceres Seq. ID no. 12601526
  misc_feature (759)..(839): Pfam Name: Galactose binding lectin domain Pfam Description: Galactose binding lectin domain
  misc_feature (759)..(839): Pfam Name: Galactose binding lectin domain Pfam Description: Galactose binding lectin domain
  misc_feature (39)..(706): Homolog of NCBI NO: 30697899 NR Description: glycosyl hydrolase family 35 (beta-galactosidase)
  misc_feature (628)..(839): Homolog of NCBI NO: 30690633 NR Description: glycosyl hydrolase family 35 (beta-galactosidase)
  misc_feature (41)..(674): Homolog of NCBI NO: 30690633 NR Description: glycosyl hydrolase family 35 (beta-galactosidase)
  misc_feature (628)..(839): Homolog of NCBI NO: 18419821 NR Description: glycosyl hydrolase family 35 (beta-galactosidase)
  misc_feature (41)..(674): Homolog of NCBI NO: 18419821 NR Description: glycosyl hydrolase family 35 (beta-galactosidase)
  misc_feature (39)..(706): Homolog of NCBI NO: 30697899 NR Description: glycosyl hydrolase family 35 (beta-galactosidase)
  misc_feature (41)..(674): Homolog of NCBI NO: 30690633 NR Description: glycosyl hydrolase family 35 (beta-galactosidase)
  misc_feature (41)..(674): Homolog of NCBI NO: 18419821 NR Description: glycosyl hydrolase family 35 (beta-galactosidase)
  misc_feature (71)..(845): Homolog of NCBI NO: 22329242 NR Description: glycosyl hydrolase family 35 (beta-galactosidase)
  misc_feature (102)..(845): Homolog of NCBI NO: 7484825 NR Description: beta-galactosidase homolog F20M13.150 -
  misc_feature (36)..(723): Homolog of NCBI NO: 10862896 NR Description: putative beta-galactosidase [Nicotiana tabacum]
  misc_feature (41)..(839): Homolog of NCBI NO: 30699255 NR Description: glycosyl hydrolase family 35 (beta-galactosidase)
  misc_feature (41)..(818): Homolog of NCBI NO: 26451843 NR Description: unknown protein [Arabidopsis thaliana]
  misc_feature (628)..(839): Homolog of NCBI NO: 18419821 NR Description: glycosyl hydrolase family 35 (beta-galactosidase)
  misc_feature (628)..(839): Homolog of NCBI NO: 30690633 NR Description: glycosyl hydrolase family 35 (beta-galactosidase)
  misc_feature (41)..(818): Homolog of NCBI NO: 26451843 NR Description: unknown protein [Arabidopsis thaliana]
  misc_feature (41)..(839): Homolog of NCBI NO: 30699255 NR Description: glycosyl hydrolase family 35 (beta-galactosidase)
  misc_feature (36)..(723): Homolog of NCBI NO: 10862896 NR Description: putative beta-galactosidase [Nicotiana tabacum]
  misc_feature (102)..(845): Homolog of NCBI NO: 7484825 NR Description: beta-galactosidase homolog F20M13.150 -
  misc_feature (71)..(845): Homolog of NCBI NO: 22329242 NR Description: glycosyl hydrolase family 35 (beta-galactosidase)

SEQ ID NO: 46963 - protein, 775 aa, Arabidopsis thaliana; identical to SEQ ID NO: 45204
  peptide (1)..(775): Ceres Seq. ID no. 12601527
  misc_feature (689)..(769): Pfam Name: Galactose binding lectin domain Pfam Description: Galactose binding lectin domain
  misc_feature (689)..(769): Pfam Name: Galactose binding lectin domain Pfam Description: Galactose binding lectin domain
  misc_feature (1)..(636): Homolog of NCBI NO: 30697899 NR Description: glycosyl hydrolase family 35 (beta-galactosidase)
  misc_feature (558)..(769): Homolog of NCBI NO: 30690633 NR Description: glycosyl hydrolase family 35 (beta-galactosidase)
  misc_feature (1)..(604): Homolog of NCBI NO: 30690633 NR Description: glycosyl hydrolase family 35 (beta-galactosidase)
  misc_feature (558)..(769): Homolog of NCBI NO: 18419821 NR Description: glycosyl hydrolase family 35 (beta-galactosidase)
  misc_feature (1)..(604): Homolog of NCBI NO: 18419821 NR Description: glycosyl hydrolase family 35 (beta-galactosidase)
  misc_feature (1)..(636): Homolog of NCBI NO: 30697899 NR Description: glycosyl hydrolase family 35 (beta-galactosidase)
  misc_feature (1)..(604): Homolog of NCBI NO: 30690633 NR Description: glycosyl hydrolase family 35 (beta-galactosidase)
  misc_feature (1)..(604): Homolog of NCBI NO: 18419821 NR Description: glycosyl hydrolase family 35 (beta-galactosidase)
  misc_feature (1)..(775): Homolog of NCBI NO: 22329242 NR Description: glycosyl hydrolase family 35 (beta-galactosidase)
  misc_feature (32)..(775): Homolog of NCBI NO: 7484825 NR Description: beta-galactosidase homolog F20M13.150 -
  misc_feature (1)..(653): Homolog of NCBI NO: 10862896 NR Description: putative beta-galactosidase [Nicotiana tabacum]
  misc_feature (1)..(769): Homolog of NCBI NO: 30699255 NR Description: glycosyl hydrolase family 35 (beta-galactosidase)
  misc_feature (1)..(748): Homolog of NCBI NO: 26451843 NR Description: unknown protein [Arabidopsis thaliana]
  misc_feature (558)..(769): Homolog of NCBI NO: 18419821 NR Description: glycosyl hydrolase family 35 (beta-galactosidase)
  misc_feature (558)..(769): Homolog of NCBI NO: 30690633 NR Description: glycosyl hydrolase family 35 (beta-galactosidase)
  misc_feature (1)..(748): Homolog of NCBI NO: 26451843 NR Description: unknown protein [Arabidopsis thaliana]
  misc_feature (1)..(769): Homolog of NCBI NO: 30699255 NR Description: glycosyl hydrolase family 35 (beta-galactosidase)
  misc_feature (1)..(653): Homolog of NCBI NO: 10862896 NR Description: putative beta-galactosidase [Nicotiana tabacum]
  misc_feature (32)..(775): Homolog of NCBI NO: 7484825 NR Description: beta-galactosidase homolog F20M13.150 -
  misc_feature (1)..(775): Homolog of NCBI NO: 22329242 NR Description: glycosyl hydrolase family 35 (beta-galactosidase)

SEQ ID NO: 46964 - protein, 723 aa, Arabidopsis thaliana; identical to SEQ ID NO: 45205
  peptide (1)..(723): Ceres Seq. ID no. 12601528
  misc_feature (637)..(717): Pfam Name: Galactose binding lectin domain Pfam Description: Galactose binding lectin domain
  misc_feature (637)..(717): Pfam Name: Galactose binding lectin domain Pfam Description: Galactose binding lectin domain
  misc_feature (1)..(584): Homolog of NCBI NO: 30697899 NR Description: glycosyl hydrolase family 35 (beta-galactosidase)
  misc_feature (506)..(717): Homolog of NCBI NO: 30690633 NR Description: glycosyl hydrolase family 35 (beta-galactosidase)
  misc_feature (1)..(552): Homolog of NCBI NO: 30690633 NR Description: glycosyl hydrolase family 35 (beta-galactosidase)
  misc_feature (506)..(717): Homolog of NCBI NO: 18419821 NR Description: glycosyl hydrolase family 35 (beta-galactosidase)
  misc_feature (1)..(552): Homolog of NCBI NO: 18419821 NR Description: glycosyl hydrolase family 35 (beta-galactosidase)
  misc_feature (1)..(584): Homolog of NCBI NO: 30697899 NR Description: glycosyl hydrolase family 35 (beta-galactosidase)
  misc_feature (1)..(552): Homolog of NCBI NO: 30690633 NR Description: glycosyl hydrolase family 35 (beta-galactosidase)
  misc_feature (1)..(552): Homolog of NCBI NO: 18419821 NR Description: glycosyl hydrolase family 35 (beta-galactosidase)
  misc_feature (1)..(723): Homolog of NCBI NO: 22329242 NR Description: glycosyl hydrolase family 35 (beta-galactosidase)
  misc_feature (1)..(723): Homolog of NCBI NO: 7484825 NR Description: beta-galactosidase homolog F20M13.150 -
  misc_feature (1)..(601): Homolog of NCBI NO: 10862896 NR Description: putative beta-galactosidase [Nicotiana tabacum]
  misc_feature (1)..(717): Homolog of NCBI NO: 30699255 NR Description: glycosyl hydrolase family 35 (beta-galactosidase)
  misc_feature (1)..(696): Homolog of NCBI NO: 26451843 NR Description: unknown protein [Arabidopsis thaliana]
  misc_feature (506)..(717): Homolog of NCBI NO: 18419821 NR Description: glycosyl hydrolase family 35 (beta-galactosidase)
  misc_feature (506)..(717): Homolog of NCBI NO: 30690633 NR Description: glycosyl hydrolase family 35 (beta-galactosidase)
  misc_feature (1)..(696): Homolog of NCBI NO: 26451843 NR Description: unknown protein [Arabidopsis thaliana]
  misc_feature (1)..(717): Homolog of NCBI NO: 30699255 NR Description: glycosyl hydrolase family 35 (beta-galactosidase)
  misc_feature (1)..(601): Homolog of NCBI NO: 10862896 NR Description: putative beta-galactosidase [Nicotiana tabacum]
  misc_feature (1)..(723): Homolog of NCBI NO: 7484825 NR Description: beta-galactosidase homolog F20M13.150 -
  misc_feature (1)..(723): Homolog of NCBI NO: 22329242 NR Description: glycosyl hydrolase family 35 (beta-galactosidase)

SEQ ID NO: 46965 - DNA, 2375 bp, Arabidopsis thaliana; identical to SEQ ID NO: 45480
  misc_feature (1)..(2375): Ceres Seq. ID no. 13576307
  misc_feature: MA Experiment ID: 20000171 Result: Down-regulated in Transcription
  misc_feature: MA Experiment 20000171 PARAMETER Experiment Name: At_42deg_Heat_P Parameter: Age (day) Value: 14
  misc_feature: MA Experiment 20000171 PARAMETER Experiment Name: At_42deg_Heat_P Parameter: Organism Value: A. thaliana
  misc_feature: MA Experiment 20000171 PARAMETER Experiment Name: At_42deg_Heat_P Parameter: Plant Line Value: WS
  misc_feature: MA Experiment 20000171 PARAMETER Experiment Name: At_42deg_Heat_P Parameter: Temperature (deg C) Value: 42 vs. 22
  misc_feature: MA Experiment 20000171 PARAMETER Experiment Name: At_42deg_Heat_P Parameter: Timepoint (hr) Value: 1
  misc_feature: MA Experiment 20000171 PARAMETER Experiment Name: At_42deg_Heat_P Parameter: Tissue Value: Aerial
  misc_feature: MA Experiment ID: 20000234 Result: Up-regulated in Transcription
  misc_feature: MA Experiment 20000234 PARAMETER Experiment Name: At_Siliques_P Parameter: Age (day) Value: 21
  misc_feature: MA Experiment 20000234 PARAMETER Experiment Name: At_Siliques_P Parameter: Organism Value: A. thaliana
  misc_feature: MA Experiment 20000234 PARAMETER Experiment Name: At_Siliques_P Parameter: Plant Line Value: WS
  misc_feature: MA Experiment 20000234 PARAMETER Experiment Name: At_Siliques_P Parameter: Tissue Value: Less Than 5mm Siliques vs. Whole Plant
  misc_feature: MA Experiment ID: 20000235 Result: Up-regulated in Transcription
  misc_feature: MA Experiment 20000235 PARAMETER Experiment Name: At_Siliques_P Parameter: Age (day) Value: 21
  misc_feature: MA Experiment 20000235 PARAMETER Experiment Name: At_Siliques_P Parameter: Organism Value: A. thaliana
  misc_feature: MA Experiment 20000235 PARAMETER Experiment Name: At_Siliques_P Parameter: Plant Line Value: WS
  misc_feature: MA Experiment 20000235 PARAMETER Experiment Name: At_Siliques_P Parameter: Tissue Value: 5-10mm Siliques vs. Whole Plant

SEQ ID NO: 46966 - protein, 606 aa, Arabidopsis thaliana; identical to SEQ ID NO: 45481
  peptide (1)..(606): Ceres Seq. ID no. 13576308
  misc_feature (25)..(316): Pfam Name: Protein kinase domain Pfam Description: Protein kinase domain
  misc_feature (25)..(316): Pfam Name: Protein kinase domain Pfam Description: Protein kinase domain
  misc_feature (4)..(417): Homolog of NCBI NO: 9294059 NR Description: MAP kinase [Arabidopsis thaliana]
  misc_feature (1)..(477): Homolog of NCBI NO: 17064906 NR Description: Unknown protein [Arabidopsis thaliana]
  misc_feature (1)..(477): Homolog of NCBI NO: 15239634 NR Description: mitogen-activated protein kinase (MAPK), putative
  misc_feature (13)..(600): Homolog of NCBI NO: 15220806 NR Description: mitogen-activated protein kinase (MAPK), putative
  misc_feature (13)..(489): Homolog of NCBI NO: 34910892 NR Description: putative mitogen-activated protein kinase
  misc_feature (4)..(417): Homolog of NCBI NO: 9294059 NR Description: MAP kinase [Arabidopsis thaliana]
  misc_feature (1)..(477): Homolog of NCBI NO: 15239634 NR Description: mitogen-activated protein kinase (MAPK), putative
  misc_feature (13)..(489): Homolog of NCBI NO: 34910892 NR Description: putative mitogen-activated protein kinase
  misc_feature (9)..(606): Homolog of NCBI NO: 34912932 NR Description: MAP kinase-like protein [Oryza sativa (japonica
  misc_feature (1)..(603): Homolog of NCBI NO: 4732123 NR Description: mitogen-activated protein kinase homologue
  misc_feature (8)..(603): Homolog of NCBI NO: 9294393 NR Description: mitogen-activated protein kinase [Arabidopsis
  misc_feature (13)..(603): Homolog of NCBI NO: 15231915 NR Description: mitogen-activated protein kinase (MAPK), putative
  misc_feature (13)..(489): Homolog of NCBI NO: 24412850 NR Description: putative mitogen-activated protein kinase wjumk1
  misc_feature (13)..(600): Homolog of NCBI NO: 15220806 NR Description: mitogen-activated protein kinase (MAPK), putative
  misc_feature (1)..(477): Homolog of NCBI NO: 17064906 NR Description: Unknown protein [Arabidopsis thaliana]
  misc_feature (13)..(489): Homolog of NCBI NO: 24412850 NR Description: putative mitogen-activated protein kinase wjumk1
  misc_feature (13)..(603): Homolog of NCBI NO: 15231915 NR Description: mitogen-activated protein kinase (MAPK), putative
  misc_feature (8)..(603): Homolog of NCBI NO: 9294393 NR Description: mitogen-activated protein kinase [Arabidopsis
  misc_feature (1)..(603): Homolog of NCBI NO: 4732123 NR Description: mitogen-activated protein kinase homologue
  misc_feature (9)..(606): Homolog of NCBI NO: 34912932 NR Description: MAP kinase-like protein [Oryza sativa (japonica

SEQ ID NO: 46967 - protein, 594 aa, Arabidopsis thaliana; identical to SEQ ID NO: 45482
  peptide (1)..(594): Ceres Seq. ID no. 13576309
  misc_feature (13)..(304): Pfam Name: Protein kinase domain Pfam Description: Protein kinase domain
  misc_feature (13)..(304): Pfam Name: Protein kinase domain Pfam Description: Protein kinase domain
  misc_feature (1)..(405): Homolog of NCBI NO: 9294059 NR Description: MAP kinase [Arabidopsis thaliana]
  misc_feature (1)..(465): Homolog of NCBI NO: 17064906 NR Description: Unknown protein [Arabidopsis thaliana]
  misc_feature (1)..(465): Homolog of NCBI NO: 15239634 NR Description: mitogen-activated protein kinase (MAPK), putative
  misc_feature (1)..(588): Homolog of NCBI NO: 15220806 NR Description: mitogen-activated protein kinase (MAPK), putative
  misc_feature (1)..(477): Homolog of NCBI NO: 34910892 NR Description: putative mitogen-activated protein kinase
  misc_feature (1)..(405): Homolog of NCBI NO: 9294059 NR Description: MAP kinase [Arabidopsis thaliana]
  misc_feature (1)..(465): Homolog of NCBI NO: 15239634 NR Description: mitogen-activated protein kinase (MAPK), putative
  misc_feature (1)..(477): Homolog of NCBI NO: 34910892 NR Description: putative mitogen-activated protein kinase
  misc_feature (1)..(594): Homolog of NCBI NO: 34912932 NR Description: MAP kinase-like protein [Oryza sativa (japonica
  misc_feature (1)..(591): Homolog of NCBI NO: 4732123 NR Description: mitogen-activated protein kinase homologue
  misc_feature (1)..(591): Homolog of NCBI NO: 9294393 NR Description: mitogen-activated protein kinase [Arabidopsis
  misc_feature (1)..(591): Homolog of NCBI NO: 15231915 NR Description: mitogen-activated protein kinase (MAPK), putative
  misc_feature (1)..(477): Homolog of NCBI NO: 24412850 NR Description: putative mitogen-activated protein kinase wjumk1
  misc_feature (1)..(588): Homolog of NCBI NO: 15220806 NR Description: mitogen-activated protein kinase (MAPK), putative
  misc_feature (1)..(465): Homolog of NCBI NO: 17064906 NR Description: Unknown protein [Arabidopsis thaliana]
  misc_feature (1)..(477): Homolog of NCBI NO: 24412850 NR Description: putative mitogen-activated protein kinase wjumk1
  misc_feature (1)..(591): Homolog of NCBI NO: 15231915 NR Description: mitogen-activated protein kinase (MAPK), putative
  misc_feature (1)..(591): Homolog of NCBI NO: 9294393 NR Description: mitogen-activated protein kinase [Arabidopsis
  misc_feature (1)..(591): Homolog of NCBI NO: 4732123 NR Description: mitogen-activated protein kinase homologue
  misc_feature (1)..(594): Homolog of NCBI NO: 34912932 NR Description: MAP kinase-like protein [Oryza sativa (japonica

SEQ ID NO: 46968 - protein, 516 aa, Arabidopsis thaliana; identical to SEQ ID NO: 45483
  peptide (1)..(516): Ceres Seq. ID no. 13576310
  misc_feature (1)..(226): Pfam Name: Protein kinase domain Pfam Description: Protein kinase domain
  misc_feature (1)..(226): Pfam Name: Protein kinase domain Pfam Description: Protein kinase domain
  misc_feature (1)..(327): Homolog of NCBI NO: 9294059 NR Description: MAP kinase [Arabidopsis thaliana]
  misc_feature (1)..(387): Homolog of NCBI NO: 17064906 NR Description: Unknown protein [Arabidopsis thaliana]
  misc_feature (1)..(387): Homolog of NCBI NO: 15239634 NR Description: mitogen-activated protein kinase (MAPK), putative
  misc_feature (1)..(510): Homolog of NCBI NO: 15220806 NR Description: mitogen-activated protein kinase (MAPK), putative
  misc_feature (1)..(399): Homolog of NCBI NO: 34910892 NR Description: putative mitogen-activated protein kinase
  misc_feature (1)..(327): Homolog of NCBI NO: 9294059 NR Description: MAP kinase [Arabidopsis thaliana]
  misc_feature (1)..(387): Homolog of NCBI NO: 15239634 NR Description: mitogen-activated protein kinase (MAPK), putative
  misc_feature (1)..(399): Homolog of NCBI NO: 34910892 NR Description: putative mitogen-activated protein kinase
  misc_feature (1)..(516): Homolog of NCBI NO: 34912932 NR Description: MAP kinase-like protein [Oryza sativa (japonica
  misc_feature (1)..(513): Homolog of NCBI NO: 4732123 NR Description: mitogen-activated protein kinase homologue
  misc_feature (1)..(513): Homolog of NCBI NO: 9294393 NR Description: mitogen-activated protein kinase [Arabidopsis
  misc_feature (1)..(513): Homolog of NCBI NO: 15231915 NR Description: mitogen-activated protein kinase (MAPK), putative
  misc_feature (1)..(399): Homolog of NCBI NO: 24412850 NR Description: putative mitogen-activated protein kinase wjumk1
  misc_feature (1)..(510): Homolog of NCBI NO: 15220806 NR Description: mitogen-activated protein kinase (MAPK), putative
  misc_feature (1)..(387): Homolog of NCBI NO: 17064906 NR Description: Unknown protein [Arabidopsis thaliana]
  misc_feature (1)..(399): Homolog of NCBI NO: 24412850 NR Description: putative mitogen-activated protein kinase wjumk1
  misc_feature (1)..(513): Homolog of NCBI NO: 15231915 NR Description: mitogen-activated protein kinase (MAPK), putative
  misc_feature (1)..(513): Homolog of NCBI NO: 9294393 NR Description: mitogen-activated protein kinase [Arabidopsis
  misc_feature (1)..(513): Homolog of NCBI NO: 4732123 NR Description: mitogen-activated protein kinase homologue
  misc_feature (1)..(516): Homolog of NCBI NO: 34912932 NR Description: MAP kinase-like protein [Oryza sativa (japonica

SEQ ID NO: 46969 - DNA, 1233 bp, Arabidopsis thaliana
  misc_feature (1)..(1233): Ceres Seq. ID no. 12604466
  misc_feature: MA Experiment ID: 20000184 Result: Up-regulated in Transcription
  misc_feature: MA Experiment 20000184 PARAMETER Experiment Name: At_Shoots__P Parameter: Age (day) Value: 7
  misc_feature: MA Experiment 20000184 PARAMETER Experiment Name: At_Shoots__P Parameter: Tissue Value: Shoots vs. Whole Plant
  misc_feature: MA Experiment ID: 20000185 Result: Up-regulated in Transcription
  misc_feature: MA Experiment 20000185 PARAMETER Experiment Name: At_Roots__P Parameter: Age (day) Value: 7 vs. 21
  misc_feature: MA Experiment 20000185 PARAMETER Experiment Name: At_Roots__P Parameter: Organism Value: A. thaliana
  misc_feature: MA Experiment 20000185 PARAMETER Experiment Name: At_Roots__P Parameter: Tissue Value: Roots vs. Whole Plant
  misc_feature: MA Experiment ID: 20000227 Result: Down-regulated in Transcription
  misc_feature: MA Experiment 20000227 PARAMETER Experiment Name: At_Root-Tips-vs-Tops_P Parameter: Tissue Value: Root Tips vs. Root Tops
  misc_feature: MA Experiment ID: 20000439 Result: Up-regulated in Transcription
  misc_feature: MA Experiment 20000439 PARAMETER Experiment Name: At_Roots__P Parameter: Age (day) Value: 14 vs. 21
  misc_feature: MA Experiment 20000439 PARAMETER Experiment Name: At_Roots__P Parameter: Organism Value: A. thaliana
  misc_feature: MA Experiment 20000439 PARAMETER Experiment Name: At_Roots__P Parameter: Tissue Value: Roots vs. Whole Plant
  misc_feature: MA Experiment ID: 20001451 Result: Down-regulated in Transcription
  misc_feature: MA Experiment 20001451 PARAMETER Experiment Name: At_Far-red-induction_P Parameter: Age (day) Value: 7
  misc_feature: MA Experiment 20001451 PARAMETER Experiment Name: At_Far-red-induction_P Parameter: Light Value: Far-red vs. White
  misc_feature: MA Experiment 20001451 PARAMETER Experiment Name: At_Far-red-induction_P Parameter: Organism Value: A. thaliana
  misc_feature: MA Experiment 20001451 PARAMETER Experiment Name: At_Far-red-induction_P Parameter: Plant Line Value: Columbia
  misc_feature: MA Experiment 20001451 PARAMETER Experiment Name: At_Far-red-induction_P Parameter: Timepoint (hr) Value: 24
  misc_feature: MA Experiment 20001451 PARAMETER Experiment Name: At_Far-red-induction_P Parameter: Tissue Value: Whole Plant
gaagaacaaaccctagctcctctctttttctctctctacctctctttctctatcttctcttatcactacttctctcgccgatcaatcatcatgaacgatcctgataatcccgatctgagcaacgacgactctgcttggagagaactcacactcacagctcaagattctgacttcttcgaccgagacacttccaatatcctctctgacttcggttggaacctccaccactcctccgatcatcctcacagtctcagattcgactccgatttaacacaaaccaccggagtcaaacctaccaccgtcacttcttcttgttcctcatccgccgccgtttccgttgccgttacctctactaataataatccctcagctacctcaagttcaagtgaagatccggccgagaactcaaccgcctccgccgagaaaacaccaccaccggagacaccagtgaaggagaagaagaaggctcaaaagcgaattcggcaaccaagattcgcattcatgaccaagagtgatgtggataatcttgaagatggatatcgatggcgtaaatatggacaaaaagccgtcaagaatagcccattcccaaggagctactatagatgcacaaacagcagatgcacggtgaagaagagagtagaacgttcatcagatgatccatcgatagtgatcacaacatacgaaggacaacattgccatcaaaccattggattccctcgtggtggaatcctcactgcacacgacccacatagcttcacttctcatcatcatctccctcctccattaccaaatccttattattaccaagaactccttcatcaacttcacagagacaataatgctccttcaccgcggttaccccgacctactactgaagatacacctgccgtgtctactccatcagaggaaggcttacttggtgatattgtacctcaaactatgcgcaacccttgaggtaagcttggtacgtaacaatagttaaggaggtgctaactcattatatatagaagatattgcagcccggaatatgcgcagggagggtttaacaatatggcgttgtaacaatggatctatatataactatatatatatattacttcattgttgatcaatagcacaccaccggtacgtttgcaatttcttcatgtatatttcttgttatataagtagttatatatccagatataattttgatgtaacacaacattaatcttaatcttggatccatcccac

SEQ ID NO: 46970 - protein, 317 aa, Arabidopsis thaliana
  peptide (1)..(317): Ceres Seq. ID no. 12604467
  misc_feature (176)..(235): Pfam Name: WRKY DNA -binding domain Pfam Description: WRKY DNA -binding domain
  misc_feature (118)..(311): Homolog of NCBI NO: 15220582 NR Description: WRKY family transcription factor
  misc_feature (95)..(263): Homolog of NCBI NO: 34910900 NR Description: P0003E08.17 [Oryza sativa (japonica
  misc_feature (13)..(233): Homolog of NCBI NO: 21536889 NR Description: putative WRKY-type DNA binding protein
  misc_feature (13)..(233): Homolog of NCBI NO: 15226550 NR Description: WRKY family transcription factor
  misc_feature (95)..(276): Homolog of NCBI NO: 34912866 NR Description: putative DNA-binding protein homolog
  misc_feature (5)..(301): Homolog of NCBI NO: 15239913 NR Description: WRKY family transcription factor
  misc_feature (124)..(299): Homolog of NCBI NO: 34899462 NR Description: WRKY transcription factor-like protein
  misc_feature (123)..(305): Homolog of NCBI NO: 13236648 NR Description: putative DNA binding protein [Oryza sativa]
  misc_feature (31)..(149): Homolog of NCBI NO: 12597778 NR Description: hypothetical protein, 3' partial [Arabidopsis
  misc_feature (31)..(317): Homolog of NCBI NO: 15222282 NR Description: WRKY family transcription factor
EEQTLAPLFFSLYLSFSIFSYHYFSRRSIIMNDPDNPDLSNDDSAWRELTLTAQDSDFFDRDTSNILSDFGWNLHHSSDHPHSLRFDSDLTQTTGVKPTTVTSSCSSSAAVSVAVTSTNNNPSATSSSSEDPAENSTASAEKTPPPETPVKEKKKAQKRIRQPRFAFMTKSDVDNLEDGYRWRKYGQKAVKNSPFPRSYYRCTNSRCTVKKRVERSSDDPSIVITTYEGQHCHQTIGFPRGGILTAHDPHSFTSHHHLPPPLPNPYYYQELLHQLHRDNNAPSPRLPRPTTEDTPAVSTPSEEGLLGDIVPQTMRNP

SEQ ID NO: 46971 - protein, 287 aa, Arabidopsis thaliana
  peptide (1)..(287): Ceres Seq. ID no. 12604468
  misc_feature (146)..(205): Pfam Name: WRKY DNA -binding domain Pfam Description: WRKY DNA -binding domain
  misc_feature (88)..(281): Homolog of NCBI NO: 15220582 NR Description: WRKY family transcription factor
  misc_feature (65)..(233): Homolog of NCBI NO: 34910900 NR Description: P0003E08.17 [Oryza sativa (japonica
  misc_feature (1)..(203): Homolog of NCBI NO: 21536889 NR Description: putative WRKY-type DNA binding protein
  misc_feature (1)..(203): Homolog of NCBI NO: 15226550 NR Description: WRKY family transcription factor
  misc_feature (65)..(246): Homolog of NCBI NO: 34912866 NR Description: putative DNA-binding protein homolog
  misc_feature (1)..(271): Homolog of NCBI NO: 15239913 NR Description: WRKY family transcription factor
  misc_feature (94)..(269): Homolog of NCBI NO: 34899462 NR Description: WRKY transcription factor-like protein
  misc_feature (93)..(275): Homolog of NCBI NO: 13236648 NR Description: putative DNA binding protein [Oryza sativa]
  misc_feature (1)..(119): Homolog of NCBI NO: 12597778 NR Description: hypothetical protein, 3' partial [Arabidopsis
  misc_feature (1)..(287): Homolog of NCBI NO: 15222282 NR Description: WRKY family transcription factor
MNDPDNPDLSNDDSAWRELTLTAQDSDFFDRDTSNILSDFGWNLHHSSDHPHSLRFDSDLTQTTGVKPTTVTSSCSSSAAVSVAVTSTNNNPSATSSSSEDPAENSTASAEKTPPPETPVKEKKKAQKRIRQPRFAFMTKSDVDNLEDGYRWRKYGQKAVKNSPFPRSYYRCTNSRCTVKKRVERSSDDPSIVITTYEGQHCHQTIGFPRGGILTAHDPHSFTSHHHLPPPLPNPYYYQELLHQLHRDNNAPSPRLPRPTTEDTPAVSTPSEEGLLGDIVPQTMRNP

SEQ ID NO: 46972 - DNA, 1208 bp, Arabidopsis thaliana
  misc_feature (1)..(1208): Ceres Seq. ID no. 13579031
  misc_feature: MA Experiment ID: 20000306 Result: Up-regulated in Transcription
  misc_feature: MA Experiment 20000306 PARAMETER Experiment Name: At_Germinating_Seeds_Sub_P Parameter: Age (hr) Value: 6 vs. 0
  misc_feature: MA Experiment 20000306 PARAMETER Experiment Name: At_Germinating_Seeds_Sub_P Parameter: Organism Value: A. thaliana
  misc_feature: MA Experiment 20000306 PARAMETER Experiment Name: At_Germinating_Seeds_Sub_P Parameter: Plant Line Value: WS
  misc_feature: MA Experiment 20000306 PARAMETER Experiment Name: At_Germinating_Seeds_Sub_P Parameter: Tissue Value: Germinating Seeds
  misc_feature: MA Experiment ID: 20000307 Result: Up-regulated in Transcription
  misc_feature: MA Experiment 20000307 PARAMETER Experiment Name: At_Germinating_Seeds_Sub_P Parameter: Age (hr) Value: 24 vs. 0
  misc_feature: MA Experiment 20000307 PARAMETER Experiment Name: At_Germinating_Seeds_Sub_P Parameter: Organism Value: A. thaliana
  misc_feature: MA Experiment 20000307 PARAMETER Experiment Name: At_Germinating_Seeds_Sub_P Parameter: Plant Line Value: WS
  misc_feature: MA Experiment 20000307 PARAMETER Experiment Name: At_Germinating_Seeds_Sub_P Parameter: Tissue Value: Germinating Seeds
  misc_feature: MA Experiment ID: 20000314 Result: Up-regulated in Transcription
  misc_feature: MA Experiment 20000314 PARAMETER Experiment Name: At_14day_Shoots-Roots_Sub_P Parameter: Age (day) Value: 14
  misc_feature: MA Experiment 20000314 PARAMETER Experiment Name: At_14day_Shoots-Roots_Sub_P Parameter: Organism Value: A. thaliana
  misc_feature: MA Experiment 20000314 PARAMETER Experiment Name: At_14day_Shoots-Roots_Sub_P Parameter: Plant Line Value: WS
  misc_feature: MA Experiment 20000314 PARAMETER Experiment Name: At_14day_Shoots-Roots_Sub_P Parameter: Tissue Value: Roots vs. Whole Plant
  misc_feature: MA Experiment ID: 20000327 Result: Down-regulated in Transcription
  misc_feature: MA Experiment 20000327 PARAMETER Experiment Name: At_42deg_Heat_Sub_P Parameter: Age (day) Value: 14
  misc_feature: MA Experiment 20000327 PARAMETER Experiment Name: At_42deg_Heat_Sub_P Parameter: Organism Value: A. thaliana
  misc_feature: MA Experiment 20000327 PARAMETER Experiment Name: At_42deg_Heat_Sub_P Parameter: Plant Line Value: WS
  misc_feature: MA Experiment 20000327 PARAMETER Experiment Name: At_42deg_Heat_Sub_P Parameter: Temperature (deg C) Value: 42 vs. 22
  misc_feature: MA Experiment 20000327 PARAMETER Experiment Name: At_42deg_Heat_Sub_P Parameter: Timepoint (hr) Value: 1
  misc_feature: MA Experiment 20000327 PARAMETER Experiment Name: At_42deg_Heat_Sub_P Parameter: Tissue Value: Aerial
  misc_feature: MA Experiment ID: 20000329 Result: Up-regulated in Transcription
  misc_feature: MA Experiment 20000329 PARAMETER Experiment Name: At_4deg_Cold_Sub_P Parameter: Age (day) Value: 14
  misc_feature: MA Experiment 20000329 PARAMETER Experiment Name: At_4deg_Cold_Sub_P Parameter: Organism Value: A. thaliana
  misc_feature: MA Experiment 20000329 PARAMETER Experiment Name: At_4deg_Cold_Sub_P Parameter: Plant Line Value: WS
  misc_feature: MA Experiment 20000329 PARAMETER Experiment Name: At_4deg_Cold_Sub_P Parameter: Temperature (deg C) Value: 4 vs. 22
  misc_feature: MA Experiment 20000329 PARAMETER Experiment Name: At_4deg_Cold_Sub_P Parameter: Timepoint (hr) Value: 6
  misc_feature: MA Experiment 20000329 PARAMETER Experiment Name: At_4deg_Cold_Sub_P Parameter: Tissue Value: Aerial
  misc_feature: MA Experiment ID: 20000347 Result: Up-regulated in Transcription
  misc_feature: MA Experiment 20000347 PARAMETER Experiment Name: At_2mM_SA_Sub_P Parameter: Age (day) Value: 14
  misc_feature: MA Experiment 20000347 PARAMETER Experiment Name: At_2mM_SA_Sub_P Parameter: Organism Value: A. thaliana
  misc_feature: MA Experiment 20000347 PARAMETER Experiment Name: At_2mM_SA_Sub_P Parameter: Plant Line Value: WS
  misc_feature: MA Experiment 20000347 PARAMETER Experiment Name: At_2mM_SA_Sub_P Parameter: Timepoint (hr) Value: 6
  misc_feature: MA Experiment 20000347 PARAMETER Experiment Name: At_2mM_SA_Sub_P Parameter: Tissue Value: Aerial
  misc_feature: MA Experiment 20000347 PARAMETER Experiment Name: At_2mM_SA_Sub_P Parameter: Treatment Value: 2mM SA vs. No Treatment
  misc_feature: MA Experiment ID: 20000355 Result: Down-regulated in Transcription
  misc_feature: MA Experiment 20000355 PARAMETER Experiment Name: At_Siliques_Sub_P Parameter: Age (day) Value: 21
  misc_feature: MA Experiment 20000355 PARAMETER Experiment Name: At_Siliques_Sub_P Parameter: Organism Value: A. thaliana
  misc_feature: MA Experiment 20000355 PARAMETER Experiment Name: At_Siliques_Sub_P Parameter: Plant Line Value: WS
  misc_feature: MA Experiment 20000355 PARAMETER Experiment Name: At_Siliques_Sub_P Parameter: Tissue Value: Less Than 5mm Siliques vs. Whole Plant
aaaagtcagcttaaagctctcgcatggcgtctcaagattgtcatatgttattgagcttctttatatctacttttttaatcactgtcgtgacctcgcaaactcgatgccgaaatttcaagtcgatcatcagtttcggcgactcgattactgatactggaaacttactcggcctctctagtcctaacgatcttcctgagtcagcctttccgccatacggagaaaccttcttccaccatccgtctggtcgtttctccgatggccgcctcatcatcgacttcattgctgaattcttagggattccacatgtgcctccgttttatggatctaaaaatggaaactttgagaaaggagttaattttgcggtgggaggagcaacagcactagaatgttctgttcttgaggagaaaggaactcattgttctcaaagcaatattagtttaggaaaccagcttaagagcttcaaagagagtttaccatatctttgtggctcctcatcaccagattgtagagatatgattgaaaatgcatttattctcattggagaaattggagggaatgattacaacttcccattatttgatcgcaagaacattgaggaagtcaaagagctggttccccttgtgatcactactatttcttcggcgatctcggagttggttgatatgggagcaagaacattcctagttcctggaaattttccacttggatgctctgtagcctatttgacgttatacgaaacaccaaacaaagaagaatacaatcctctaacaggatgtttgacatggctgaacgacttttcagtataccacaacgagcagcttcaagcagaactcaaaagacttaggaatctttaccctcatgtcaacatcatatatggtgactactacaatactctgttgcgccttatgcaagaaccatccaaattcgggctcatggacagacctttgcccgcttgttgcgggttaggaggaccatacaacttcacctttagtataaaatgtgggagtaaaggagttgaatattgtagtgatccttcgaagtatgtgaattgggacggcattcatatgactgaggctgcatacaaatggatatccgagggcgtactaacagggccatatgcgattcctcctttcaattggtcatgcctcgactctaagattaagaacaatgagtcattacacacacaatattctttgatgaacagctga

SEQ ID NO: 46973 - protein, 394 aa, Arabidopsis thaliana
  peptide (1)..(394): Ceres Seq. ID no. 13579032
  misc_feature (34)..(360): Pfam Name: GDSL-like Lipase/Acylhydrolase Pfam Description: GDSL-like Lipase/Acylhydrolase
  misc_feature (1)..(388): Homolog of NCBI NO: 10764858 NR Description: F1K23.17 [Arabidopsis thaliana]
  misc_feature (1)..(391): Homolog of NCBI NO: 15218731 NR Description: lipase, putative [Arabidopsis thaliana]
  misc_feature (1)..(391): Homolog of NCBI NO: 21593234 NR Description: lipase, putative [Arabidopsis thaliana]
  misc_feature (1)..(383): Homolog of NCBI NO: 12322540 NR Description: unknown protein [Arabidopsis thaliana]
  misc_feature (8)..(387): Homolog of NCBI NO: 15218725 NR Description: lipase, putative [Arabidopsis thaliana]
  misc_feature (9)..(394): Homolog of NCBI NO: 15218723 NR Description: lipase, putative [Arabidopsis thaliana]
  misc_feature (1)..(388): Homolog of NCBI NO: 15218728 NR Description: lipase, putative [Arabidopsis thaliana]
  misc_feature (1)..(388): Homolog of NCBI NO: 10764858 NR Description: F1K23.17 [Arabidopsis thaliana]
  misc_feature (1)..(387): Homolog of NCBI NO: 25336243 NR Description: pnrotein F1K23.16 [imported] - Arabidopsis
  misc_feature (1)..(394): Homolog of NCBI NO: 15225872 NR Description: lipase, putative [Arabidopsis thaliana]
MASQDCHMLLSFFISTFLITVVTSQTRCRNFKSIISFGDSITDTGNLLGLSSPNDLPESAFPPYGETFFHHPSGRFSDGRLIIDFIAEFLGIPHVPPFYGSKNGNFEKGVNFAVGGATALECSVLEEKGTHCSQSNISLGNQLKSFKESLPYLCGSSSPDCRDMIENAFILIGEIGGNDYNFPLFDRKNIEEVKELVPLVITTISSAISELVDMGARTFLVPGNFPLGCSVAYLTLYETPNKEEYNPLTGCLTWLNDFSVYHNEQLQAELKRLRNLYPHVNIIYGDYYNTLLRLMQEPSKFGLMDRPLPACCGLGGPYNFTFSIKCGSKGVEYCSDPSKYVNWDGIHMTEAAYKWISEGVLTGPYAIPPFNWSCLDSKIKNNESLHTQYSLMNS

SEQ ID NO: 46974 - protein, 387 aa, Arabidopsis thaliana
  peptide (1)..(387): Ceres Seq. ID no. 13579033
  misc_feature (27)..(353): Pfam Name: GDSL-like Lipase/Acylhydrolase Pfam Description: GDSL-like Lipase/Acylhydrolase
  misc_feature (1)..(381): Homolog of NCBI NO: 10764858 NR Description: F1K23.17 [Arabidopsis thaliana]
  misc_feature (1)..(384): Homolog of NCBI NO: 15218731 NR Description: lipase, putative [Arabidopsis thaliana]
  misc_feature (1)..(384): Homolog of NCBI NO: 21593234 NR Description: lipase, putative [Arabidopsis thaliana]
  misc_feature (1)..(376): Homolog of NCBI NO: 12322540 NR Description: unknown protein [Arabidopsis thaliana]
  misc_feature (1)..(380): Homolog of NCBI NO: 15218725 NR Description: lipase, putative [Arabidopsis thaliana]
  misc_feature (2)..(387): Homolog of NCBI NO: 15218723 NR Description: lipase, putative [Arabidopsis thaliana]
  misc_feature (1)..(381): Homolog of NCBI NO: 15218728 NR Description: lipase, putative [Arabidopsis thaliana]
  misc_feature (1)..(381): Homolog of NCBI NO: 10764858 NR Description: F1K23.17 [Arabidopsis thaliana]
  misc_feature (1)..(380): Homolog of NCBI NO: 25336243 NR Description: pnrotein F1K23.16 [imported] - Arabidopsis
  misc_feature (1)..(387): Homolog of NCBI NO: 15225872 NR Description: lipase, putative [Arabidopsis thaliana]
MLLSFFISTFLITVVTSQTRCRNFKSIISFGDSITDTGNLLGLSSPNDLPESAFPPYGETFFHHPSGRFSDGRLIIDFIAEFLGIPHVPPFYGSKNGNFEKGVNFAVGGATALECSVLEEKGTHCSQSNISLGNQLKSFKESLPYLCGSSSPDCRDMIENAFILIGEIGGNDYNFPLFDRKNIEEVKELVPLVITTISSAISELVDMGARTFLVPGNFPLGCSVAYLTLYETPNKEEYNPLTGCLTWLNDFSVYHNEQLQAELKRLRNLYPHVNIIYGDYYNTLLRLMQEPSKFGLMDRPLPACCGLGGPYNFTFSIKCGSKGVEYCSDPSKYVNWDGIHMTEAAYKWISEGVLTGPYAIPPFNWSCLDSKIKNNESLHTQYSLMNS

SEQ ID NO: 46975 - protein, 231 aa, Arabidopsis thaliana
  peptide (1)..(231): Ceres Seq. ID no. 13579034
  misc_feature (1)..(197): Pfam Name: GDSL-like Lipase/Acylhydrolase Pfam Description: GDSL-like Lipase/Acylhydrolase
  misc_feature (1)..(225): Homolog of NCBI NO: 10764858 NR Description: F1K23.17 [Arabidopsis thaliana]
  misc_feature (1)..(228): Homolog of NCBI NO: 15218731 NR Description: lipase, putative [Arabidopsis thaliana]
  misc_feature (1)..(228): Homolog of NCBI NO: 21593234 NR Description: lipase, putative [Arabidopsis thaliana]
  misc_feature (1)..(220): Homolog of NCBI NO: 12322540 NR Description: unknown protein [Arabidopsis thaliana]
  misc_feature (1)..(224): Homolog of NCBI NO: 15218725 NR Description: lipase, putative [Arabidopsis thaliana]
  misc_feature (1)..(231): Homolog of NCBI NO: 15218723 NR Description: lipase, putative [Arabidopsis thaliana]
  misc_feature (1)..(225): Homolog of NCBI NO: 15218728 NR Description: lipase, putative [Arabidopsis thaliana]
  misc_feature (1)..(225): Homolog of NCBI NO: 10764858 NR Description: F1K23.17 [Arabidopsis thaliana]
  misc_feature (1)..(224): Homolog of NCBI NO: 25336243 NR Description: pnrotein F1K23.16 [imported] - Arabidopsis
  misc_feature (1)..(231): Homolog of NCBI NO: 15225872 NR Description: lipase, putative [Arabidopsis thaliana]
MIENAFILIGEIGGNDYNFPLFDRKNIEEVKELVPLVITTISSAISELVDMGARTFLVPGNFPLGCSVAYLTLYETPNKEEYNPLTGCLTWLNDFSVYHNEQLQAELKRLRNLYPHVNIIYGDYYNTLLRLMQEPSKFGLMDRPLPACCGLGGPYNFTFSIKCGSKGVEYCSDPSKYVNWDGIHMTEAAYKWISEGVLTGPYAIPPFNWSCLDSKIKNNESLHTQYSLMNS

SEQ ID NO: 46976 - DNA, 2468 bp, Arabidopsis thaliana
  misc_feature (1)..(2468): Ceres Seq. ID no. 12600639
  misc_feature: MA Experiment ID: 20000171 Result: Down-regulated in Transcription
  misc_feature: MA Experiment 20000171 PARAMETER Experiment Name: At_42deg_Heat_P Parameter: Age (day) Value: 14
  misc_feature: MA Experiment 20000171 PARAMETER Experiment Name: At_42deg_Heat_P Parameter: Organism Value: A. thaliana
  misc_feature: MA Experiment 20000171 PARAMETER Experiment Name: At_42deg_Heat_P Parameter: Plant Line Value: WS
  misc_feature: MA Experiment 20000171 PARAMETER Experiment Name: At_42deg_Heat_P Parameter: Temperature (deg C) Value: 42 vs. 22
  misc_feature: MA Experiment 20000171 PARAMETER Experiment Name: At_42deg_Heat_P Parameter: Timepoint (hr) Value: 1
  misc_feature: MA Experiment 20000171 PARAMETER Experiment Name: At_42deg_Heat_P Parameter: Tissue Value: Aerial
  misc_feature: MA Experiment ID: 20000173 Result: Down-regulated in Transcription
  misc_feature: MA Experiment 20000173 PARAMETER Experiment Name: At_42deg_Heat_P Parameter: Age (day) Value: 14
  misc_feature: MA Experiment 20000173 PARAMETER Experiment Name: At_42deg_Heat_P Parameter: Organism Value: A. thaliana
  misc_feature: MA Experiment 20000173 PARAMETER Experiment Name: At_42deg_Heat_P Parameter: Plant Line Value: WS
  misc_feature: MA Experiment 20000173 PARAMETER Experiment Name: At_42deg_Heat_P Parameter: Temperature (deg C) Value: 42 vs. 22
  misc_feature: MA Experiment 20000173 PARAMETER Experiment Name: At_42deg_Heat_P Parameter: Timepoint (hr) Value: 6
  misc_feature: MA Experiment 20000173 PARAMETER Experiment Name: At_42deg_Heat_P Parameter: Tissue Value: Aerial
  misc_feature: MA Experiment ID: 20000179 Result: Up-regulated in Transcription
  misc_feature: MA Experiment 20000179 PARAMETER Experiment Name: At_Germinating_Seeds_P Parameter: Age (hr) Value: 6 vs. 0
  misc_feature: MA Experiment 20000179 PARAMETER Experiment Name: At_Germinating_Seeds_P Parameter: Tissue Value: Germinating Seeds
  misc_feature: MA Experiment ID: 20000180 Result: Up-regulated in Transcription
  misc_feature: MA Experiment 20000180 PARAMETER Experiment Name: At_Germinating_Seeds_P Parameter: Age (hr) Value: 24 vs. 0
  misc_feature: MA Experiment 20000180 PARAMETER Experiment Name: At_Germinating_Seeds_P Parameter: Tissue Value: Germinating Seeds
  misc_feature: MA Experiment ID: 20000234 Result: Down-regulated in Transcription
  misc_feature: MA Experiment 20000234 PARAMETER Experiment Name: At_Siliques_P Parameter: Age (day) Value: 21
  misc_feature: MA Experiment 20000234 PARAMETER Experiment Name: At_Siliques_P Parameter: Organism Value: A. thaliana
  misc_feature: MA Experiment 20000234 PARAMETER Experiment Name: At_Siliques_P Parameter: Plant Line Value: WS
  misc_feature: MA Experiment 20000234 PARAMETER Experiment Name: At_Siliques_P Parameter: Tissue Value: Less Than 5mm Siliques vs. Whole Plant
  misc_feature: MA Experiment ID: 20000264 Result: Down-regulated in Transcription
  misc_feature: MA Experiment 20000264 PARAMETER Experiment Name: At_Open_Flower_P Parameter: Age (day) Value: 21
  misc_feature: MA Experiment 20000264 PARAMETER Experiment Name: At_Open_Flower_P Parameter: Plant Line Value: WS
  misc_feature: MA Experiment 20000264 PARAMETER Experiment Name: At_Open_Flower_P Parameter: Tissue Value: Open Flower vs. Whole Plant
  misc_feature: MA Experiment ID: 20000265 Result: Down-regulated in Transcription
  misc_feature: MA Experiment 20000265 PARAMETER Experiment Name: At_Open_Flower_P Parameter: Age (day) Value: 21
  misc_feature: MA Experiment 20000265 PARAMETER Experiment Name: At_Open_Flower_P Parameter: Plant Line Value: WS
  misc_feature: MA Experiment 20000265 PARAMETER Experiment Name: At_Open_Flower_P Parameter: Tissue Value: Closed Flower vs. Whole Plant
  misc_feature: MA Experiment ID: 20000437 Result: Down-regulated in Transcription
  misc_feature: MA Experiment 20000437 PARAMETER Experiment Name: At_Drought_P Parameter: Age (day) Value: 8
  misc_feature: MA Experiment 20000437 PARAMETER Experiment Name: At_Drought_P Parameter: Organism Value: A. thaliana
  misc_feature: MA Experiment 20000437 PARAMETER Experiment Name: At_Drought_P Parameter: Plant Line Value: WS
  misc_feature: MA Experiment 20000437 PARAMETER Experiment Name: At_Drought_P Parameter: Timepoint (hr) Value: 24
  misc_feature: MA Experiment 20000437 PARAMETER Experiment Name: At_Drought_P Parameter: Tissue Value: Whole Plant
  misc_feature: MA Experiment 20000437 PARAMETER Experiment Name: At_Drought_P Parameter: Treatment Value: Drought vs. No Drought
  misc_feature: MA Experiment ID: 20000439 Result: Down-regulated in Transcription
  misc_feature: MA Experiment 20000439 PARAMETER Experiment Name: At_Roots__P Parameter: Age (day) Value: 14 vs. 21
  misc_feature: MA Experiment 20000439 PARAMETER Experiment Name: At_Roots__P Parameter: Organism Value: A. thaliana
  misc_feature: MA Experiment 20000439 PARAMETER Experiment Name: At_Roots__P Parameter: Tissue Value: Roots vs. Whole Plant
  misc_feature: MA Experiment ID: 20000460 Result: Up-regulated in Transcription
  misc_feature: MA Experiment 20000460 PARAMETER Experiment Name: At_10percent_PEG_P Parameter: Age (day) Value: 12
  misc_feature: MA Experiment 20000460 PARAMETER Experiment Name: At_10percent_PEG_P Parameter: Organism Value: A. thaliana
  misc_feature: MA Experiment 20000460 PARAMETER Experiment Name: At_10percent_PEG_P Parameter: Plant Line Value: WS
  misc_feature: MA Experiment 20000460 PARAMETER Experiment Name: At_10percent_PEG_P Parameter: Timepoint (day) Value: 12
  misc_feature: MA Experiment 20000460 PARAMETER Experiment Name: At_10percent_PEG_P Parameter: Tissue Value: Whole Plant
  misc_feature: MA Experiment 20000460 PARAMETER Experiment Name: At_10percent_PEG_P Parameter: Treatment Value: 10percent PEG vs. No Treatment
  misc_feature: MA Experiment ID: 20000794 Result: Down-regulated in Transcription
  misc_feature: MA Experiment 20000794 PARAMETER Experiment Name: At_Petals_P Parameter: Age (day) Value: 23-25 days
  misc_feature: MA Experiment 20000794 PARAMETER Experiment Name: At_Petals_P Parameter: Plant Line Value: WS
  misc_feature: MA Experiment 20000794 PARAMETER Experiment Name: At_Petals_P Parameter: Tissue Value: Petals vs. Whole plant
  misc_feature: MA Experiment ID: 20001247 Result: Up-regulated in Transcription
  misc_feature: MA Experiment 20001247 PARAMETER Experiment Name: At_Far-red-induction_P Parameter: Age (day) Value: 7
  misc_feature: MA Experiment 20001247 PARAMETER Experiment Name: At_Far-red-induction_P Parameter: Light Value: Far-red vs. White
  misc_feature: MA Experiment 20001247 PARAMETER Experiment Name: At_Far-red-induction_P Parameter: Organism Value: A. thaliana
  misc_feature: MA Experiment 20001247 PARAMETER Experiment Name: At_Far-red-induction_P Parameter: Plant Line Value: Columbia
  misc_feature: MA Experiment 20001247 PARAMETER Experiment Name: At_Far-red-induction_P Parameter: Timepoint (hr) Value: 1
  misc_feature: MA Experiment 20001247 PARAMETER Experiment Name: At_Far-red-induction_P Parameter: Tissue Value: Whole Plant
  misc_feature: MA Experiment ID: 20001554 Result: Down-regulated in Transcription
  misc_feature: MA Experiment 20001554 PARAMETER Experiment Name: At_Drought_Soil_Dry_P Parameter: Age (day) Value: 21
  misc_feature: MA Experiment 20001554 PARAMETER Experiment Name: At_Drought_Soil_Dry_P Parameter: Organism Value: A. thaliana
  misc_feature: MA Experiment 20001554 PARAMETER Experiment Name: At_Drought_Soil_Dry_P Parameter: Plant Line Value: WS
  misc_feature: MA Experiment 20001554 PARAMETER Experiment Name: At_Drought_Soil_Dry_P Parameter: Post Timepoint (hr) Value: None
  misc_feature: MA Experiment 20001554 PARAMETER Experiment Name: At_Drought_Soil_Dry_P Parameter: Post-Treatment Value: None
  misc_feature: MA Experiment 20001554 PARAMETER Experiment Name: At_Drought_Soil_Dry_P Parameter: Timepoint (day) Value: 7
  misc_feature: MA Experiment 20001554 PARAMETER Experiment Name: At_Drought_Soil_Dry_P Parameter: Treatment Value: Drought vs. No Drought
  misc_feature: MA Experiment ID: 20001555 Result: Down-regulated in Transcription
  misc_feature: MA Experiment 20001555 PARAMETER Experiment Name: At_Drought_Soil_Dry_P Parameter: Age (day) Value: 24
  misc_feature: MA Experiment 20001555 PARAMETER Experiment Name: At_Drought_Soil_Dry_P Parameter: Organism Value: A. thaliana
  misc_feature: MA Experiment 20001555 PARAMETER Experiment Name: At_Drought_Soil_Dry_P Parameter: Plant Line Value: WS
  misc_feature: MA Experiment 20001555 PARAMETER Experiment Name: At_Drought_Soil_Dry_P Parameter: Post Timepoint (hr) Value: None
  misc_feature: MA Experiment 20001555 PARAMETER Experiment Name: At_Drought_Soil_Dry_P Parameter: Post-Treatment Value: None
  misc_feature: MA Experiment 20001555 PARAMETER Experiment Name: At_Drought_Soil_Dry_P Parameter: Timepoint (day) Value: 10
  misc_feature: MA Experiment 20001555 PARAMETER Experiment Name: At_Drought_Soil_Dry_P Parameter: Treatment Value: Drought vs. No Drought
  misc_feature: MA Experiment ID: 20001556 Result: Down-regulated in Transcription
  misc_feature: MA Experiment 20001556 PARAMETER Experiment Name: At_Drought_Soil_Dry_P Parameter: Age (day) Value: 26
  misc_feature: MA Experiment 20001556 PARAMETER Experiment Name: At_Drought_Soil_Dry_P Parameter: Organism Value: A. thaliana
  misc_feature: MA Experiment 20001556 PARAMETER Experiment Name: At_Drought_Soil_Dry_P Parameter: Plant Line Value: WS
  misc_feature: MA Experiment 20001556 PARAMETER Experiment Name: At_Drought_Soil_Dry_P Parameter: Post Timepoint (hr) Value: None
  misc_feature: MA Experiment 20001556 PARAMETER Experiment Name: At_Drought_Soil_Dry_P Parameter: Post-Treatment Value: None
  misc_feature: MA Experiment 20001556 PARAMETER Experiment Name: At_Drought_Soil_Dry_P Parameter: Timepoint (day) Value: 12
  misc_feature: MA Experiment 20001556 PARAMETER Experiment Name: At_Drought_Soil_Dry_P Parameter: Treatment Value: Drought vs. No Drought
  misc_feature: MA Experiment ID: 20001557 Result: Up-regulated in Transcription
  misc_feature: MA Experiment 20001557 PARAMETER Experiment Name: At_Drought_Soil_Dry_P Parameter: Age (day) Value: 27
  misc_feature: MA Experiment 20001557 PARAMETER Experiment Name: At_Drought_Soil_Dry_P Parameter: Organism Value: A. thaliana
  misc_feature: MA Experiment 20001557 PARAMETER Experiment Name: At_Drought_Soil_Dry_P Parameter: Plant Line Value: WS
  misc_feature: MA Experiment 20001557 PARAMETER Experiment Name: At_Drought_Soil_Dry_P Parameter: Post Timepoint (hr) Value: 3
  misc_feature: MA Experiment 20001557 PARAMETER Experiment Name: At_Drought_Soil_Dry_P Parameter: Post-Treatment Value: Re-Water vs. No Drought
  misc_feature: MA Experiment 20001557 PARAMETER Experiment Name: At_Drought_Soil_Dry_P Parameter: Timepoint (day) Value: 13
  misc_feature: MA Experiment 20001557 PARAMETER Experiment Name: At_Drought_Soil_Dry_P Parameter: Treatment Value: Drought vs. No Drought
  misc_feature: MA Experiment ID: 20001560 Result: Up-regulated in Transcription
  misc_feature: MA Experiment 20001560 PARAMETER Experiment Name: At_Drought_Soil_Dry_P Parameter: Age (day) Value: 28
  misc_feature: MA Experiment 20001560 PARAMETER Experiment Name: At_Drought_Soil_Dry_P Parameter: Organism Value: A. thaliana
  misc_feature: MA Experiment 20001560 PARAMETER Experiment Name: At_Drought_Soil_Dry_P Parameter: Plant Line Value: WS
  misc_feature: MA Experiment 20001560 PARAMETER Experiment Name: At_Drought_Soil_Dry_P Parameter: Post Timepoint (hr) Value: None
  misc_feature: MA Experiment 20001560 PARAMETER Experiment Name: At_Drought_Soil_Dry_P Parameter: Post-Treatment Value: None
  misc_feature: MA Experiment 20001560 PARAMETER Experiment Name: At_Drought_Soil_Dry_P Parameter: Timepoint (day) Value: 14
  misc_feature: MA Experiment 20001560 PARAMETER Experiment Name: At_Drought_Soil_Dry_P Parameter: Treatment Value: Drought vs. No Drought
  misc_feature: MA Experiment ID: 20001904 Result: Down-regulated in Transcription
  misc_feature: MA Experiment 20001904 PARAMETER Experiment Name: At_Drought_Reproduction_P Parameter: Age (day) Value: 37
  misc_feature: MA Experiment 20001904 PARAMETER Experiment Name: At_Drought_Reproduction_P Parameter: Organism Value: A. thaliana
  misc_feature: MA Experiment 20001904 PARAMETER Experiment Name: At_Drought_Reproduction_P Parameter: Plant Line Value: WS
  misc_feature: MA Experiment 20001904 PARAMETER Experiment Name: At_Drought_Reproduction_P Parameter: Timepoint (day) Value: 7
  misc_feature: MA Experiment 20001904 PARAMETER Experiment Name: At_Drought_Reproduction_P Parameter: Tissue Value: Rosettes
  misc_feature: MA Experiment 20001904 PARAMETER Experiment Name: At_Drought_Reproduction_P Parameter: Treatment Value: Drought vs. No Drought
  misc_feature: MA Experiment ID: 20001906 Result: Down-regulated in Transcription
  misc_feature: MA Experiment 20001906 PARAMETER Experiment Name: At_Drought_Reproduction_P Parameter: Age (day) Value: 35
  misc_feature: MA Experiment 20001906 PARAMETER Experiment Name: At_Drought_Reproduction_P Parameter: Organism Value: A. thaliana
  misc_feature: MA Experiment 20001906 PARAMETER Experiment Name: At_Drought_Reproduction_P Parameter: Plant Line Value: WS
  misc_feature: MA Experiment 20001906 PARAMETER Experiment Name: At_Drought_Reproduction_P Parameter: Timepoint (day) Value: 5
  misc_feature: MA Experiment 20001906 PARAMETER Experiment Name: At_Drought_Reproduction_P Parameter: Tissue Value: Siliques
  misc_feature: MA Experiment 20001906 PARAMETER Experiment Name: At_Drought_Reproduction_P Parameter: Treatment Value: Drought vs. No Drought
  misc_feature: MA Experiment ID: 20001911 Result: Down-regulated in Transcription
  misc_feature: MA Experiment 20001911 PARAMETER Experiment Name: At_Drought_Reproduction_P Parameter: Age (day) Value: 40
  misc_feature: MA Experiment 20001911 PARAMETER Experiment Name: At_Drought_Reproduction_P Parameter: Organism Value: A. thaliana
  misc_feature: MA Experiment 20001911 PARAMETER Experiment Name: At_Drought_Reproduction_P Parameter: Plant Line Value: WS
  misc_feature: MA Experiment 20001911 PARAMETER Experiment Name: At_Drought_Reproduction_P Parameter: Timepoint (day) Value: 10
  misc_feature: MA Experiment 20001911 PARAMETER Experiment Name: At_Drought_Reproduction_P Parameter: Tissue Value: Flowers
  misc_feature: MA Experiment 20001911 PARAMETER Experiment Name: At_Drought_Reproduction_P Parameter: Treatment Value: Drought vs. No Drought
agttggttcacttcagcacatgatcctcgtctctctttctttctctctctcaatcacaagtttcagttacacagctgaacccaaagtatctcacattctgatctaatcagaacactgttttgtctgtgtaacataaacaaacgatcctgtttttatggaaaatttaatgaaacagtgacgattcttctacacttctttataatgacaaacatttcatagtaccaaaatacacaaataccttttctttattcttctcacccttctctgtttctttatcattcatggctccaaattcagtagcagtgacaatggagaagccagacaacttctctttactagagatcaacggctcagatccatcctcattccccgacaaacgtaaatccatcagtccaaaacaattctcatggttccttcttctcaaagctcatagactcatctcgtgtctctcgtggctagtctcttcggttaaaaagcgaatcgcgttctccgcgaagaacattaacgaagaagaagatcctaaaagcagaggaaaacaaatgtacagattcatcaaagcttgtcttgtcatctccattattgccttgtccatagaaatcgttgcacatttcaagaaatggaatcttgatctcattaaccgaccgtcttgggaggtttacgggcttgtcgaatggtcgtacatggcttggctctcgtttcgatccgattacatcgctcctcttgtcatcagtctctccagattctgcactgtactctttttgattcagtctcttgatcggttagtcctctgtctcggttgcttttggatcaaatttaaaaagatcgaacctaagctcaccgaagaatctatcgatttagaagacccctccagtttcccaatggtccttattcagatcccaatgtgcaacgaacgagaggtgtatgaacaatcaataggagcagcttcacaacttgattggccaaaagataggatcttaattcaagtattagatgattcagacgatccaaatttacagcttttgatcaaagaagaagtatcggtttgggccgaaaaaggcgtaaacataatttacaggcataggttgatcagaactggttacaaagctggcaatttgaaatcagccatgacttgtgattacgttaaagattacgagtttgtgactatcttcgacgcagatttcacaccaaatcctgatttcctcaagaagactgttcctcatttcaagggtaatccagagctagggttggtccaagcaaggtggtcatttgtgaacaaagatgagaatctcctcacgaggctacaaaacataaacttatgtttccacttcgaagtagaacaacaagtgaacggtgtgtttctcaatttcttcggattcaatggaaccgctggagtatggaggatcaaggcattggaagaatccggcggatggctcgagagaaccaccgtggaagatatggatatcgcggttagagcgcatctcaacggctggaagtttatttaccttaatgatgttgaagtcacttgcgagttgccagagtcttatgaagcttacaagaagcaacaacatcgttggcattccggtcctatgcagctgttccggttatgccttccttcaattatcaaatcaaagatatcggtttggaagaaggcgaatttgatcttccttttctttcttctaaggaagcttattctaccattttactcattcacactcttttgcattatacttccattgacaatgttcatacccgaagccgagcttccgttgtggatcatctgctatgttcctatcttcatttcgcttctcaacattctcccgtcacctaaatctttccctttcttagtcccttaccttcttttcgaaaacacaatgtcaataaccaagttcaacgccatgatctccgggctgtttcagtttggatcggcttacgagtgggttgtgacgaagaaaaccgggagatcatcggagtccgatttgctagcgtttgctgaaaaggaagagaagttgcataggagaaactcggagtcaggtttggagcttctgagcaaacttaaggagcaagagacaaatcttgtagggcaagaaaccgtgaagaagagccttggagggctaatgaggccgaagaacaagaagaagacgaacatggtgttcaagaaagagctcgggcttgcgttcttgctgctaaccgcagctgcaaggagctttctatcggcgcacggtcttcacttctactttttgttgtttcagggactgtctttcttggttgtagggttggatttgatcggagaacagatcagctagacacacacaaaaccaagacagagaacaaggaaaaaaataccgtttatattcactatttttttgtttgttttttaaattcttttccctttttatatgtgggttttatacataattttcaagaacttataatgtccagtttcagataaatgaattgaaacgaatttg

SEQ ID NO: 46977 - protein, 673 aa, Arabidopsis thaliana
  peptide (1)..(673): Ceres Seq. ID no. 12600640
  misc_feature (202)..(377): Pfam Name: Glycosyl transferase Pfam Description: Glycosyl transferase
  misc_feature (78)..(590): Homolog of NCBI NO: 16974749 NR Description: CSLC9 [Oryza sativa]
  misc_feature (6)..(672): Homolog of NCBI NO: 28201308 NR Description: putative CSLC9(cellulose synthase-like)
  misc_feature (6)..(672): Homolog of NCBI NO: 34419218 NR Description: TPA: cellulose synthase-like C2
  misc_feature (6)..(114): Homolog of NCBI NO: 15235900 NR Description: putative glucosyltransferase
  misc_feature (54)..(672): Homolog of NCBI NO: 15235900 NR Description: putative glucosyltransferase
  misc_feature (83)..(673): Homolog of NCBI NO: 7635490 NR Description: putative glucosyltransferase [Cicer arietinum]
  misc_feature (6)..(114): Homolog of NCBI NO: 34419220 NR Description: TPA: cellulose synthase-like C3
  misc_feature (124)..(673): Homolog of NCBI NO: 34419220 NR Description: TPA: cellulose synthase-like C3
  misc_feature (6)..(673): Homolog of NCBI NO: 15224178 NR Description: putative glucosyltransferase; protein id:
  misc_feature (6)..(673): Homolog of NCBI NO: 15236004 NR Description: putative protein; protein id: At4g31590.1
MAPNSVAVTMEKPDNFSLLEINGSDPSSFPDKRKSISPKQFSWFLLLKAHRLISCLSWLVSSVKKRIAFSAKNINEEEDPKSRGKQMYRFIKACLVISIIALSIEIVAHFKKWNLDLINRPSWEVYGLVEWSYMAWLSFRSDYIAPLVISLSRFCTVLFLIQSLDRLVLCLGCFWIKFKKIEPKLTEESIDLEDPSSFPMVLIQIPMCNEREVYEQSIGAASQLDWPKDRILIQVLDDSDDPNLQLLIKEEVSVWAEKGVNIIYRHRLIRTGYKAGNLKSAMTCDYVKDYEFVTIFDADFTPNPDFLKKTVPHFKGNPELGLVQARWSFVNKDENLLTRLQNINLCFHFEVEQQVNGVFLNFFGFNGTAGVWRIKALEESGGWLERTTVEDMDIAVRAHLNGWKFIYLNDVEVTCELPESYEAYKKQQHRWHSGPMQLFRLCLPSIIKSKISVWKKANLIFLFFLLRKLILPFYSFTLFCIILPLTMFIPEAELPLWIICYVPIFISLLNILPSPKSFPFLVPYLLFENTMSITKFNAMISGLFQFGSAYEWVVTKKTGRSSESDLLAFAEKEEKLHRRNSESGLELLSKLKEQETNLVGQETVKKSLGGLMRPKNKKKTNMVFKKELGLAFLLLTAAARSFLSAHGLHFYFLLFQGLSFLVVGLDLIGEQIS

SEQ ID NO: 46978 - protein, 664 aa, Arabidopsis thaliana
  peptide (1)..(664): Ceres Seq. ID no. 12600641
  misc_feature (193)..(368): Pfam Name: Glycosyl transferase Pfam Description: Glycosyl transferase
  misc_feature (69)..(581): Homolog of NCBI NO: 16974749 NR Description: CSLC9 [Oryza sativa]
  misc_feature (1)..(663): Homolog of NCBI NO: 28201308 NR Description: putative CSLC9(cellulose synthase-like)
  misc_feature (1)..(663): Homolog of NCBI NO: 34419218 NR Description: TPA: cellulose synthase-like C2
  misc_feature (1)..(105): Homolog of NCBI NO: 15235900 NR Description: putative glucosyltransferase
  misc_feature (45)..(663): Homolog of NCBI NO: 15235900 NR Description: putative glucosyltransferase
  misc_feature (74)..(664): Homolog of NCBI NO: 7635490 NR Description: putative glucosyltransferase [Cicer arietinum]
  misc_feature (1)..(105): Homolog of NCBI NO: 34419220 NR Description: TPA: cellulose synthase-like C3
  misc_feature (115)..(664): Homolog of NCBI NO: 34419220 NR Description: TPA: cellulose synthase-like C3
  misc_feature (1)..(664): Homolog of NCBI NO: 15224178 NR Description: putative glucosyltransferase; protein id:
  misc_feature (1)..(664): Homolog of NCBI NO: 15236004 NR Description: putative protein; protein id: At4g31590.1
MEKPDNFSLLEINGSDPSSFPDKRKSISPKQFSWFLLLKAHRLISCLSWLVSSVKKRIAFSAKNINEEEDPKSRGKQMYRFIKACLVISIIALSIEIVAHFKKWNLDLINRPSWEVYGLVEWSYMAWLSFRSDYIAPLVISLSRFCTVLFLIQSLDRLVLCLGCFWIKFKKIEPKLTEESIDLEDPSSFPMVLIQIPMCNEREVYEQSIGAASQLDWPKDRILIQVLDDSDDPNLQLLIKEEVSVWAEKGVNIIYRHRLIRTGYKAGNLKSAMTCDYVKDYEFVTIFDADFTPNPDFLKKTVPHFKGNPELGLVQARWSFVNKDENLLTRLQNINLCFHFEVEQQVNGVFLNFFGFNGTAGVWRIKALEESGGWLERTTVEDMDIAVRAHLNGWKFIYLNDVEVTCELPESYEAYKKQQHRWHSGPMQLFRLCLPSIIKSKISVWKKANLIFLFFLLRKLILPFYSFTLFCIILPLTMFIPEAELPLWIICYVPIFISLLNILPSPKSFPFLVPYLLFENTMSITKFNAMISGLFQFGSAYEWVVTKKTGRSSESDLLAFAEKEEKLHRRNSESGLELLSKLKEQETNLVGQETVKKSLGGLMRPKNKKKTNMVFKKELGLAFLLLTAAARSFLSAHGLHFYFLLFQGLSFLVVGLDLIGEQIS

SEQ ID NO: 46979 - protein, 587 aa, Arabidopsis thaliana
  peptide (1)..(587): Ceres Seq. ID no. 12600642
  misc_feature (116)..(291): Pfam Name: Glycosyl transferase Pfam Description: Glycosyl transferase
  misc_feature (1)..(504): Homolog of NCBI NO: 16974749 NR Description: CSLC9 [Oryza sativa]
  misc_feature (1)..(586): Homolog of NCBI NO: 28201308 NR Description: putative CSLC9(cellulose synthase-like)
  misc_feature (1)..(586): Homolog of NCBI NO: 34419218 NR Description: TPA: cellulose synthase-like C2
  misc_feature (1)..(28): Homolog of NCBI NO: 15235900 NR Description: putative glucosyltransferase
  misc_feature (1)..(586): Homolog of NCBI NO: 15235900 NR Description: putative glucosyltransferase
  misc_feature (1)..(587): Homolog of NCBI NO: 7635490 NR Description: putative glucosyltransferase [Cicer arietinum]
  misc_feature (1)..(28): Homolog of NCBI NO: 34419220 NR Description: TPA: cellulose synthase-like C3
  misc_feature (38)..(587): Homolog of NCBI NO: 34419220 NR Description: TPA: cellulose synthase-like C3
  misc_feature (1)..(587): Homolog of NCBI NO: 15224178 NR Description: putative glucosyltransferase; protein id:
  misc_feature (1)..(587): Homolog of NCBI NO: 15236004 NR Description: putative protein; protein id: At4g31590.1
MYRFIKACLVISIIALSIEIVAHFKKWNLDLINRPSWEVYGLVEWSYMAWLSFRSDYIAPLVISLSRFCTVLFLIQSLDRLVLCLGCFWIKFKKIEPKLTEESIDLEDPSSFPMVLIQIPMCNEREVYEQSIGAASQLDWPKDRILIQVLDDSDDPNLQLLIKEEVSVWAEKGVNIIYRHRLIRTGYKAGNLKSAMTCDYVKDYEFVTIFDADFTPNPDFLKKTVPHFKGNPELGLVQARWSFVNKDENLLTRLQNINLCFHFEVEQQVNGVFLNFFGFNGTAGVWRIKALEESGGWLERTTVEDMDIAVRAHLNGWKFIYLNDVEVTCELPESYEAYKKQQHRWHSGPMQLFRLCLPSIIKSKISVWKKANLIFLFFLLRKLILPFYSFTLFCIILPLTMFIPEAELPLWIICYVPIFISLLNILPSPKSFPFLVPYLLFENTMSITKFNAMISGLFQFGSAYEWVVTKKTGRSSESDLLAFAEKEEKLHRRNSESGLELLSKLKEQETNLVGQETVKKSLGGLMRPKNKKKTNMVFKKELGLAFLLLTAAARSFLSAHGLHFYFLLFQGLSFLVVGLDLIGEQIS

SEQ ID NO: 46980 - DNA, 2895 bp, Arabidopsis thaliana
  misc_feature (1)..(2895): Ceres Seq. ID no. 13579276
  misc_feature: MA Experiment ID: 20000307 Result: Down-regulated in Transcription
  misc_feature: MA Experiment 20000307 PARAMETER Experiment Name: At_Germinating_Seeds_Sub_P Parameter: Age (hr) Value: 24 vs. 0
  misc_feature: MA Experiment 20000307 PARAMETER Experiment Name: At_Germinating_Seeds_Sub_P Parameter: Organism Value: A. thaliana
  misc_feature: MA Experiment 20000307 PARAMETER Experiment Name: At_Germinating_Seeds_Sub_P Parameter: Plant Line Value: WS
  misc_feature: MA Experiment 20000307 PARAMETER Experiment Name: At_Germinating_Seeds_Sub_P Parameter: Tissue Value: Germinating Seeds
  misc_feature: MA Experiment ID: 20000315 Result: Down-regulated in Transcription
  misc_feature: MA Experiment 20000315 PARAMETER Experiment Name: At_14day_Shoots-Roots_Sub_P Parameter: Age (day) Value: 14
  misc_feature: MA Experiment 20000315 PARAMETER Experiment Name: At_14day_Shoots-Roots_Sub_P Parameter: Organism Value: A. thaliana
  misc_feature: MA Experiment 20000315 PARAMETER Experiment Name: At_14day_Shoots-Roots_Sub_P Parameter: Plant Line Value: WS
  misc_feature: MA Experiment 20000315 PARAMETER Experiment Name: At_14day_Shoots-Roots_Sub_P Parameter: Tissue Value: Shoots vs. Whole Plant
  misc_feature: MA Experiment ID: 20000327 Result: Down-regulated in Transcription
  misc_feature: MA Experiment 20000327 PARAMETER Experiment Name: At_42deg_Heat_Sub_P Parameter: Age (day) Value: 14
  misc_feature: MA Experiment 20000327 PARAMETER Experiment Name: At_42deg_Heat_Sub_P Parameter: Organism Value: A. thaliana
  misc_feature: MA Experiment 20000327 PARAMETER Experiment Name: At_42deg_Heat_Sub_P Parameter: Plant Line Value: WS
  misc_feature: MA Experiment 20000327 PARAMETER Experiment Name: At_42deg_Heat_Sub_P Parameter: Temperature (deg C) Value: 42 vs. 22
  misc_feature: MA Experiment 20000327 PARAMETER Experiment Name: At_42deg_Heat_Sub_P Parameter: Timepoint (hr) Value: 1
  misc_feature: MA Experiment 20000327 PARAMETER Experiment Name: At_42deg_Heat_Sub_P Parameter: Tissue Value: Aerial
  misc_feature: MA Experiment ID: 20000328 Result: Down-regulated in Transcription
  misc_feature: MA Experiment 20000328 PARAMETER Experiment Name: At_42deg_Heat_Sub_P Parameter: Age (day) Value: 14
  misc_feature: MA Experiment 20000328 PARAMETER Experiment Name: At_42deg_Heat_Sub_P Parameter: Organism Value: A. thaliana
  misc_feature: MA Experiment 20000328 PARAMETER Experiment Name: At_42deg_Heat_Sub_P Parameter: Plant Line Value: WS
  misc_feature: MA Experiment 20000328 PARAMETER Experiment Name: At_42deg_Heat_Sub_P Parameter: Temperature (deg C) Value: 42 vs. 22
  misc_feature: MA Experiment 20000328 PARAMETER Experiment Name: At_42deg_Heat_Sub_P Parameter: Timepoint (hr) Value: 6
  misc_feature: MA Experiment 20000328 PARAMETER Experiment Name: At_42deg_Heat_Sub_P Parameter: Tissue Value: Aerial
atgatgataccggaactagggagaagaccgatgcatagaggtaacgaagattcatcttttggggatgattacgagaaagagattggagtattgcttggtgagcagcagagaaggcaagtagaggcggatgagcttgagagagagcttaacttgtatagaagtggctctgctccaccgactgttgatggttctcttagtgctgccggagggctttttagcggcggaggtggggcttcttttctggaatttggtggagttaataagggtaatgggtttggtggtgatgatgaggagtttaggaaagatccagcttacttgtcttattactatgctaatatgaagttgaatccgaggttgccacctcctttgatgtctagggaggatttgagggttgctcagaggcttaaagggagtaataatgtgttaggtggtgttggggataggagaaaagtgaatgacagtcggtctttgttctctatgccacctggttttgaggctggaaaacctggtgcttctgcttctgagtgggatgctaatggattgattggtttgggacttggaggcaagcagaagagttttgctgatatctttcaggcggatatggggcatcctgttgtacagcagccctcacgtcctgctagtcgtaatacctttgatgagaatgttgactctaataataacctgtctccatctgcatcacaaggcattggagcgccatctccatactgctatgcagctgttctgggttcatctttgtctagaaatggaactccagatccacagggcattgctagggtgcctagtccttgccttactcccattggcagtggaagagtgagttcaaatgataagaggaacacaagtaatcaaagcccgttcaacggtgttacatctggtctcaacgagtcttctgatcttgtcaatgctttatccggcttgaacctgtcaggcactggcgggctagatgaacgtggtcaggctgagcaagatgtcgaaaaggtcaggaactatatgtttggactgcaagatgggcataatgaagtcaatccacatgggttcccaaacagatctgatcaagctaggggaactgcttcgtgcaggaattcacaaatgagagggtcacaaggatctgcatataatagtggaagtggagtagctaatccttaccagcatcatgatagcccaaactattacgcattaaatccagctgtagcttctatgatggctaaccaacttggaactaataactattctccaatgtatgaaaatgcttctgccactttgggatattctgcaatggactccagacttcatggtggaagttttgtttcttctggtcaaaacctctctgaatcacgaaatattggcagggtcggtaatcgaatgatggaaggaggtacgggtcacccgtcacatcttgcagacccgatgtatcatcagtatgcaaggttctctgaaaatgctgattcgtttgatcttcttaatgacccttcaatggacaggaactatggtaattcatacatgaatatgcttgaaattcagagggcttatctcggatctcagaaatcacagtatggtcttccttacaaatcagggagccctaacagccatagctattatggcagtccaacatttgggtctaatatgtcatatcctggcagcccattggctcatcatggtatgccaaactctcttatgtcaccttacagccctatgagacgaggtgaagtaaatatgcgatatcccgctgcaacaagaaactatactggaggggtaatgggttcttggcacatggatgctagtttggatgaaggatttggatcttcaatgcttgaagagttcaaaagtaacaaaacaagagggttcgaactttctgaaatagctggccatgttgtagagttcagttcggatcagtatggaagccggtttattcagcagaaactcgagacagcaacaactgatgagaaaaacatggtttatgaggagatcatgccaaaagctcttgccctgatgactgacgtttttggaaactatgtgattcagaagttctttgagcatggactcccaccacagagaagagaattgggagagaaactcattgacaatgttttgcctcttagcttacagatgtatggttgtcgtgtcatccagaaggcaattgaggtggttgatctagaccagaaaatccaaatggtcaaagaacttgatggacatgtgatgcgatgtgtacgtgatcagaatgggaaccatgtggttcaaaagtgtattgaatgtgtgcctgaagaaaacattgagtttattatttcaactttctttggccatgtggtgaccctctccactcacccatacgggtgccgtgttattcagagagtattggaacactgccataaccctgatacacagagtaaggttatggaagaaatcctgtccactgttagtatgctgacccaagatcagtatggaaactatgttgttcagcatgtactggagcatggaaagcctgatgagcgcactgtgataatcaaagagttagcggggaagattgttcagatgagccaacagaagtttgcatcaaacgttgttgagaagtgtttgacttttggaggtcctgaggaacgggaattgctggtgaatgagatgctgggcacaactgatgaaaacgagcctcttcaggcgatgatgaaggatcagtttgcaaactatgtagtgcaaaaagtcctggagacatgtgatgaccaacagcgtgaactgatactgactcgtattaaagtgcatctgaatgctctaaagaaatacacttacggaaagcatatcgttgcccgtgttgaaaaactcgttgctgctggagagaggagaatggctttgcagtcattaccccagcctctggtggcgtaa

SEQ ID NO: 46981 - protein, 964 aa, Arabidopsis thaliana
  peptide (1)..(964): Ceres Seq. ID no. 13579277
  misc_feature (770)..(805): Pfam Name: Pumilio-family RNA binding repeat Pfam Description: Pumilio-family RNA binding repeat
  misc_feature (177)..(949): Homolog of NCBI NO: 6056191 NR Description: putative RNA binding protein [Arabidopsis
  misc_feature (11)..(163): Homolog of NCBI NO: 22330960 NR Description: pumilio-family RNA-binding protein, putative
  misc_feature (177)..(957): Homolog of NCBI NO: 22330960 NR Description: pumilio-family RNA-binding protein, putative
  misc_feature (71)..(172): Homolog of NCBI NO: 20513851 NR Description: BPM [Hordeum vulgare]
  misc_feature (373)..(956): Homolog of NCBI NO: 20513851 NR Description: BPM [Hordeum vulgare]
  misc_feature (46)..(68): Homolog of NCBI NO: 14719326 NR Description: putative pumilio/Mpt5 family RNA-binding protein
  misc_feature (71)..(395): Homolog of NCBI NO: 14719326 NR Description: putative pumilio/Mpt5 family RNA-binding protein
  misc_feature (372)..(956): Homolog of NCBI NO: 14719326 NR Description: putative pumilio/Mpt5 family RNA-binding protein
  misc_feature (14)..(227): Homolog of NCBI NO: 34908236 NR Description: putative pumilio/Mpt5 family RNA-binding protein
  misc_feature (204)..(957): Homolog of NCBI NO: 34908236 NR Description: putative pumilio/Mpt5 family RNA-binding protein
MMIPELGRRPMHRGNEDSSFGDDYEKEIGVLLGEQQRRQVEADELERELNLYRSGSAPPTVDGSLSAAGGLFSGGGGASFLEFGGVNKGNGFGGDDEEFRKDPAYLSYYYANMKLNPRLPPPLMSREDLRVAQRLKGSNNVLGGVGDRRKVNDSRSLFSMPPGFEAGKPGASASEWDANGLIGLGLGGKQKSFADIFQADMGHPVVQQPSRPASRNTFDENVDSNNNLSPSASQGIGAPSPYCYAAVLGSSLSRNGTPDPQGIARVPSPCLTPIGSGRVSSNDKRNTSNQSPFNGVTSGLNESSDLVNALSGLNLSGTGGLDERGQAEQDVEKVRNYMFGLQDGHNEVNPHGFPNRSDQARGTASCRNSQMRGSQGSAYNSGSGVANPYQHHDSPNYYALNPAVASMMANQLGTNNYSPMYENASATLGYSAMDSRLHGGSFVSSGQNLSESRNIGRVGNRMMEGGTGHPSHLADPMYHQYARFSENADSFDLLNDPSMDRNYGNSYMNMLEIQRAYLGSQKSQYGLPYKSGSPNSHSYYGSPTFGSNMSYPGSPLAHHGMPNSLMSPYSPMRRGEVNMRYPAATRNYTGGVMGSWHMDASLDEGFGSSMLEEFKSNKTRGFELSEIAGHVVEFSSDQYGSRFIQQKLETATTDEKNMVYEEIMPKALALMTDVFGNYVIQKFFEHGLPPQRRELGEKLIDNVLPLSLQMYGCRVIQKAIEVVDLDQKIQMVKELDGHVMRCVRDQNGNHVVQKCIECVPEENIEFIISTFFGHVVTLSTHPYGCRVIQRVLEHCHNPDTQSKVMEEILSTVSMLTQDQYGNYVVQHVLEHGKPDERTVIIKELAGKIVQMSQQKFASNVVEKCLTFGGPEERELLVNEMLGTTDENEPLQAMMKDQFANYVVQKVLETCDDQQRELILTRIKVHLNALKKYTYGKHIVARVEKLVAAGERRMALQSLPQPLVA

SEQ ID NO: 46982 - protein, 963 aa, Arabidopsis thaliana
  peptide (1)..(963): Ceres Seq. ID no. 13579278
  misc_feature (769)..(804): Pfam Name: Pumilio-family RNA binding repeat Pfam Description: Pumilio-family RNA binding repeat
  misc_feature (176)..(948): Homolog of NCBI NO: 6056191 NR Description: putative RNA binding protein [Arabidopsis
  misc_feature (10)..(162): Homolog of NCBI NO: 22330960 NR Description: pumilio-family RNA-binding protein, putative
  misc_feature (176)..(956): Homolog of NCBI NO: 22330960 NR Description: pumilio-family RNA-binding protein, putative
  misc_feature (70)..(171): Homolog of NCBI NO: 20513851 NR Description: BPM [Hordeum vulgare]
  misc_feature (372)..(955): Homolog of NCBI NO: 20513851 NR Description: BPM [Hordeum vulgare]
  misc_feature (45)..(67): Homolog of NCBI NO: 14719326 NR Description: putative pumilio/Mpt5 family RNA-binding protein
  misc_feature (70)..(394): Homolog of NCBI NO: 14719326 NR Description: putative pumilio/Mpt5 family RNA-binding protein
  misc_feature (371)..(955): Homolog of NCBI NO: 14719326 NR Description: putative pumilio/Mpt5 family RNA-binding protein
  misc_feature (13)..(226): Homolog of NCBI NO: 34908236 NR Description: putative pumilio/Mpt5 family RNA-binding protein
  misc_feature (203)..(956): Homolog of NCBI NO: 34908236 NR Description: putative pumilio/Mpt5 family RNA-binding protein
MIPELGRRPMHRGNEDSSFGDDYEKEIGVLLGEQQRRQVEADELERELNLYRSGSAPPTVDGSLSAAGGLFSGGGGASFLEFGGVNKGNGFGGDDEEFRKDPAYLSYYYANMKLNPRLPPPLMSREDLRVAQRLKGSNNVLGGVGDRRKVNDSRSLFSMPPGFEAGKPGASASEWDANGLIGLGLGGKQKSFADIFQADMGHPVVQQPSRPASRNTFDENVDSNNNLSPSASQGIGAPSPYCYAAVLGSSLSRNGTPDPQGIARVPSPCLTPIGSGRVSSNDKRNTSNQSPFNGVTSGLNESSDLVNALSGLNLSGTGGLDERGQAEQDVEKVRNYMFGLQDGHNEVNPHGFPNRSDQARGTASCRNSQMRGSQGSAYNSGSGVANPYQHHDSPNYYALNPAVASMMANQLGTNNYSPMYENASATLGYSAMDSRLHGGSFVSSGQNLSESRNIGRVGNRMMEGGTGHPSHLADPMYHQYARFSENADSFDLLNDPSMDRNYGNSYMNMLEIQRAYLGSQKSQYGLPYKSGSPNSHSYYGSPTFGSNMSYPGSPLAHHGMPNSLMSPYSPMRRGEVNMRYPAATRNYTGGVMGSWHMDASLDEGFGSSMLEEFKSNKTRGFELSEIAGHVVEFSSDQYGSRFIQQKLETATTDEKNMVYEEIMPKALALMTDVFGNYVIQKFFEHGLPPQRRELGEKLIDNVLPLSLQMYGCRVIQKAIEVVDLDQKIQMVKELDGHVMRCVRDQNGNHVVQKCIECVPEENIEFIISTFFGHVVTLSTHPYGCRVIQRVLEHCHNPDTQSKVMEEILSTVSMLTQDQYGNYVVQHVLEHGKPDERTVIIKELAGKIVQMSQQKFASNVVEKCLTFGGPEERELLVNEMLGTTDENEPLQAMMKDQFANYVVQKVLETCDDQQRELILTRIKVHLNALKKYTYGKHIVARVEKLVAAGERRMALQSLPQPLVA

SEQ ID NO: 46983 - protein, 954 aa, Arabidopsis thaliana
  peptide (1)..(954): Ceres Seq. ID no. 13579279
  misc_feature (760)..(795): Pfam Name: Pumilio-family RNA binding repeat Pfam Description: Pumilio-family RNA binding repeat
  misc_feature (167)..(939): Homolog of NCBI NO: 6056191 NR Description: putative RNA binding protein [Arabidopsis
  misc_feature (1)..(153): Homolog of NCBI NO: 22330960 NR Description: pumilio-family RNA-binding protein, putative
  misc_feature (167)..(947): Homolog of NCBI NO: 22330960 NR Description: pumilio-family RNA-binding protein, putative
  misc_feature (61)..(162): Homolog of NCBI NO: 20513851 NR Description: BPM [Hordeum vulgare]
  misc_feature (363)..(946): Homolog of NCBI NO: 20513851 NR Description: BPM [Hordeum vulgare]
  misc_feature (36)..(58): Homolog of NCBI NO: 14719326 NR Description: putative pumilio/Mpt5 family RNA-binding protein
  misc_feature (61)..(385): Homolog of NCBI NO: 14719326 NR Description: putative pumilio/Mpt5 family RNA-binding protein
  misc_feature (362)..(946): Homolog of NCBI NO: 14719326 NR Description: putative pumilio/Mpt5 family RNA-binding protein
  misc_feature (4)..(217): Homolog of NCBI NO: 34908236 NR Description: putative pumilio/Mpt5 family RNA-binding protein
  misc_feature (194)..(947): Homolog of NCBI NO: 34908236 NR Description: putative pumilio/Mpt5 family RNA-binding protein
MHRGNEDSSFGDDYEKEIGVLLGEQQRRQVEADELERELNLYRSGSAPPTVDGSLSAAGGLFSGGGGASFLEFGGVNKGNGFGGDDEEFRKDPAYLSYYYANMKLNPRLPPPLMSREDLRVAQRLKGSNNVLGGVGDRRKVNDSRSLFSMPPGFEAGKPGASASEWDANGLIGLGLGGKQKSFADIFQADMGHPVVQQPSRPASRNTFDENVDSNNNLSPSASQGIGAPSPYCYAAVLGSSLSRNGTPDPQGIARVPSPCLTPIGSGRVSSNDKRNTSNQSPFNGVTSGLNESSDLVNALSGLNLSGTGGLDERGQAEQDVEKVRNYMFGLQDGHNEVNPHGFPNRSDQARGTASCRNSQMRGSQGSAYNSGSGVANPYQHHDSPNYYALNPAVASMMANQLGTNNYSPMYENASATLGYSAMDSRLHGGSFVSSGQNLSESRNIGRVGNRMMEGGTGHPSHLADPMYHQYARFSENADSFDLLNDPSMDRNYGNSYMNMLEIQRAYLGSQKSQYGLPYKSGSPNSHSYYGSPTFGSNMSYPGSPLAHHGMPNSLMSPYSPMRRGEVNMRYPAATRNYTGGVMGSWHMDASLDEGFGSSMLEEFKSNKTRGFELSEIAGHVVEFSSDQYGSRFIQQKLETATTDEKNMVYEEIMPKALALMTDVFGNYVIQKFFEHGLPPQRRELGEKLIDNVLPLSLQMYGCRVIQKAIEVVDLDQKIQMVKELDGHVMRCVRDQNGNHVVQKCIECVPEENIEFIISTFFGHVVTLSTHPYGCRVIQRVLEHCHNPDTQSKVMEEILSTVSMLTQDQYGNYVVQHVLEHGKPDERTVIIKELAGKIVQMSQQKFASNVVEKCLTFGGPEERELLVNEMLGTTDENEPLQAMMKDQFANYVVQKVLETCDDQQRELILTRIKVHLNALKKYTYGKHIVARVEKLVAAGERRMALQSLPQPLVA

SEQ ID NO: 46984 - DNA, 1909 bp, Arabidopsis thaliana
  misc_feature (1)..(1909): Ceres Seq. ID no. 14302717
  misc_feature: MA Experiment ID: 20000440 Result: Up-regulated in Transcription
  misc_feature: MA Experiment 20000440 PARAMETER Experiment Name: At_Closed-Flower__Sub_P Parameter: Tissue Value: Closed Flower vs. Whole Plant
tcttcccatctctctcccctctaagcaattaagcagacaagacactgatgatatgagacgaagagaaagaagtcttatcactcatcctttcctcttatgaatctctccgccgaccaagctcccgtcaccgccgtcgacgaactagctccgccttctcaaccgcatcgcttatctacatcatgtgatctccacccagaagagcgtttctccggtttctgtccttcttgtctttgcgaccgcctctccgtcttagatcacaacgccgctccgccaccgtcttcttcttcccggaaacctccctctatctccgctgtttcgttaaaagctctcttcaagccctcctctagtggtaccaacaactccaacggaaacggtcgggtcagacccggtttcttcccggagctccgacgtacaaagtccttttccgcaaagaacaacgaaggattttccggtgggtttgagccacagcgtcggtcttgtgacgtcagacttcgtgacgacgaaagaaaccttcccatcaatgaagctgcctccgtcgataaaatcgaggaggaggctagggagtctagcgtgagtgagatagttttagaggtgactgaagaagctgaaattgaggaggatgaagaaaacggtgagaacgatcccggcgagatagttgaggaaaaaagcagcgaaattggtgaggaagaagaggaattgaagccaatgaaggattacatggatctctactcacaaacaaagaaaccgtcggtgaaagatttcgccgggagtttcttttcggcggcctctgttttcagcaagaagcttcagaaatggaagcagaagcagaaggtgaagaagccgagaaacggtgtcggcggaggacggccacagtctgaaatcggaataggccggagatcaagcgacaccgacccgagattctctcttgacgccgggagattctccgtcgatataggtcggatttcaatggacgattctcgctactcattagatgagccaagagcgtcgtgggatggacacttaatcggcaggacaacggcggctagggttcctctgccgccatcgatgttatcagttgtggaaaatgctccgttgaatcgatcagacatgcagattccatcgtctccgtcaattaaaccgattagcggtgactccgacccgattatcataatcccaggcggatccaatcaaactcgagactactacactggacctccgtcgtcacggagacggaagagcctcgacagatccaattctattagaaaaattgtaacggagctagaggatgtcaaatcggtatcaaattcgacaacaacaatagactcaaattccatggaaacagcggagaacaaagggaatcaaaacggcgataagaaatcgagacggtggggaaaatggagcattttagggtttatatacagaaaaggtaaggacgatgaagaagaagataggtatagcagatccaacagcgccggaatggttgagaggtctttatcggaatcatggccggagatgaggaatggagaaggaggaggaccgaagatgaggaggagtaacagcaatgtgagctggcgaagctccggtggaggatcggcgaggaataagagttcgaggtattcgtccaaagatggagagaacggaatgttgaggttttatttgactccgatgaggagaagctggaagaccagcggtggtagtggtggaggcggaggcggtggtggtggtggtgggtgggagaagacggcggctaaggcgaatagtcacggccactctatagcgaggagggttatgaggctgtattgaccaaagtgtccctcttcattttaattattgggagcaatgtgaggttttggtttggggttctctaattatctttctttgtgaataaattggatatctacttaaccgg

SEQ ID NO: 46985 - protein, 568 aa, Arabidopsis thaliana
  peptide (1)..(568): Ceres Seq. ID no. 14302718
  misc_feature (15)..(533): Pfam Name: Protein of unknown function (DUF740) Pfam Description: Protein of unknown function (DUF740)
  misc_feature (134)..(496): Homolog of NCBI NO: 26452998 NR Description: unknown protein [Arabidopsis thaliana]
  misc_feature (134)..(496): Homolog of NCBI NO: 15224439 NR Description: expressed protein [Arabidopsis thaliana]
  misc_feature (1)..(306): Homolog of NCBI NO: 26452998 NR Description: unknown protein [Arabidopsis thaliana]
  misc_feature (1)..(306): Homolog of NCBI NO: 15224439 NR Description: expressed protein [Arabidopsis thaliana]
  misc_feature (144)..(306): Homolog of NCBI NO: 15232012 NR Description: glycine-rich protein [Arabidopsis thaliana]
  misc_feature (412)..(568): Homolog of NCBI NO: 15232012 NR Description: glycine-rich protein [Arabidopsis thaliana]
  misc_feature (259)..(423): Homolog of NCBI NO: 15232012 NR Description: glycine-rich protein [Arabidopsis thaliana]
  misc_feature (1)..(209): Homolog of NCBI NO: 15232012 NR Description: glycine-rich protein [Arabidopsis thaliana]
  misc_feature (1)..(568): Homolog of NCBI NO: 28393630 NR Description: unknown protein [Arabidopsis thaliana]
  misc_feature (1)..(568): Homolog of NCBI NO: 15240904 NR Description: glycine-rich protein [Arabidopsis thaliana]
MNLSADQAPVTAVDELAPPSQPHRLSTSCDLHPEERFSGFCPSCLCDRLSVLDHNAAPPPSSSSRKPPSISAVSLKALFKPSSSGTNNSNGNGRVRPGFFPELRRTKSFSAKNNEGFSGGFEPQRRSCDVRLRDDERNLPINEAASVDKIEEEARESSVSEIVLEVTEEAEIEEDEENGENDPGEIVEEKSSEIGEEEEELKPMKDYMDLYSQTKKPSVKDFAGSFFSAASVFSKKLQKWKQKQKVKKPRNGVGGGRPQSEIGIGRRSSDTDPRFSLDAGRFSVDIGRISMDDSRYSLDEPRASWDGHLIGRTTAARVPLPPSMLSVVENAPLNRSDMQIPSSPSIKPISGDSDPIIIIPGGSNQTRDYYTGPPSSRRRKSLDRSNSIRKIVTELEDVKSVSNSTTTIDSNSMETAENKGNQNGDKKSRRWGKWSILGFIYRKGKDDEEEDRYSRSNSAGMVERSLSESWPEMRNGEGGGPKMRRSNSNVSWRSSGGGSARNKSSRYSSKDGENGMLRFYLTPMRRSWKTSGGSGGGGGGGGGGGWEKTAAKANSHGHSIARRVMRLY

SEQ ID NO: 46986 - protein, 365 aa, Arabidopsis thaliana
  peptide (1)..(365): Ceres Seq. ID no. 14302719
  misc_feature (1)..(330): Pfam Name: Protein of unknown function (DUF740) Pfam Description: Protein of unknown function (DUF740)
  misc_feature (1)..(360): Homolog of NCBI NO: 34908360 NR Description: P0529H11.33 [Oryza sativa (japonica
  misc_feature (1)..(293): Homolog of NCBI NO: 26452998 NR Description: unknown protein [Arabidopsis thaliana]
  misc_feature (1)..(293): Homolog of NCBI NO: 15224439 NR Description: expressed protein [Arabidopsis thaliana]
  misc_feature (1)..(103): Homolog of NCBI NO: 26452998 NR Description: unknown protein [Arabidopsis thaliana]
  misc_feature (1)..(103): Homolog of NCBI NO: 15224439 NR Description: expressed protein [Arabidopsis thaliana]
  misc_feature (1)..(103): Homolog of NCBI NO: 15232012 NR Description: glycine-rich protein [Arabidopsis thaliana]
  misc_feature (209)..(365): Homolog of NCBI NO: 15232012 NR Description: glycine-rich protein [Arabidopsis thaliana]
  misc_feature (56)..(220): Homolog of NCBI NO: 15232012 NR Description: glycine-rich protein [Arabidopsis thaliana]
  misc_feature (1)..(365): Homolog of NCBI NO: 28393630 NR Description: unknown protein [Arabidopsis thaliana]
  misc_feature (1)..(365): Homolog of NCBI NO: 15240904 NR Description: glycine-rich protein [Arabidopsis thaliana]
MKDYMDLYSQTKKPSVKDFAGSFFSAASVFSKKLQKWKQKQKVKKPRNGVGGGRPQSEIGIGRRSSDTDPRFSLDAGRFSVDIGRISMDDSRYSLDEPRASWDGHLIGRTTAARVPLPPSMLSVVENAPLNRSDMQIPSSPSIKPISGDSDPIIIIPGGSNQTRDYYTGPPSSRRRKSLDRSNSIRKIVTELEDVKSVSNSTTTIDSNSMETAENKGNQNGDKKSRRWGKWSILGFIYRKGKDDEEEDRYSRSNSAGMVERSLSESWPEMRNGEGGGPKMRRSNSNVSWRSSGGGSARNKSSRYSSKDGENGMLRFYLTPMRRSWKTSGGSGGGGGGGGGGGWEKTAAKANSHGHSIARRVMRLY

SEQ ID NO: 46987 - protein, 361 aa, Arabidopsis thaliana
  peptide (1)..(361): Ceres Seq. ID no. 14302720
  misc_feature (1)..(326): Pfam Name: Protein of unknown function (DUF740) Pfam Description: Protein of unknown function (DUF740)
  misc_feature (1)..(356): Homolog of NCBI NO: 34908360 NR Description: P0529H11.33 [Oryza sativa (japonica
  misc_feature (1)..(289): Homolog of NCBI NO: 26452998 NR Description: unknown protein [Arabidopsis thaliana]
  misc_feature (1)..(289): Homolog of NCBI NO: 15224439 NR Description: expressed protein [Arabidopsis thaliana]
  misc_feature (1)..(99): Homolog of NCBI NO: 26452998 NR Description: unknown protein [Arabidopsis thaliana]
  misc_feature (1)..(99): Homolog of NCBI NO: 15224439 NR Description: expressed protein [Arabidopsis thaliana]
  misc_feature (1)..(99): Homolog of NCBI NO: 15232012 NR Description: glycine-rich protein [Arabidopsis thaliana]
  misc_feature (205)..(361): Homolog of NCBI NO: 15232012 NR Description: glycine-rich protein [Arabidopsis thaliana]
  misc_feature (52)..(216): Homolog of NCBI NO: 15232012 NR Description: glycine-rich protein [Arabidopsis thaliana]
  misc_feature (1)..(361): Homolog of NCBI NO: 28393630 NR Description: unknown protein [Arabidopsis thaliana]
  misc_feature (1)..(361): Homolog of NCBI NO: 15240904 NR Description: glycine-rich protein [Arabidopsis thaliana]
MDLYSQTKKPSVKDFAGSFFSAASVFSKKLQKWKQKQKVKKPRNGVGGGRPQSEIGIGRRSSDTDPRFSLDAGRFSVDIGRISMDDSRYSLDEPRASWDGHLIGRTTAARVPLPPSMLSVVENAPLNRSDMQIPSSPSIKPISGDSDPIIIIPGGSNQTRDYYTGPPSSRRRKSLDRSNSIRKIVTELEDVKSVSNSTTTIDSNSMETAENKGNQNGDKKSRRWGKWSILGFIYRKGKDDEEEDRYSRSNSAGMVERSLSESWPEMRNGEGGGPKMRRSNSNVSWRSSGGGSARNKSSRYSSKDGENGMLRFYLTPMRRSWKTSGGSGGGGGGGGGGGWEKTAAKANSHGHSIARRVMRLY

SEQ ID NO: 46988 - DNA, 1045 bp, Arabidopsis thaliana
  misc_feature (1)..(1045): Ceres Seq. ID no. 13646974
  misc_feature: MA Experiment ID: 20000234 Result: Up-regulated in Transcription
  misc_feature: MA Experiment 20000234 PARAMETER Experiment Name: At_Siliques_P Parameter: Age (day) Value: 21
  misc_feature: MA Experiment 20000234 PARAMETER Experiment Name: At_Siliques_P Parameter: Organism Value: A. thaliana
  misc_feature: MA Experiment 20000234 PARAMETER Experiment Name: At_Siliques_P Parameter: Plant Line Value: WS
  misc_feature: MA Experiment 20000234 PARAMETER Experiment Name: At_Siliques_P Parameter: Tissue Value: Less Than 5mm Siliques vs. Whole Plant
  misc_feature: MA Experiment ID: 20000264 Result: Up-regulated in Transcription
  misc_feature: MA Experiment 20000264 PARAMETER Experiment Name: At_Open_Flower_P Parameter: Age (day) Value: 21
  misc_feature: MA Experiment 20000264 PARAMETER Experiment Name: At_Open_Flower_P Parameter: Plant Line Value: WS
  misc_feature: MA Experiment 20000264 PARAMETER Experiment Name: At_Open_Flower_P Parameter: Tissue Value: Open Flower vs. Whole Plant
  misc_feature: MA Experiment ID: 20000286 Result: Up-regulated in Transcription
  misc_feature: MA Experiment 20000286 PARAMETER Experiment Name: At_Open_Flower_P Parameter: Age (day) Value: 21
  misc_feature: MA Experiment 20000286 PARAMETER Experiment Name: At_Open_Flower_P Parameter: Plant Line Value: WS
  misc_feature: MA Experiment 20000286 PARAMETER Experiment Name: At_Open_Flower_P Parameter: Tissue Value: Half Open vs. Whole Plant
  misc_feature: MA Experiment ID: 20000794 Result: Up-regulated in Transcription
  misc_feature: MA Experiment 20000794 PARAMETER Experiment Name: At_Petals_P Parameter: Age (day) Value: 23-25 days
  misc_feature: MA Experiment 20000794 PARAMETER Experiment Name: At_Petals_P Parameter: Plant Line Value: WS
  misc_feature: MA Experiment 20000794 PARAMETER Experiment Name: At_Petals_P Parameter: Tissue Value: Petals vs. Whole plant
  misc_feature: MA Experiment ID: 20001910 Result: Up-regulated in Transcription
  misc_feature: MA Experiment 20001910 PARAMETER Experiment Name: At_Drought_Reproduction_P Parameter: Age (day) Value: 37
  misc_feature: MA Experiment 20001910 PARAMETER Experiment Name: At_Drought_Reproduction_P Parameter: Organism Value: A. thaliana
  misc_feature: MA Experiment 20001910 PARAMETER Experiment Name: At_Drought_Reproduction_P Parameter: Plant Line Value: WS
  misc_feature: MA Experiment 20001910 PARAMETER Experiment Name: At_Drought_Reproduction_P Parameter: Timepoint (day) Value: 7
  misc_feature: MA Experiment 20001910 PARAMETER Experiment Name: At_Drought_Reproduction_P Parameter: Tissue Value: Flowers
  misc_feature: MA Experiment 20001910 PARAMETER Experiment Name: At_Drought_Reproduction_P Parameter: Treatment Value: Drought vs. No Drought
atcaaaggccaaaagaacagaaaaaagtttttttcacgcggtggcaatggcaatggcgtctgcttcttcctcctcctcctccatatccgtcatcattttcctcctcttggcgcctctctgcctttcacgtgagccaccttcacaaatcccaaacggaaccctagatctctctttactatggtacggccaattcacgcctactcaaaaggagagggttcacgatttcatagaatcgcttaacttcgacgccaaggaaggtcttgacccgaaggtatcggcgtggtggaaagtggtggagagttaccaagagaggtttgaggtgaaggatatttaccgacagaagaagagtaacagaaccgtagctccgaggattaaggtgaaggttgtccggagttatgtggatgagaagatgaagtatggaaaggaattgacaatggggaacggtgagaaacttgttgagacggctatcggaaatatgtcgaaagtggttcccgtggtattactttcggcgcaagttagggctcatggcgtagggttttgtgacggaacttgccaacataacgccctagccaaaattaaaggtcaaaaagaaccacgacggtacataatggtaagcaacccggaggtggaatgtcccggagagtgcgcttggcctttccacacggccgataagggtccacgtggcatgacctatcaaccggcaagtggagaagtcggagctgacgcactggttattcagctagccaccggtttagccgatttggccaccaatccagatctaaccaagtccttattcaaatctgagacgacaccgtacaacgatgacgtaaagaaaaaccatgaatcttcgtcaatgtatattgtggaccctgcaaccaagtgcactcgggtttttggatccggagcttttccaggtttcactggtagaattcgggttgacccgattactggtggagcctttaattcacacggaatcaaccacttgaaattcttgattccttctatttgggaccctaagaccaaatcttgctggactcctatgtaa

SEQ ID NO: 46989 - protein, 347 aa, Arabidopsis thaliana
  peptide (1)..(347): Ceres Seq. ID no. 13646975
  misc_feature (42)..(347): Pfam Name: Phosphate-induced protein 1 conserved region Pfam Description: Phosphate-induced protein 1 conserved region
  misc_feature (52)..(258): Homolog of NCBI NO: 15219504 NR Description: phosphate-induced (phi-1) protein -related
  misc_feature (52)..(258): Homolog of NCBI NO: 11762144 NR Description: At1g35140 [Arabidopsis thaliana]
  misc_feature (289)..(345): Homolog of NCBI NO: 15242420 NR Description: expressed protein [Arabidopsis thaliana]
  misc_feature (29)..(102): Homolog of NCBI NO: 15242420 NR Description: expressed protein [Arabidopsis thaliana]
  misc_feature (160)..(258): Homolog of NCBI NO: 15242420 NR Description: expressed protein [Arabidopsis thaliana]
  misc_feature (22)..(155): Homolog of NCBI NO: 31074969 NR Description: erg-1 [Solanum tuberosum]
  misc_feature (179)..(343): Homolog of NCBI NO: 31074969 NR Description: erg-1 [Solanum tuberosum]
  misc_feature (52)..(102): Homolog of NCBI NO: 15237656 NR Description: phi-1-related protein [Arabidopsis thaliana]
  misc_feature (150)..(345): Homolog of NCBI NO: 15237656 NR Description: phi-1-related protein [Arabidopsis thaliana]
  misc_feature (16)..(347): Homolog of NCBI NO: 15228438 NR Description: phi-1-related protein [Arabidopsis thaliana]
SKAKRTEKSFFHAVAMAMASASSSSSSISVIIFLLLAPLCLSREPPSQIPNGTLDLSLLWYGQFTPTQKERVHDFIESLNFDAKEGLDPKVSAWWKVVESYQERFEVKDIYRQKKSNRTVAPRIKVKVVRSYVDEKMKYGKELTMGNGEKLVETAIGNMSKVVPVVLLSAQVRAHGVGFCDGTCQHNALAKIKGQKEPRRYIMVSNPEVECPGECAWPFHTADKGPRGMTYQPASGEVGADALVIQLATGLADLATNPDLTKSLFKSETTPYNDDVKKNHESSSMYIVDPATKCTRVFGSGAFPGFTGRIRVDPITGGAFNSHGINHLKFLIPSIWDPKTKSCWTPM

SEQ ID NO: 46990 - protein, 332 aa, Arabidopsis thaliana
  peptide (1)..(332): Ceres Seq. ID no. 13646976
  misc_feature (27)..(332): Pfam Name: Phosphate-induced protein 1 conserved region Pfam Description: Phosphate-induced protein 1 conserved region
  misc_feature (37)..(243): Homolog of NCBI NO: 15219504 NR Description: phosphate-induced (phi-1) protein -related
  misc_feature (37)..(243): Homolog of NCBI NO: 11762144 NR Description: At1g35140 [Arabidopsis thaliana]
  misc_feature (274)..(330): Homolog of NCBI NO: 15242420 NR Description: expressed protein [Arabidopsis thaliana]
  misc_feature (14)..(87): Homolog of NCBI NO: 15242420 NR Description: expressed protein [Arabidopsis thaliana]
  misc_feature (145)..(243): Homolog of NCBI NO: 15242420 NR Description: expressed protein [Arabidopsis thaliana]
  misc_feature (7)..(140): Homolog of NCBI NO: 31074969 NR Description: erg-1 [Solanum tuberosum]
  misc_feature (164)..(328): Homolog of NCBI NO: 31074969 NR Description: erg-1 [Solanum tuberosum]
  misc_feature (37)..(87): Homolog of NCBI NO: 15237656 NR Description: phi-1-related protein [Arabidopsis thaliana]
  misc_feature (135)..(330): Homolog of NCBI NO: 15237656 NR Description: phi-1-related protein [Arabidopsis thaliana]
  misc_feature (1)..(332): Homolog of NCBI NO: 15228438 NR Description: phi-1-related protein [Arabidopsis thaliana]
MAMASASSSSSSISVIIFLLLAPLCLSREPPSQIPNGTLDLSLLWYGQFTPTQKERVHDFIESLNFDAKEGLDPKVSAWWKVVESYQERFEVKDIYRQKKSNRTVAPRIKVKVVRSYVDEKMKYGKELTMGNGEKLVETAIGNMSKVVPVVLLSAQVRAHGVGFCDGTCQHNALAKIKGQKEPRRYIMVSNPEVECPGECAWPFHTADKGPRGMTYQPASGEVGADALVIQLATGLADLATNPDLTKSLFKSETTPYNDDVKKNHESSSMYIVDPATKCTRVFGSGAFPGFTGRIRVDPITGGAFNSHGINHLKFLIPSIWDPKTKSCWTPM

SEQ ID NO: 46991 - protein, 330 aa, Arabidopsis thaliana
  peptide (1)..(330): Ceres Seq. ID no. 13646977
  misc_feature (25)..(330): Pfam Name: Phosphate-induced protein 1 conserved region Pfam Description: Phosphate-induced protein 1 conserved region
  misc_feature (35)..(241): Homolog of NCBI NO: 15219504 NR Description: phosphate-induced (phi-1) protein -related
  misc_feature (35)..(241): Homolog of NCBI NO: 11762144 NR Description: At1g35140 [Arabidopsis thaliana]
  misc_feature (272)..(328): Homolog of NCBI NO: 15242420 NR Description: expressed protein [Arabidopsis thaliana]
  misc_feature (12)..(85): Homolog of NCBI NO: 15242420 NR Description: expressed protein [Arabidopsis thaliana]
  misc_feature (143)..(241): Homolog of NCBI NO: 15242420 NR Description: expressed protein [Arabidopsis thaliana]
  misc_feature (5)..(138): Homolog of NCBI NO: 31074969 NR Description: erg-1 [Solanum tuberosum]
  misc_feature (162)..(326): Homolog of NCBI NO: 31074969 NR Description: erg-1 [Solanum tuberosum]
  misc_feature (35)..(85): Homolog of NCBI NO: 15237656 NR Description: phi-1-related protein [Arabidopsis thaliana]
  misc_feature (133)..(328): Homolog of NCBI NO: 15237656 NR Description: phi-1-related protein [Arabidopsis thaliana]
  misc_feature (1)..(330): Homolog of NCBI NO: 15228438 NR Description: phi-1-related protein [Arabidopsis thaliana]
MASASSSSSSISVIIFLLLAPLCLSREPPSQIPNGTLDLSLLWYGQFTPTQKERVHDFIESLNFDAKEGLDPKVSAWWKVVESYQERFEVKDIYRQKKSNRTVAPRIKVKVVRSYVDEKMKYGKELTMGNGEKLVETAIGNMSKVVPVVLLSAQVRAHGVGFCDGTCQHNALAKIKGQKEPRRYIMVSNPEVECPGECAWPFHTADKGPRGMTYQPASGEVGADALVIQLATGLADLATNPDLTKSLFKSETTPYNDDVKKNHESSSMYIVDPATKCTRVFGSGAFPGFTGRIRVDPITGGAFNSHGINHLKFLIPSIWDPKTKSCWTPM

SEQ ID NO: 46992 - DNA, 3225 bp, Arabidopsis thaliana; identical to SEQ ID NO: 45117
  misc_feature (1)..(3225): Ceres Seq. ID no. 12560311
  misc_feature: MA Experiment ID: 20000113 Result: Down-regulated in Transcription
  misc_feature: MA Experiment 20000113 PARAMETER Experiment Name: At_42deg_Heat_cDNA_P Parameter: Temperature (deg C) Value: 42 vs. 22
  misc_feature: MA Experiment 20000113 PARAMETER Experiment Name: At_42deg_Heat_cDNA_P Parameter: Timepoint (hr) Value: 8
  misc_feature: MA Experiment 20000113 PARAMETER Experiment Name: At_42deg_Heat_cDNA_P Parameter: Tissue Value: Aerial

SEQ ID NO: 46993 - protein, 920 aa, Arabidopsis thaliana; identical to SEQ ID NO: 45118
  peptide (1)..(920): Ceres Seq. ID no. 12560312
  misc_feature (254)..(512): Pfam Name: Dynamin central region Pfam Description: Dynamin central region
  misc_feature (254)..(512): Pfam Name: Dynamin central region Pfam Description: Dynamin central region
  misc_feature (4)..(498): Homolog of NCBI NO: 30689760 NR Description: phragmoplastin -related [Arabidopsis thaliana]
  misc_feature (681)..(817): Homolog of NCBI NO: 30689765 NR Description: phragmoplastin -related [Arabidopsis thaliana]
  misc_feature (4)..(498): Homolog of NCBI NO: 30689765 NR Description: phragmoplastin -related [Arabidopsis thaliana]
  misc_feature (681)..(817): Homolog of NCBI NO: 30689768 NR Description: phragmoplastin -related [Arabidopsis thaliana]
  misc_feature (4)..(498): Homolog of NCBI NO: 30689768 NR Description: phragmoplastin -related [Arabidopsis thaliana]
  misc_feature (4)..(498): Homolog of NCBI NO: 30689760 NR Description: phragmoplastin -related [Arabidopsis thaliana]
  misc_feature (4)..(498): Homolog of NCBI NO: 30689765 NR Description: phragmoplastin -related [Arabidopsis thaliana]
  misc_feature (4)..(498): Homolog of NCBI NO: 30689768 NR Description: phragmoplastin -related [Arabidopsis thaliana]
  misc_feature (1)..(549): Homolog of NCBI NO: 38175440 NR Description: putative dynamin homolog [Oryza sativa (japonica
  misc_feature (527)..(889): Homolog of NCBI NO: 38175440 NR Description: putative dynamin homolog [Oryza sativa (japonica
  misc_feature (1)..(574): Homolog of NCBI NO: 34904996 NR Description: P0456B03.5 [Oryza sativa (japonica
  misc_feature (602)..(788): Homolog of NCBI NO: 34904996 NR Description: P0456B03.5 [Oryza sativa (japonica
  misc_feature (854)..(915): Homolog of NCBI NO: 34904996 NR Description: P0456B03.5 [Oryza sativa (japonica
  misc_feature (681)..(817): Homolog of NCBI NO: 30689768 NR Description: phragmoplastin -related [Arabidopsis thaliana]
  misc_feature (681)..(817): Homolog of NCBI NO: 30689765 NR Description: phragmoplastin -related [Arabidopsis thaliana]
  misc_feature (854)..(915): Homolog of NCBI NO: 34904996 NR Description: P0456B03.5 [Oryza sativa (japonica
  misc_feature (602)..(788): Homolog of NCBI NO: 34904996 NR Description: P0456B03.5 [Oryza sativa (japonica
  misc_feature (1)..(574): Homolog of NCBI NO: 34904996 NR Description: P0456B03.5 [Oryza sativa (japonica
  misc_feature (527)..(889): Homolog of NCBI NO: 38175440 NR Description: putative dynamin homolog [Oryza sativa (japonica
  misc_feature (1)..(549): Homolog of NCBI NO: 38175440 NR Description: putative dynamin homolog [Oryza sativa (japonica

SEQ ID NO: 46994 - protein, 907 aa, Arabidopsis thaliana; identical to SEQ ID NO: 45119
  peptide (1)..(907): Ceres Seq. ID no. 12560313
  misc_feature (241)..(499): Pfam Name: Dynamin central region Pfam Description: Dynamin central region
  misc_feature (241)..(499): Pfam Name: Dynamin central region Pfam Description: Dynamin central region
  misc_feature (1)..(485): Homolog of NCBI NO: 30689760 NR Description: phragmoplastin -related [Arabidopsis thaliana]
  misc_feature (668)..(804): Homolog of NCBI NO: 30689765 NR Description: phragmoplastin -related [Arabidopsis thaliana]
  misc_feature (1)..(485): Homolog of NCBI NO: 30689765 NR Description: phragmoplastin -related [Arabidopsis thaliana]
  misc_feature (668)..(804): Homolog of NCBI NO: 30689768 NR Description: phragmoplastin -related [Arabidopsis thaliana]
  misc_feature (1)..(485): Homolog of NCBI NO: 30689768 NR Description: phragmoplastin -related [Arabidopsis thaliana]
  misc_feature (1)..(485): Homolog of NCBI NO: 30689760 NR Description: phragmoplastin -related [Arabidopsis thaliana]
  misc_feature (1)..(485): Homolog of NCBI NO: 30689765 NR Description: phragmoplastin -related [Arabidopsis thaliana]
  misc_feature (1)..(485): Homolog of NCBI NO: 30689768 NR Description: phragmoplastin -related [Arabidopsis thaliana]
  misc_feature (1)..(536): Homolog of NCBI NO: 38175440 NR Description: putative dynamin homolog [Oryza sativa (japonica
  misc_feature (514)..(876): Homolog of NCBI NO: 38175440 NR Description: putative dynamin homolog [Oryza sativa (japonica
  misc_feature (1)..(561): Homolog of NCBI NO: 34904996 NR Description: P0456B03.5 [Oryza sativa (japonica
  misc_feature (589)..(775): Homolog of NCBI NO: 34904996 NR Description: P0456B03.5 [Oryza sativa (japonica
  misc_feature (841)..(902): Homolog of NCBI NO: 34904996 NR Description: P0456B03.5 [Oryza sativa (japonica
  misc_feature (668)..(804): Homolog of NCBI NO: 30689768 NR Description: phragmoplastin -related [Arabidopsis thaliana]
  misc_feature (668)..(804): Homolog of NCBI NO: 30689765 NR Description: phragmoplastin -related [Arabidopsis thaliana]
  misc_feature (841)..(902): Homolog of NCBI NO: 34904996 NR Description: P0456B03.5 [Oryza sativa (japonica
  misc_feature (589)..(775): Homolog of NCBI NO: 34904996 NR Description: P0456B03.5 [Oryza sativa (japonica
  misc_feature (1)..(561): Homolog of NCBI NO: 34904996 NR Description: P0456B03.5 [Oryza sativa (japonica
  misc_feature (514)..(876): Homolog of NCBI NO: 38175440 NR Description: putative dynamin homolog [Oryza sativa (japonica
  misc_feature (1)..(536): Homolog of NCBI NO: 38175440 NR Description: putative dynamin homolog [Oryza sativa (japonica

SEQ ID NO: 46995 - protein, 765 aa, Arabidopsis thaliana; identical to SEQ ID NO: 45120
  peptide (1)..(765): Ceres Seq. ID no. 12560314
  misc_feature (99)..(357): Pfam Name: Dynamin central region Pfam Description: Dynamin central region
  misc_feature (99)..(357): Pfam Name: Dynamin central region Pfam Description: Dynamin central region
  misc_feature (1)..(343): Homolog of NCBI NO: 30689760 NR Description: phragmoplastin -related [Arabidopsis thaliana]
  misc_feature (526)..(662): Homolog of NCBI NO: 30689765 NR Description: phragmoplastin -related [Arabidopsis thaliana]
  misc_feature (1)..(343): Homolog of NCBI NO: 30689765 NR Description: phragmoplastin -related [Arabidopsis thaliana]
  misc_feature (526)..(662): Homolog of NCBI NO: 30689768 NR Description: phragmoplastin -related [Arabidopsis thaliana]
  misc_feature (1)..(343): Homolog of NCBI NO: 30689768 NR Description: phragmoplastin -related [Arabidopsis thaliana]
  misc_feature (1)..(343): Homolog of NCBI NO: 30689760 NR Description: phragmoplastin -related [Arabidopsis thaliana]
  misc_feature (1)..(343): Homolog of NCBI NO: 30689765 NR Description: phragmoplastin -related [Arabidopsis thaliana]
  misc_feature (1)..(343): Homolog of NCBI NO: 30689768 NR Description: phragmoplastin -related [Arabidopsis thaliana]
  misc_feature (1)..(394): Homolog of NCBI NO: 38175440 NR Description: putative dynamin homolog [Oryza sativa (japonica
  misc_feature (372)..(734): Homolog of NCBI NO: 38175440 NR Description: putative dynamin homolog [Oryza sativa (japonica
  misc_feature (1)..(419): Homolog of NCBI NO: 34904996 NR Description: P0456B03.5 [Oryza sativa (japonica
  misc_feature (447)..(633): Homolog of NCBI NO: 34904996 NR Description: P0456B03.5 [Oryza sativa (japonica
  misc_feature (699)..(760): Homolog of NCBI NO: 34904996 NR Description: P0456B03.5 [Oryza sativa (japonica
  misc_feature (526)..(662): Homolog of NCBI NO: 30689768 NR Description: phragmoplastin -related [Arabidopsis thaliana]
  misc_feature (526)..(662): Homolog of NCBI NO: 30689765 NR Description: phragmoplastin -related [Arabidopsis thaliana]
  misc_feature (699)..(760): Homolog of NCBI NO: 34904996 NR Description: P0456B03.5 [Oryza sativa (japonica
  misc_feature (447)..(633): Homolog of NCBI NO: 34904996 NR Description: P0456B03.5 [Oryza sativa (japonica
  misc_feature (1)..(419): Homolog of NCBI NO: 34904996 NR Description: P0456B03.5 [Oryza sativa (japonica
  misc_feature (372)..(734): Homolog of NCBI NO: 38175440 NR Description: putative dynamin homolog [Oryza sativa (japonica
  misc_feature (1)..(394): Homolog of NCBI NO: 38175440 NR Description: putative dynamin homolog [Oryza sativa (japonica

SEQ ID NO: 46996 - DNA, 3798 bp, Arabidopsis thaliana; identical to SEQ ID NO: 45415
  misc_feature (1)..(3798): Ceres Seq. ID no. 13618884
  misc_feature: MA Experiment ID: 20000307 Result: Up-regulated in Transcription
  misc_feature: MA Experiment 20000307 PARAMETER Experiment Name: At_Germinating_Seeds_Sub_P Parameter: Age (hr) Value: 24 vs. 0
  misc_feature: MA Experiment 20000307 PARAMETER Experiment Name: At_Germinating_Seeds_Sub_P Parameter: Organism Value: A. thaliana
  misc_feature: MA Experiment 20000307 PARAMETER Experiment Name: At_Germinating_Seeds_Sub_P Parameter: Plant Line Value: WS
  misc_feature: MA Experiment 20000307 PARAMETER Experiment Name: At_Germinating_Seeds_Sub_P Parameter: Tissue Value: Germinating Seeds

SEQ ID NO: 46997 - protein, 1081 aa, Arabidopsis thaliana; identical to SEQ ID NO: 45416
  peptide (1)..(1081): Ceres Seq. ID no. 13618885
  misc_feature (746)..(1069): Homolog of NCBI NO: 13925884 NR Description: cellulose synthase D-like protein [Nicotiana
  misc_feature (35)..(105): Homolog of NCBI NO: 15217853 NR Description: cellulose synthase family [Arabidopsis thaliana]
  misc_feature (242)..(469): Homolog of NCBI NO: 15217853 NR Description: cellulose synthase family [Arabidopsis thaliana]
  misc_feature (518)..(1063): Homolog of NCBI NO: 15217853 NR Description: cellulose synthase family [Arabidopsis thaliana]
  misc_feature (230)..(469): Homolog of NCBI NO: 15237873 NR Description: cellulose synthase family [Arabidopsis thaliana]
  misc_feature (475)..(1075): Homolog of NCBI NO: 15237873 NR Description: cellulose synthase family [Arabidopsis thaliana]
  misc_feature (225)..(469): Homolog of NCBI NO: 27372782 NR Description: cellulose synthase-like protein D4 [Populus
  misc_feature (475)..(1063): Homolog of NCBI NO: 27372782 NR Description: cellulose synthase-like protein D4 [Populus
  misc_feature (230)..(469): Homolog of NCBI NO: 15228448 NR Description: cellulose synthase family [Arabidopsis thaliana]
  misc_feature (450)..(1063): Homolog of NCBI NO: 15228448 NR Description: cellulose synthase family [Arabidopsis thaliana]
  misc_feature (746)..(1069): Homolog of NCBI NO: 13925884 NR Description: cellulose synthase D-like protein [Nicotiana
  misc_feature (35)..(105): Homolog of NCBI NO: 15217853 NR Description: cellulose synthase family [Arabidopsis thaliana]
  misc_feature (242)..(469): Homolog of NCBI NO: 15217853 NR Description: cellulose synthase family [Arabidopsis thaliana]
  misc_feature (518)..(1063): Homolog of NCBI NO: 15217853 NR Description: cellulose synthase family [Arabidopsis thaliana]
  misc_feature (230)..(469): Homolog of NCBI NO: 15237873 NR Description: cellulose synthase family [Arabidopsis thaliana]
  misc_feature (475)..(1075): Homolog of NCBI NO: 15237873 NR Description: cellulose synthase family [Arabidopsis thaliana]
  misc_feature (225)..(469): Homolog of NCBI NO: 27372782 NR Description: cellulose synthase-like protein D4 [Populus
  misc_feature (475)..(1063): Homolog of NCBI NO: 27372782 NR Description: cellulose synthase-like protein D4 [Populus
  misc_feature (230)..(469): Homolog of NCBI NO: 15228448 NR Description: cellulose synthase family [Arabidopsis thaliana]
  misc_feature (450)..(1063): Homolog of NCBI NO: 15228448 NR Description: cellulose synthase family [Arabidopsis thaliana]
  misc_feature (746)..(1069): Homolog of NCBI NO: 13925884 NR Description: cellulose synthase D-like protein [Nicotiana
  misc_feature (35)..(105): Homolog of NCBI NO: 15217853 NR Description: cellulose synthase family [Arabidopsis thaliana]
  misc_feature (242)..(469): Homolog of NCBI NO: 15217853 NR Description: cellulose synthase family [Arabidopsis thaliana]
  misc_feature (518)..(1063): Homolog of NCBI NO: 15217853 NR Description: cellulose synthase family [Arabidopsis thaliana]
  misc_feature (230)..(469): Homolog of NCBI NO: 15237873 NR Description: cellulose synthase family [Arabidopsis thaliana]
  misc_feature (475)..(1075): Homolog of NCBI NO: 15237873 NR Description: cellulose synthase family [Arabidopsis thaliana]
  misc_feature (225)..(469): Homolog of NCBI NO: 27372782 NR Description: cellulose synthase-like protein D4 [Populus
  misc_feature (475)..(1063): Homolog of NCBI NO: 27372782 NR Description: cellulose synthase-like protein D4 [Populus
  misc_feature (230)..(469): Homolog of NCBI NO: 15228448 NR Description: cellulose synthase family [Arabidopsis thaliana]
  misc_feature (450)..(1063): Homolog of NCBI NO: 15228448 NR Description: cellulose synthase family [Arabidopsis thaliana]

SEQ ID NO: 46998 - protein, 1048 aa, Arabidopsis thaliana; identical to SEQ ID NO: 45417
  peptide (1)..(1048): Ceres Seq. ID no. 13618886
  misc_feature (713)..(1036): Homolog of NCBI NO: 13925884 NR Description: cellulose synthase D-like protein [Nicotiana
  misc_feature (2)..(72): Homolog of NCBI NO: 15217853 NR Description: cellulose synthase family [Arabidopsis thaliana]
  misc_feature (209)..(436): Homolog of NCBI NO: 15217853 NR Description: cellulose synthase family [Arabidopsis thaliana]
  misc_feature (485)..(1030): Homolog of NCBI NO: 15217853 NR Description: cellulose synthase family [Arabidopsis thaliana]
  misc_feature (197)..(436): Homolog of NCBI NO: 15237873 NR Description: cellulose synthase family [Arabidopsis thaliana]
  misc_feature (442)..(1042): Homolog of NCBI NO: 15237873 NR Description: cellulose synthase family [Arabidopsis thaliana]
  misc_feature (192)..(436): Homolog of NCBI NO: 27372782 NR Description: cellulose synthase-like protein D4 [Populus
  misc_feature (442)..(1030): Homolog of NCBI NO: 27372782 NR Description: cellulose synthase-like protein D4 [Populus
  misc_feature (197)..(436): Homolog of NCBI NO: 15228448 NR Description: cellulose synthase family [Arabidopsis thaliana]
  misc_feature (417)..(1030): Homolog of NCBI NO: 15228448 NR Description: cellulose synthase family [Arabidopsis thaliana]
  misc_feature (713)..(1036): Homolog of NCBI NO: 13925884 NR Description: cellulose synthase D-like protein [Nicotiana
  misc_feature (2)..(72): Homolog of NCBI NO: 15217853 NR Description: cellulose synthase family [Arabidopsis thaliana]
  misc_feature (209)..(436): Homolog of NCBI NO: 15217853 NR Description: cellulose synthase family [Arabidopsis thaliana]
  misc_feature (485)..(1030): Homolog of NCBI NO: 15217853 NR Description: cellulose synthase family [Arabidopsis thaliana]
  misc_feature (197)..(436): Homolog of NCBI NO: 15237873 NR Description: cellulose synthase family [Arabidopsis thaliana]
  misc_feature (442)..(1042): Homolog of NCBI NO: 15237873 NR Description: cellulose synthase family [Arabidopsis thaliana]
  misc_feature (192)..(436): Homolog of NCBI NO: 27372782 NR Description: cellulose synthase-like protein D4 [Populus
  misc_feature (442)..(1030): Homolog of NCBI NO: 27372782 NR Description: cellulose synthase-like protein D4 [Populus
  misc_feature (197)..(436): Homolog of NCBI NO: 15228448 NR Description: cellulose synthase family [Arabidopsis thaliana]
  misc_feature (417)..(1030): Homolog of NCBI NO: 15228448 NR Description: cellulose synthase family [Arabidopsis thaliana]
  misc_feature (713)..(1036): Homolog of NCBI NO: 13925884 NR Description: cellulose synthase D-like protein [Nicotiana
  misc_feature (2)..(72): Homolog of NCBI NO: 15217853 NR Description: cellulose synthase family [Arabidopsis thaliana]
  misc_feature (209)..(436): Homolog of NCBI NO: 15217853 NR Description: cellulose synthase family [Arabidopsis thaliana]
  misc_feature (485)..(1030): Homolog of NCBI NO: 15217853 NR Description: cellulose synthase family [Arabidopsis thaliana]
  misc_feature (197)..(436): Homolog of NCBI NO: 15237873 NR Description: cellulose synthase family [Arabidopsis thaliana]
  misc_feature (442)..(1042): Homolog of NCBI NO: 15237873 NR Description: cellulose synthase family [Arabidopsis thaliana]
  misc_feature (192)..(436): Homolog of NCBI NO: 27372782 NR Description: cellulose synthase-like protein D4 [Populus
  misc_feature (442)..(1030): Homolog of NCBI NO: 27372782 NR Description: cellulose synthase-like protein D4 [Populus
  misc_feature (197)..(436): Homolog of NCBI NO: 15228448 NR Description: cellulose synthase family [Arabidopsis thaliana]
  misc_feature (417)..(1030): Homolog of NCBI NO: 15228448 NR Description: cellulose synthase family [Arabidopsis thaliana]

SEQ ID NO: 46999 - protein, 857 aa, Arabidopsis thaliana; identical to SEQ ID NO: 45418
  peptide (1)..(857): Ceres Seq. ID no. 13618887
  misc_feature (1)..(245): Homolog of NCBI NO: 13925884 NR Description: cellulose synthase D-like protein [Nicotiana
  misc_feature (522)..(845): Homolog of NCBI NO: 13925884 NR Description: cellulose synthase D-like protein [Nicotiana
  misc_feature (18)..(245): Homolog of NCBI NO: 15217853 NR Description: cellulose synthase family [Arabidopsis thaliana]
  misc_feature (294)..(839): Homolog of NCBI NO: 15217853 NR Description: cellulose synthase family [Arabidopsis thaliana]
  misc_feature (6)..(245): Homolog of NCBI NO: 15237873 NR Description: cellulose synthase family [Arabidopsis thaliana]
  misc_feature (251)..(851): Homolog of NCBI NO: 15237873 NR Description: cellulose synthase family [Arabidopsis thaliana]
  misc_feature (1)..(245): Homolog of NCBI NO: 27372782 NR Description: cellulose synthase-like protein D4 [Populus
  misc_feature (251)..(839): Homolog of NCBI NO: 27372782 NR Description: cellulose synthase-like protein D4 [Populus
  misc_feature (6)..(245): Homolog of NCBI NO: 15228448 NR Description: cellulose synthase family [Arabidopsis thaliana]
  misc_feature (226)..(839): Homolog of NCBI NO: 15228448 NR Description: cellulose synthase family [Arabidopsis thaliana]
  misc_feature (1)..(245): Homolog of NCBI NO: 13925884 NR Description: cellulose synthase D-like protein [Nicotiana
  misc_feature (522)..(845): Homolog of NCBI NO: 13925884 NR Description: cellulose synthase D-like protein [Nicotiana
  misc_feature (18)..(245): Homolog of NCBI NO: 15217853 NR Description: cellulose synthase family [Arabidopsis thaliana]
  misc_feature (294)..(839): Homolog of NCBI NO: 15217853 NR Description: cellulose synthase family [Arabidopsis thaliana]
  misc_feature (6)..(245): Homolog of NCBI NO: 15237873 NR Description: cellulose synthase family [Arabidopsis thaliana]
  misc_feature (251)..(851): Homolog of NCBI NO: 15237873 NR Description: cellulose synthase family [Arabidopsis thaliana]
  misc_feature (1)..(245): Homolog of NCBI NO: 27372782 NR Description: cellulose synthase-like protein D4 [Populus
  misc_feature (251)..(839): Homolog of NCBI NO: 27372782 NR Description: cellulose synthase-like protein D4 [Populus
  misc_feature (6)..(245): Homolog of NCBI NO: 15228448 NR Description: cellulose synthase family [Arabidopsis thaliana]
  misc_feature (226)..(839): Homolog of NCBI NO: 15228448 NR Description: cellulose synthase family [Arabidopsis thaliana]
  misc_feature (1)..(245): Homolog of NCBI NO: 13925884 NR Description: cellulose synthase D-like protein [Nicotiana
  misc_feature (522)..(845): Homolog of NCBI NO: 13925884 NR Description: cellulose synthase D-like protein [Nicotiana
  misc_feature (18)..(245): Homolog of NCBI NO: 15217853 NR Description: cellulose synthase family [Arabidopsis thaliana]
  misc_feature (294)..(839): Homolog of NCBI NO: 15217853 NR Description: cellulose synthase family [Arabidopsis thaliana]
  misc_feature (6)..(245): Homolog of NCBI NO: 15237873 NR Description: cellulose synthase family [Arabidopsis thaliana]
  misc_feature (251)..(851): Homolog of NCBI NO: 15237873 NR Description: cellulose synthase family [Arabidopsis thaliana]
  misc_feature (1)..(245): Homolog of NCBI NO: 27372782 NR Description: cellulose synthase-like protein D4 [Populus
  misc_feature (251)..(839): Homolog of NCBI NO: 27372782 NR Description: cellulose synthase-like protein D4 [Populus
  misc_feature (6)..(245): Homolog of NCBI NO: 15228448 NR Description: cellulose synthase family [Arabidopsis thaliana]
  misc_feature (226)..(839): Homolog of NCBI NO: 15228448 NR Description: cellulose synthase family [Arabidopsis thaliana]

SEQ ID NO: 47000 - DNA, 1298 bp, Arabidopsis thaliana; identical to SEQ ID NO: 27690
  misc_feature (1)..(1298): Ceres Seq. ID no. 12600704
  misc_feature: MA Experiment ID: 108434 Result: Up-regulated in Transcription
  misc_feature: MA Experiment 108434 PARAMETER Experiment Name: At_Root_Tips_cDNA_P Parameter: Tissue Value: Root Tips
  misc_feature: MA Experiment ID: 108462 Result: Down-regulated in Transcription
  misc_feature: MA Experiment 108462 PARAMETER Experiment Name: At_Germinating_Seeds_cDNA_P Parameter: Age (day) Value: 2 vs. 0
  misc_feature: MA Experiment 108462 PARAMETER Experiment Name: At_Germinating_Seeds_cDNA_P Parameter: Tissue Value: Germinating Seeds
  misc_feature: MA Experiment ID: 108463 Result: Down-regulated in Transcription
  misc_feature: MA Experiment 108463 PARAMETER Experiment Name: At_Germinating_Seeds_cDNA_P Parameter: Age (day) Value: 3 vs. 0
  misc_feature: MA Experiment 108463 PARAMETER Experiment Name: At_Germinating_Seeds_cDNA_P Parameter: Tissue Value: Germinating Seeds
  misc_feature: MA Experiment ID: 108464 Result: Down-regulated in Transcription
  misc_feature: MA Experiment 108464 PARAMETER Experiment Name: At_Germinating_Seeds_cDNA_P Parameter: Age (day) Value: 4 vs. 0
  misc_feature: MA Experiment 108464 PARAMETER Experiment Name: At_Germinating_Seeds_cDNA_P Parameter: Tissue Value: Germinating Seeds
  misc_feature: MA Experiment ID: 108573 Result: Up-regulated in Transcription
  misc_feature: MA Experiment 108573 PARAMETER Experiment Name: At_Drought_cDNA_P Parameter: Timepoint (hr) Value: 6
  misc_feature: MA Experiment 108573 PARAMETER Experiment Name: At_Drought_cDNA_P Parameter: Tissue Value: Aerial
  misc_feature: MA Experiment 108573 PARAMETER Experiment Name: At_Drought_cDNA_P Parameter: Treatment Value: Drought vs. No Drought
  misc_feature: MA Experiment ID: 108585 Result: Up-regulated in Transcription
  misc_feature: MA Experiment 108585 PARAMETER Experiment Name: At_5mM_NaNP_cDNA_P Parameter: Timepoint (hr) Value: 6
  misc_feature: MA Experiment 108585 PARAMETER Experiment Name: At_5mM_NaNP_cDNA_P Parameter: Tissue Value: Aerial
  misc_feature: MA Experiment 108585 PARAMETER Experiment Name: At_5mM_NaNP_cDNA_P Parameter: Treatment Value: null
  misc_feature: MA Experiment ID: 108595 Result: Down-regulated in Transcription
  misc_feature: MA Experiment 108595 PARAMETER Experiment Name: At_Ler-pi_Ovule_cDNA_P Parameter: Plant Line Value: null
  misc_feature: MA Experiment ID: 20000069 Result: Down-regulated in Transcription
  misc_feature: MA Experiment 20000069 PARAMETER Experiment Name: At_100uM_ABA_Mutants_cDNA_P Parameter: Plant Line Value: CS23
  misc_feature: MA Experiment 20000069 PARAMETER Experiment Name: At_100uM_ABA_Mutants_cDNA_P Parameter: Timepoint (hr) Value: 6
  misc_feature: MA Experiment 20000069 PARAMETER Experiment Name: At_100uM_ABA_Mutants_cDNA_P Parameter: Tissue Value: Aerial
  misc_feature: MA Experiment 20000069 PARAMETER Experiment Name: At_100uM_ABA_Mutants_cDNA_P Parameter: Treatment Value: 100uM ABA vs. No Treatment
  misc_feature: MA Experiment ID: 20000087 Result: Down-regulated in Transcription
  misc_feature: MA Experiment 20000087 PARAMETER Experiment Name: At_100uM_ABA_Mutants_cDNA_P Parameter: Plant Line Value: WS
  misc_feature: MA Experiment 20000087 PARAMETER Experiment Name: At_100uM_ABA_Mutants_cDNA_P Parameter: Timepoint (hr) Value: 6
  misc_feature: MA Experiment 20000087 PARAMETER Experiment Name: At_100uM_ABA_Mutants_cDNA_P Parameter: Tissue Value: Aerial
  misc_feature: MA Experiment 20000087 PARAMETER Experiment Name: At_100uM_ABA_Mutants_cDNA_P Parameter: Treatment Value: 100uM ABA vs. No Treatment
  misc_feature: MA Experiment ID: 20000184 Result: Up-regulated in Transcription
  misc_feature: MA Experiment 20000184 PARAMETER Experiment Name: At_Shoots__P Parameter: Age (day) Value: 7
  misc_feature: MA Experiment 20000184 PARAMETER Experiment Name: At_Shoots__P Parameter: Tissue Value: Shoots vs. Whole Plant
  misc_feature: MA Experiment ID: 20000437 Result: Down-regulated in Transcription
  misc_feature: MA Experiment 20000437 PARAMETER Experiment Name: At_Drought_P Parameter: Age (day) Value: 8
  misc_feature: MA Experiment 20000437 PARAMETER Experiment Name: At_Drought_P Parameter: Organism Value: A. thaliana
  misc_feature: MA Experiment 20000437 PARAMETER Experiment Name: At_Drought_P Parameter: Plant Line Value: WS
  misc_feature: MA Experiment 20000437 PARAMETER Experiment Name: At_Drought_P Parameter: Timepoint (hr) Value: 24
  misc_feature: MA Experiment 20000437 PARAMETER Experiment Name: At_Drought_P Parameter: Tissue Value: Whole Plant
  misc_feature: MA Experiment 20000437 PARAMETER Experiment Name: At_Drought_P Parameter: Treatment Value: Drought vs. No Drought
  misc_feature: MA Experiment ID: 20000794 Result: Down-regulated in Transcription
  misc_feature: MA Experiment 20000794 PARAMETER Experiment Name: At_Petals_P Parameter: Age (day) Value: 23-25 days
  misc_feature: MA Experiment 20000794 PARAMETER Experiment Name: At_Petals_P Parameter: Plant Line Value: WS
  misc_feature: MA Experiment 20000794 PARAMETER Experiment Name: At_Petals_P Parameter: Tissue Value: Petals vs. Whole plant
  misc_feature: MA Experiment ID: 20001558 Result: Up-regulated in Transcription
  misc_feature: MA Experiment 20001558 PARAMETER Experiment Name: At_Drought_Soil_Dry_P Parameter: Age (day) Value: 27
  misc_feature: MA Experiment 20001558 PARAMETER Experiment Name: At_Drought_Soil_Dry_P Parameter: Organism Value: A. thaliana
  misc_feature: MA Experiment 20001558 PARAMETER Experiment Name: At_Drought_Soil_Dry_P Parameter: Plant Line Value: WS
  misc_feature: MA Experiment 20001558 PARAMETER Experiment Name: At_Drought_Soil_Dry_P Parameter: Post Timepoint (hr) Value: 6
  misc_feature: MA Experiment 20001558 PARAMETER Experiment Name: At_Drought_Soil_Dry_P Parameter: Post-Treatment Value: Re-Water vs. No Drought
  misc_feature: MA Experiment 20001558 PARAMETER Experiment Name: At_Drought_Soil_Dry_P Parameter: Timepoint (day) Value: 13
  misc_feature: MA Experiment 20001558 PARAMETER Experiment Name: At_Drought_Soil_Dry_P Parameter: Treatment Value: Drought vs. No Drought
  misc_feature: MA Experiment ID: 20001757 Result: Up-regulated in Transcription
  misc_feature: MA Experiment 20001757 PARAMETER Experiment Name: At_50mM_NH4NO3_L-to-H_P Parameter: Timepoint (hr) Value: 6
  misc_feature: MA Experiment 20001757 PARAMETER Experiment Name: At_50mM_NH4NO3_L-to-H_P Parameter: Tissue Value: Leaf
  misc_feature: MA Experiment 20001757 PARAMETER Experiment Name: At_50mM_NH4NO3_L-to-H_P Parameter: Treatment Value: 50mM NH4NO3 vs 100mM Mannitol

SEQ ID NO: 47001 - protein, 327 aa, Arabidopsis thaliana; identical to SEQ ID NO: 27691
  peptide (1)..(327): Ceres Seq. ID no. 12600705
  misc_feature (1)..(327): Homolog of NCBI NO: 3023847 NR Description: GUANINE NUCLEOTIDE-BINDING PROTEIN BETA
  misc_feature (1)..(327): Homolog of NCBI NO: 21593440 NR Description: guanine nucleotide-binding protein, putative
  misc_feature (1)..(327): Homolog of NCBI NO: 15229589 NR Description: protein kinase C-receptor/G-protein, putative
  misc_feature (1)..(327): Homolog of NCBI NO: 15221916 NR Description: guanine nucleotide-binding protein, putative
  misc_feature (1)..(327): Homolog of NCBI NO: 3023857 NR Description: GUANINE NUCLEOTIDE-BINDING PROTEIN BETA
  misc_feature (1)..(327): Homolog of NCBI NO: 2289095 NR Description: WD-40 repeat protein [Arabidopsis thaliana]
  misc_feature (1)..(327): Homolog of NCBI NO: 15220941 NR Description: G-protein beta family
  misc_feature (1)..(327): Homolog of NCBI NO: 3023847 NR Description: GUANINE NUCLEOTIDE-BINDING PROTEIN BETA
  misc_feature (1)..(327): Homolog of NCBI NO: 21593440 NR Description: guanine nucleotide-binding protein, putative
  misc_feature (1)..(327): Homolog of NCBI NO: 15229589 NR Description: protein kinase C-receptor/G-protein, putative
  misc_feature (1)..(327): Homolog of NCBI NO: 15221916 NR Description: guanine nucleotide-binding protein, putative
  misc_feature (1)..(327): Homolog of NCBI NO: 3023857 NR Description: GUANINE NUCLEOTIDE-BINDING PROTEIN BETA
  misc_feature (1)..(327): Homolog of NCBI NO: 2289095 NR Description: WD-40 repeat protein [Arabidopsis thaliana]
  misc_feature (1)..(327): Homolog of NCBI NO: 15220941 NR Description: G-protein beta family

SEQ ID NO: 47002 - protein, 317 aa, Arabidopsis thaliana; identical to SEQ ID NO: 27692
  peptide (1)..(317): Ceres Seq. ID no. 12600706
  misc_feature (1)..(317): Homolog of NCBI NO: 3023847 NR Description: GUANINE NUCLEOTIDE-BINDING PROTEIN BETA
  misc_feature (1)..(317): Homolog of NCBI NO: 21593440 NR Description: guanine nucleotide-binding protein, putative
  misc_feature (1)..(317): Homolog of NCBI NO: 15229589 NR Description: protein kinase C-receptor/G-protein, putative
  misc_feature (1)..(317): Homolog of NCBI NO: 15221916 NR Description: guanine nucleotide-binding protein, putative
  misc_feature (1)..(317): Homolog of NCBI NO: 3023857 NR Description: GUANINE NUCLEOTIDE-BINDING PROTEIN BETA
  misc_feature (1)..(317): Homolog of NCBI NO: 2289095 NR Description: WD-40 repeat protein [Arabidopsis thaliana]
  misc_feature (1)..(317): Homolog of NCBI NO: 15220941 NR Description: G-protein beta family
  misc_feature (1)..(317): Homolog of NCBI NO: 3023847 NR Description: GUANINE NUCLEOTIDE-BINDING PROTEIN BETA
  misc_feature (1)..(317): Homolog of NCBI NO: 21593440 NR Description: guanine nucleotide-binding protein, putative
  misc_feature (1)..(317): Homolog of NCBI NO: 15229589 NR Description: protein kinase C-receptor/G-protein, putative
  misc_feature (1)..(317): Homolog of NCBI NO: 15221916 NR Description: guanine nucleotide-binding protein, putative
  misc_feature (1)..(317): Homolog of NCBI NO: 3023857 NR Description: GUANINE NUCLEOTIDE-BINDING PROTEIN BETA
  misc_feature (1)..(317): Homolog of NCBI NO: 2289095 NR Description: WD-40 repeat protein [Arabidopsis thaliana]
  misc_feature (1)..(317): Homolog of NCBI NO: 15220941 NR Description: G-protein beta family

SEQ ID NO: 47003 - protein, 311 aa, Arabidopsis thaliana; identical to SEQ ID NO: 27693
  peptide (1)..(311): Ceres Seq. ID no. 12600707
  misc_feature (1)..(311): Homolog of NCBI NO: 3023847 NR Description: GUANINE NUCLEOTIDE-BINDING PROTEIN BETA
  misc_feature (1)..(311): Homolog of NCBI NO: 21593440 NR Description: guanine nucleotide-binding protein, putative
  misc_feature (1)..(311): Homolog of NCBI NO: 15229589 NR Description: protein kinase C-receptor/G-protein, putative
  misc_feature (1)..(311): Homolog of NCBI NO: 15221916 NR Description: guanine nucleotide-binding protein, putative
  misc_feature (1)..(311): Homolog of NCBI NO: 3023857 NR Description: GUANINE NUCLEOTIDE-BINDING PROTEIN BETA
  misc_feature (1)..(311): Homolog of NCBI NO: 2289095 NR Description: WD-40 repeat protein [Arabidopsis thaliana]
  misc_feature (1)..(311): Homolog of NCBI NO: 15220941 NR Description: G-protein beta family
  misc_feature (1)..(311): Homolog of NCBI NO: 3023847 NR Description: GUANINE NUCLEOTIDE-BINDING PROTEIN BETA
  misc_feature (1)..(311): Homolog of NCBI NO: 21593440 NR Description: guanine nucleotide-binding protein, putative
  misc_feature (1)..(311): Homolog of NCBI NO: 15229589 NR Description: protein kinase C-receptor/G-protein, putative
  misc_feature (1)..(311): Homolog of NCBI NO: 15221916 NR Description: guanine nucleotide-binding protein, putative
  misc_feature (1)..(311): Homolog of NCBI NO: 3023857 NR Description: GUANINE NUCLEOTIDE-BINDING PROTEIN BETA
  misc_feature (1)..(311): Homolog of NCBI NO: 2289095 NR Description: WD-40 repeat protein [Arabidopsis thaliana]
  misc_feature (1)..(311): Homolog of NCBI NO: 15220941 NR Description: G-protein beta family

SEQ ID NO: 47004 - DNA, 1807 bp, Arabidopsis thaliana
  misc_feature (1)..(1807): Ceres Seq. ID no. 13591791
  misc_feature: MA Experiment ID: 20000173 Result: Down-regulated in Transcription
  misc_feature: MA Experiment 20000173 PARAMETER Experiment Name: At_42deg_Heat_P Parameter: Age (day) Value: 14
  misc_feature: MA Experiment 20000173 PARAMETER Experiment Name: At_42deg_Heat_P Parameter: Organism Value: A. thaliana
  misc_feature: MA Experiment 20000173 PARAMETER Experiment Name: At_42deg_Heat_P Parameter: Plant Line Value: WS
  misc_feature: MA Experiment 20000173 PARAMETER Experiment Name: At_42deg_Heat_P Parameter: Temperature (deg C) Value: 42 vs. 22
  misc_feature: MA Experiment 20000173 PARAMETER Experiment Name: At_42deg_Heat_P Parameter: Timepoint (hr) Value: 6
  misc_feature: MA Experiment 20000173 PARAMETER Experiment Name: At_42deg_Heat_P Parameter: Tissue Value: Aerial
  misc_feature: MA Experiment ID: 20000182 Result: Down-regulated in Transcription
  misc_feature: MA Experiment 20000182 PARAMETER Experiment Name: At_2mM_SA_P Parameter: Age (day) Value: 14
  misc_feature: MA Experiment 20000182 PARAMETER Experiment Name: At_2mM_SA_P Parameter: Organism Value: A. thaliana
  misc_feature: MA Experiment 20000182 PARAMETER Experiment Name: At_2mM_SA_P Parameter: Plant Line Value: WS
  misc_feature: MA Experiment 20000182 PARAMETER Experiment Name: At_2mM_SA_P Parameter: Timepoint (hr) Value: 6
  misc_feature: MA Experiment 20000182 PARAMETER Experiment Name: At_2mM_SA_P Parameter: Tissue Value: Aerial
  misc_feature: MA Experiment 20000182 PARAMETER Experiment Name: At_2mM_SA_P Parameter: Treatment Value: 2mM SA vs. No Treatment
  misc_feature: MA Experiment ID: 20000185 Result: Down-regulated in Transcription
  misc_feature: MA Experiment 20000185 PARAMETER Experiment Name: At_Roots__P Parameter: Age (day) Value: 7 vs. 21
  misc_feature: MA Experiment 20000185 PARAMETER Experiment Name: At_Roots__P Parameter: Organism Value: A. thaliana
  misc_feature: MA Experiment 20000185 PARAMETER Experiment Name: At_Roots__P Parameter: Tissue Value: Roots vs. Whole Plant
  misc_feature: MA Experiment ID: 20000444 Result: Up-regulated in Transcription
  misc_feature: MA Experiment 20000444 PARAMETER Experiment Name: At_100uM_NAA__P Parameter: Age (day) Value: 14
  misc_feature: MA Experiment 20000444 PARAMETER Experiment Name: At_100uM_NAA__P Parameter: Organism Value: A. thaliana
  misc_feature: MA Experiment 20000444 PARAMETER Experiment Name: At_100uM_NAA__P Parameter: Plant Line Value: WS
  misc_feature: MA Experiment 20000444 PARAMETER Experiment Name: At_100uM_NAA__P Parameter: Timepoint (hr) Value: 1
  misc_feature: MA Experiment 20000444 PARAMETER Experiment Name: At_100uM_NAA__P Parameter: Tissue Value: Aerial
  misc_feature: MA Experiment 20000444 PARAMETER Experiment Name: At_100uM_NAA__P Parameter: Treatment Value: 100uM NAA vs. No Treatment
  misc_feature: MA Experiment ID: 20001247 Result: Up-regulated in Transcription
  misc_feature: MA Experiment 20001247 PARAMETER Experiment Name: At_Far-red-induction_P Parameter: Age (day) Value: 7
  misc_feature: MA Experiment 20001247 PARAMETER Experiment Name: At_Far-red-induction_P Parameter: Light Value: Far-red vs. White
  misc_feature: MA Experiment 20001247 PARAMETER Experiment Name: At_Far-red-induction_P Parameter: Organism Value: A. thaliana
  misc_feature: MA Experiment 20001247 PARAMETER Experiment Name: At_Far-red-induction_P Parameter: Plant Line Value: Columbia
  misc_feature: MA Experiment 20001247 PARAMETER Experiment Name: At_Far-red-induction_P Parameter: Timepoint (hr) Value: 1
  misc_feature: MA Experiment 20001247 PARAMETER Experiment Name: At_Far-red-induction_P Parameter: Tissue Value: Whole Plant
  misc_feature: MA Experiment ID: 20001248 Result: Up-regulated in Transcription
  misc_feature: MA Experiment 20001248 PARAMETER Experiment Name: At_Far-red-induction_P Parameter: Age (day) Value: 7
  misc_feature: MA Experiment 20001248 PARAMETER Experiment Name: At_Far-red-induction_P Parameter: Light Value: Far-red vs. White
  misc_feature: MA Experiment 20001248 PARAMETER Experiment Name: At_Far-red-induction_P Parameter: Organism Value: A. thaliana
  misc_feature: MA Experiment 20001248 PARAMETER Experiment Name: At_Far-red-induction_P Parameter: Plant Line Value: Columbia
  misc_feature: MA Experiment 20001248 PARAMETER Experiment Name: At_Far-red-induction_P Parameter: Timepoint (hr) Value: 4
  misc_feature: MA Experiment 20001248 PARAMETER Experiment Name: At_Far-red-induction_P Parameter: Tissue Value: Whole Plant
  misc_feature: MA Experiment ID: 20001450 Result: Up-regulated in Transcription
  misc_feature: MA Experiment 20001450 PARAMETER Experiment Name: At_Far-red-induction_P Parameter: Age (day) Value: 7
  misc_feature: MA Experiment 20001450 PARAMETER Experiment Name: At_Far-red-induction_P Parameter: Light Value: Far-red vs. White
  misc_feature: MA Experiment 20001450 PARAMETER Experiment Name: At_Far-red-induction_P Parameter: Organism Value: A. thaliana
  misc_feature: MA Experiment 20001450 PARAMETER Experiment Name: At_Far-red-induction_P Parameter: Plant Line Value: Columbia
  misc_feature: MA Experiment 20001450 PARAMETER Experiment Name: At_Far-red-induction_P Parameter: Timepoint (hr) Value: 8
  misc_feature: MA Experiment 20001450 PARAMETER Experiment Name: At_Far-red-induction_P Parameter: Tissue Value: Whole Plant
  misc_feature: MA Experiment ID: 20001911 Result: Down-regulated in Transcription
  misc_feature: MA Experiment 20001911 PARAMETER Experiment Name: At_Drought_Reproduction_P Parameter: Age (day) Value: 40
  misc_feature: MA Experiment 20001911 PARAMETER Experiment Name: At_Drought_Reproduction_P Parameter: Organism Value: A. thaliana
  misc_feature: MA Experiment 20001911 PARAMETER Experiment Name: At_Drought_Reproduction_P Parameter: Plant Line Value: WS
  misc_feature: MA Experiment 20001911 PARAMETER Experiment Name: At_Drought_Reproduction_P Parameter: Timepoint (day) Value: 10
  misc_feature: MA Experiment 20001911 PARAMETER Experiment Name: At_Drought_Reproduction_P Parameter: Tissue Value: Flowers
  misc_feature: MA Experiment 20001911 PARAMETER Experiment Name: At_Drought_Reproduction_P Parameter: Treatment Value: Drought vs. No Drought
ggcagattcctttctcctcgagaacaaaaaaaacttctttttttttctctttctctcttggcttctctttagaaagtgactcaccagaaaaaaaaaagggtttttgcttttcgggtttagctaagaaaaatctttcaatcttccttaaatctttcaaaaccccaaaatgggacctcgttgctctaagctctctctctgttggtggccgacccatctcaaatcaactcacaacgaagcttctgatctagataacggaacggacgatttgccgtcgtttacggagtttagtttcgaccaactacgagctgctacttgtggattctctacagacagtattgtctccgaacatggtgttaaagctcctaatgttgtgtataaaggcagacttgaagatgaccgatggatcgctgttaaacgattcaatagatccgcttggcctgatactcgtcaatttcttgaagaagcaaaagctgtggggcagttgaggaatgagaggttggcgaatttgattggattctgttgtgaaggagacgagagattgctcgttgctgagtttatgccttttgaaactctctcgaagcatctctttcactgggatagtcagccaatgaagtggtctatgaggttgagagtggctttgtatcttgcacaagcacttgagtattgtagcagcaaaggtcgcgccttgtaccacgatcttaatgcttacaggatcttgtttgaccaggatggtaacccgagattatcttgctttggtcttatgaagaatagtagggatgggaagagttacagtacaaatttggctttcacacctcctgaatacctaagaacagggagagtgattccggagagtgtggtctacagcttcggaacgctgttgctagatcttctcagcggcaaacacataccaccaagccatgcgcttgatctgattcgtgggaagaatttcctgatgctgatggactcgtgtctagatggccatttctcaaacgatgatggaaccgatttggttcgtttagcttcccgttgtttgcagtatgaagctcgtgaaaggccaaatgtgaaatctctcgtgtcctcactcgctcctcttcagaaagaaactgatattccgtctcatgttttaatggggattccacatggagctgcttctccaaaggaaacaacttcgcttacccctcttggtgacgcttgttcacgacatgatctcacagcaatacatgaaattctcgaaaaggttggatacaaagatgacgagggtgtagcaaatgagctctcgttccaagtgtggaccgaccagattcaggagactctaaactccaagaaacaaggagatgctgcgttcaaaggcaaagactttgtcactgctgttgaatgttacacgcagttcatcgaagatggcacaatggtatcgccaacagtttttgcaaggaggtgtttgtgttatctgatgagcaatatgcctcaagaggctcttggtgatgcaatgcaggcgcaagtagtgtctcctgaatggccaacggctttctatcttcaggccgctgctctcttcagccttggaatggataaagacgcctgtgaaaccctaaaagatggaacttccttggaagccaagaaacataacaacagaaactgaaaacttcaagtgtataggtttcttctctcttccgccttcttcgttttgtgattggattctgagaaagcctcattgtctctgtcttctttaagcattatcttaaatttgtggtttccaatttgaagagatgattcaaatcacatttgaatcaagaaaagaaggatctttctc

SEQ ID NO: 47005 - protein, 489 aa, Arabidopsis thaliana
  peptide (1)..(489): Ceres Seq. ID no. 13591792
  misc_feature (30)..(484): Homolog of NCBI NO: 7486022 NR Description: hypothetical protein F23E12.210 - Arabidopsis
  misc_feature (101)..(485): Homolog of NCBI NO: 15222446 NR Description: protein kinase - related [Arabidopsis thaliana]
  misc_feature (30)..(484): Homolog of NCBI NO: 18418600 NR Description: protein kinase family [Arabidopsis thaliana]
  misc_feature (1)..(485): Homolog of NCBI NO: 34897368 NR Description: putative protein kinase [Oryza sativa]
  misc_feature (1)..(483): Homolog of NCBI NO: 7486564 NR Description: hypothetical protein F6N23.9 - Arabidopsis
  misc_feature (1)..(485): Homolog of NCBI NO: 15237604 NR Description: protein kinase family [Arabidopsis thaliana]
  misc_feature (1)..(483): Homolog of NCBI NO: 22328189 NR Description: protein kinase family [Arabidopsis thaliana]
  misc_feature (1)..(488): Homolog of NCBI NO: 21553556 NR Description: protein kinase-like protein [Arabidopsis thaliana]
  misc_feature (1)..(488): Homolog of NCBI NO: 15232406 NR Description: protein kinase family [Arabidopsis thaliana]
  misc_feature (1)..(489): Homolog of NCBI NO: 22327962 NR Description: protein kinase - related [Arabidopsis thaliana]
  misc_feature (30)..(484): Homolog of NCBI NO: 7486022 NR Description: hypothetical protein F23E12.210 - Arabidopsis
  misc_feature (101)..(485): Homolog of NCBI NO: 15222446 NR Description: protein kinase - related [Arabidopsis thaliana]
  misc_feature (30)..(484): Homolog of NCBI NO: 18418600 NR Description: protein kinase family [Arabidopsis thaliana]
  misc_feature (1)..(485): Homolog of NCBI NO: 34897368 NR Description: putative protein kinase [Oryza sativa]
  misc_feature (1)..(483): Homolog of NCBI NO: 7486564 NR Description: hypothetical protein F6N23.9 - Arabidopsis
  misc_feature (1)..(485): Homolog of NCBI NO: 15237604 NR Description: protein kinase family [Arabidopsis thaliana]
  misc_feature (1)..(483): Homolog of NCBI NO: 22328189 NR Description: protein kinase family [Arabidopsis thaliana]
  misc_feature (1)..(488): Homolog of NCBI NO: 21553556 NR Description: protein kinase-like protein [Arabidopsis thaliana]
  misc_feature (1)..(488): Homolog of NCBI NO: 15232406 NR Description: protein kinase family [Arabidopsis thaliana]
  misc_feature (1)..(489): Homolog of NCBI NO: 22327962 NR Description: protein kinase - related [Arabidopsis thaliana]
MGPRCSKLSLCWWPTHLKSTHNEASDLDNGTDDLPSFTEFSFDQLRAATCGFSTDSIVSEHGVKAPNVVYKGRLEDDRWIAVKRFNRSAWPDTRQFLEEAKAVGQLRNERLANLIGFCCEGDERLLVAEFMPFETLSKHLFHWDSQPMKWSMRLRVALYLAQALEYCSSKGRALYHDLNAYRILFDQDGNPRLSCFGLMKNSRDGKSYSTNLAFTPPEYLRTGRVIPESVVYSFGTLLLDLLSGKHIPPSHALDLIRGKNFLMLMDSCLDGHFSNDDGTDLVRLASRCLQYEARERPNVKSLVSSLAPLQKETDIPSHVLMGIPHGAASPKETTSLTPLGDACSRHDLTAIHEILEKVGYKDDEGVANELSFQVWTDQIQETLNSKKQGDAAFKGKDFVTAVECYTQFIEDGTMVSPTVFARRCLCYLMSNMPQEALGDAMQAQVVSPEWPTAFYLQAAALFSLGMDKDACETLKDGTSLEAKKHNNRN

SEQ ID NO: 47006 - protein, 359 aa, Arabidopsis thaliana
  peptide (1)..(359): Ceres Seq. ID no. 13591793
  misc_feature (1)..(354): Homolog of NCBI NO: 7486022 NR Description: hypothetical protein F23E12.210 - Arabidopsis
  misc_feature (1)..(355): Homolog of NCBI NO: 15222446 NR Description: protein kinase - related [Arabidopsis thaliana]
  misc_feature (1)..(354): Homolog of NCBI NO: 18418600 NR Description: protein kinase family [Arabidopsis thaliana]
  misc_feature (1)..(355): Homolog of NCBI NO: 34897368 NR Description: putative protein kinase [Oryza sativa]
  misc_feature (1)..(353): Homolog of NCBI NO: 7486564 NR Description: hypothetical protein F6N23.9 - Arabidopsis
  misc_feature (1)..(355): Homolog of NCBI NO: 15237604 NR Description: protein kinase family [Arabidopsis thaliana]
  misc_feature (1)..(353): Homolog of NCBI NO: 22328189 NR Description: protein kinase family [Arabidopsis thaliana]
  misc_feature (1)..(358): Homolog of NCBI NO: 21553556 NR Description: protein kinase-like protein [Arabidopsis thaliana]
  misc_feature (1)..(358): Homolog of NCBI NO: 15232406 NR Description: protein kinase family [Arabidopsis thaliana]
  misc_feature (1)..(359): Homolog of NCBI NO: 22327962 NR Description: protein kinase - related [Arabidopsis thaliana]
  misc_feature (1)..(354): Homolog of NCBI NO: 7486022 NR Description: hypothetical protein F23E12.210 - Arabidopsis
  misc_feature (1)..(355): Homolog of NCBI NO: 15222446 NR Description: protein kinase - related [Arabidopsis thaliana]
  misc_feature (1)..(354): Homolog of NCBI NO: 18418600 NR Description: protein kinase family [Arabidopsis thaliana]
  misc_feature (1)..(355): Homolog of NCBI NO: 34897368 NR Description: putative protein kinase [Oryza sativa]
  misc_feature (1)..(353): Homolog of NCBI NO: 7486564 NR Description: hypothetical protein F6N23.9 - Arabidopsis
  misc_feature (1)..(355): Homolog of NCBI NO: 15237604 NR Description: protein kinase family [Arabidopsis thaliana]
  misc_feature (1)..(353): Homolog of NCBI NO: 22328189 NR Description: protein kinase family [Arabidopsis thaliana]
  misc_feature (1)..(358): Homolog of NCBI NO: 21553556 NR Description: protein kinase-like protein [Arabidopsis thaliana]
  misc_feature (1)..(358): Homolog of NCBI NO: 15232406 NR Description: protein kinase family [Arabidopsis thaliana]
  misc_feature (1)..(359): Homolog of NCBI NO: 22327962 NR Description: protein kinase - related [Arabidopsis thaliana]
MPFETLSKHLFHWDSQPMKWSMRLRVALYLAQALEYCSSKGRALYHDLNAYRILFDQDGNPRLSCFGLMKNSRDGKSYSTNLAFTPPEYLRTGRVIPESVVYSFGTLLLDLLSGKHIPPSHALDLIRGKNFLMLMDSCLDGHFSNDDGTDLVRLASRCLQYEARERPNVKSLVSSLAPLQKETDIPSHVLMGIPHGAASPKETTSLTPLGDACSRHDLTAIHEILEKVGYKDDEGVANELSFQVWTDQIQETLNSKKQGDAAFKGKDFVTAVECYTQFIEDGTMVSPTVFARRCLCYLMSNMPQEALGDAMQAQVVSPEWPTAFYLQAAALFSLGMDKDACETLKDGTSLEAKKHNNRN

SEQ ID NO: 47007 - protein, 342 aa, Arabidopsis thaliana
  peptide (1)..(342): Ceres Seq. ID no. 13591794
  misc_feature (1)..(337): Homolog of NCBI NO: 7486022 NR Description: hypothetical protein F23E12.210 - Arabidopsis
  misc_feature (1)..(338): Homolog of NCBI NO: 15222446 NR Description: protein kinase - related [Arabidopsis thaliana]
  misc_feature (1)..(337): Homolog of NCBI NO: 18418600 NR Description: protein kinase family [Arabidopsis thaliana]
  misc_feature (1)..(338): Homolog of NCBI NO: 34897368 NR Description: putative protein kinase [Oryza sativa]
  misc_feature (1)..(336): Homolog of NCBI NO: 7486564 NR Description: hypothetical protein F6N23.9 - Arabidopsis
  misc_feature (1)..(338): Homolog of NCBI NO: 15237604 NR Description: protein kinase family [Arabidopsis thaliana]
  misc_feature (1)..(336): Homolog of NCBI NO: 22328189 NR Description: protein kinase family [Arabidopsis thaliana]
  misc_feature (1)..(341): Homolog of NCBI NO: 21553556 NR Description: protein kinase-like protein [Arabidopsis thaliana]
  misc_feature (1)..(341): Homolog of NCBI NO: 15232406 NR Description: protein kinase family [Arabidopsis thaliana]
  misc_feature (1)..(342): Homolog of NCBI NO: 22327962 NR Description: protein kinase - related [Arabidopsis thaliana]
  misc_feature (1)..(337): Homolog of NCBI NO: 7486022 NR Description: hypothetical protein F23E12.210 - Arabidopsis
  misc_feature (1)..(338): Homolog of NCBI NO: 15222446 NR Description: protein kinase - related [Arabidopsis thaliana]
  misc_feature (1)..(337): Homolog of NCBI NO: 18418600 NR Description: protein kinase family [Arabidopsis thaliana]
  misc_feature (1)..(338): Homolog of NCBI NO: 34897368 NR Description: putative protein kinase [Oryza sativa]
  misc_feature (1)..(336): Homolog of NCBI NO: 7486564 NR Description: hypothetical protein F6N23.9 - Arabidopsis
  misc_feature (1)..(338): Homolog of NCBI NO: 15237604 NR Description: protein kinase family [Arabidopsis thaliana]
  misc_feature (1)..(336): Homolog of NCBI NO: 22328189 NR Description: protein kinase family [Arabidopsis thaliana]
  misc_feature (1)..(341): Homolog of NCBI NO: 21553556 NR Description: protein kinase-like protein [Arabidopsis thaliana]
  misc_feature (1)..(341): Homolog of NCBI NO: 15232406 NR Description: protein kinase family [Arabidopsis thaliana]
  misc_feature (1)..(342): Homolog of NCBI NO: 22327962 NR Description: protein kinase - related [Arabidopsis thaliana]
MKWSMRLRVALYLAQALEYCSSKGRALYHDLNAYRILFDQDGNPRLSCFGLMKNSRDGKSYSTNLAFTPPEYLRTGRVIPESVVYSFGTLLLDLLSGKHIPPSHALDLIRGKNFLMLMDSCLDGHFSNDDGTDLVRLASRCLQYEARERPNVKSLVSSLAPLQKETDIPSHVLMGIPHGAASPKETTSLTPLGDACSRHDLTAIHEILEKVGYKDDEGVANELSFQVWTDQIQETLNSKKQGDAAFKGKDFVTAVECYTQFIEDGTMVSPTVFARRCLCYLMSNMPQEALGDAMQAQVVSPEWPTAFYLQAAALFSLGMDKDACETLKDGTSLEAKKHNNRN

SEQ ID NO: 47008 - DNA, 1066 bp, Arabidopsis thaliana
  misc_feature (1)..(1066): Ceres Seq. ID no. 12576107
  misc_feature: MA Experiment ID: 20000185 Result: Down-regulated in Transcription
  misc_feature: MA Experiment 20000185 PARAMETER Experiment Name: At_Roots__P Parameter: Age (day) Value: 7 vs. 21
  misc_feature: MA Experiment 20000185 PARAMETER Experiment Name: At_Roots__P Parameter: Organism Value: A. thaliana
  misc_feature: MA Experiment 20000185 PARAMETER Experiment Name: At_Roots__P Parameter: Tissue Value: Roots vs. Whole Plant
  misc_feature: MA Experiment ID: 20000439 Result: Down-regulated in Transcription
  misc_feature: MA Experiment 20000439 PARAMETER Experiment Name: At_Roots__P Parameter: Age (day) Value: 14 vs. 21
  misc_feature: MA Experiment 20000439 PARAMETER Experiment Name: At_Roots__P Parameter: Organism Value: A. thaliana
  misc_feature: MA Experiment 20000439 PARAMETER Experiment Name: At_Roots__P Parameter: Tissue Value: Roots vs. Whole Plant
  misc_feature: MA Experiment ID: 20000495 Result: Down-regulated in Transcription
  misc_feature: MA Experiment 20000495 PARAMETER Experiment Name: At_Guard_Cells_P Parameter: Harvest Date Value: 8/2/2002
  misc_feature: MA Experiment 20000495 PARAMETER Experiment Name: At_Guard_Cells_P Parameter: Organism Value: A. thaliana
  misc_feature: MA Experiment 20000495 PARAMETER Experiment Name: At_Guard_Cells_P Parameter: Tissue Value: Guard Cells vs. Leaves
  misc_feature: MA Experiment ID: 20001450 Result: Down-regulated in Transcription
  misc_feature: MA Experiment 20001450 PARAMETER Experiment Name: At_Far-red-induction_P Parameter: Age (day) Value: 7
  misc_feature: MA Experiment 20001450 PARAMETER Experiment Name: At_Far-red-induction_P Parameter: Light Value: Far-red vs. White
  misc_feature: MA Experiment 20001450 PARAMETER Experiment Name: At_Far-red-induction_P Parameter: Organism Value: A. thaliana
  misc_feature: MA Experiment 20001450 PARAMETER Experiment Name: At_Far-red-induction_P Parameter: Plant Line Value: Columbia
  misc_feature: MA Experiment 20001450 PARAMETER Experiment Name: At_Far-red-induction_P Parameter: Timepoint (hr) Value: 8
  misc_feature: MA Experiment 20001450 PARAMETER Experiment Name: At_Far-red-induction_P Parameter: Tissue Value: Whole Plant
  misc_feature: MA Experiment ID: 20001451 Result: Down-regulated in Transcription
  misc_feature: MA Experiment 20001451 PARAMETER Experiment Name: At_Far-red-induction_P Parameter: Age (day) Value: 7
  misc_feature: MA Experiment 20001451 PARAMETER Experiment Name: At_Far-red-induction_P Parameter: Light Value: Far-red vs. White
  misc_feature: MA Experiment 20001451 PARAMETER Experiment Name: At_Far-red-induction_P Parameter: Organism Value: A. thaliana
  misc_feature: MA Experiment 20001451 PARAMETER Experiment Name: At_Far-red-induction_P Parameter: Plant Line Value: Columbia
  misc_feature: MA Experiment 20001451 PARAMETER Experiment Name: At_Far-red-induction_P Parameter: Timepoint (hr) Value: 24
  misc_feature: MA Experiment 20001451 PARAMETER Experiment Name: At_Far-red-induction_P Parameter: Tissue Value: Whole Plant
agaaaaatgacttcttcagtactaaccccaagcttaaagcttttagctatgacgaattcttcctcttcgacccttttttgtattccttctatcttcaacatctcgtcctctgaatctcaccgcttcaatttttccttatcctcacgacccgttaatctcacactctctctcaaatccaaaactcttcgtaactcatctcctgttgttactttcgtttcccaaacttcgaattgggctgaggaagaagaaggtgaggatggaagcatcggaggtacttcagtcactgtagatgagagtttcgagtctgaagacggtgttggattcccggagccaccggaagaggctaaattattcgtcggaaacttgccgtacgatgttgatagtcaagctttagctatgctctttgaacaagctggtactgttgagatttcagaggttatatacaatagggacactgatcaaagtcgtggatttgggtttgtaacaatgagtacagttgaagaagcagagaaagctgttgagaagttcaatagttttgaagtgaatgggaggcgtttgacagtaaacagagcagctccaagaggatcaagacctgaacgacaacctcgtgtatatgatgctgcgtttaggatctatgttgggaacctgccatgggatgtggatagtggtcgtttggaacgattatttagcgagcatgggaaagtagttgatgcccgagtggtttctgatagagagacaggtcgttcacgtgggtttgggtttgttcaaatgtcgaatgagaatgaagttaacgttgccattgctgctcttgatggacagaatttggaaggcagagcaattaaagtgaacgtggctgaggaacgaacaaggcgttgattttgatagctcagtgagtgttaatattgtgagttatgattagaaatgttctcacttacaattccaatgtagcgagtatgtgaaaccaaacttgagttcaagcttttgtaaacatattttctttattacccatcaaaacatattacaaaacattacacaaccttttatatgtacactaagacgtgggatg

SEQ ID NO: 47009 - protein, 291 aa, Arabidopsis thaliana
  peptide (1)..(291): Ceres Seq. ID no. 12576108
  misc_feature (211)..(282): Pfam Name: RNA recognition motif. (a.k.a. RRM, RBD, or RNP domain) Pfam Description: RNA recognition motif. (a.k.a. RRM, RBD, or RNP
  misc_feature (211)..(282): Pfam Name: RNA recognition motif. (a.k.a. RRM, RBD, or RNP domain) Pfam Description: RNA recognition motif. (a.k.a. RRM, RBD, or RNP
  misc_feature (72)..(291): Homolog of NCBI NO: 133247 NR Description: 28 KDA RIBONUCLEOPROTEIN, CHLOROPLAST (28RNP)
  misc_feature (73)..(291): Homolog of NCBI NO: 629557 NR Description: RNA-binding protein RNP-D precursor - Arabidopsis
  misc_feature (73)..(291): Homolog of NCBI NO: 15233980 NR Description: 31 kDa ribonucleoprotein, chloroplast precursor
  misc_feature (73)..(291): Homolog of NCBI NO: 15294254 NR Description: AT4g24770/F22K18_30 [Arabidopsis thaliana]
  misc_feature (73)..(291): Homolog of NCBI NO: 475719 NR Description: RNA-binding protein 2
  misc_feature (72)..(291): Homolog of NCBI NO: 133247 NR Description: 28 KDA RIBONUCLEOPROTEIN, CHLOROPLAST (28RNP)
  misc_feature (73)..(291): Homolog of NCBI NO: 15233980 NR Description: 31 kDa ribonucleoprotein, chloroplast precursor
  misc_feature (73)..(291): Homolog of NCBI NO: 475719 NR Description: RNA-binding protein 2
  misc_feature (3)..(291): Homolog of NCBI NO: 15240641 NR Description: chloroplast RNA-binding protein cp31, putative
  misc_feature (41)..(291): Homolog of NCBI NO: 681908 NR Description: cp31 [Arabidopsis thaliana]
  misc_feature (41)..(291): Homolog of NCBI NO: 1076305 NR Description: RNA-binding protein cp31 precursor - Arabidopsis
  misc_feature (18)..(291): Homolog of NCBI NO: 1076251 NR Description: RNA-binding protein - common ice plant
  misc_feature (63)..(291): Homolog of NCBI NO: 99684 NR Description: DNA-binding protein - Arabidopsis thaliana
  misc_feature (73)..(291): Homolog of NCBI NO: 15294254 NR Description: AT4g24770/F22K18_30 [Arabidopsis thaliana]
  misc_feature (73)..(291): Homolog of NCBI NO: 629557 NR Description: RNA-binding protein RNP-D precursor - Arabidopsis
  misc_feature (63)..(291): Homolog of NCBI NO: 99684 NR Description: DNA-binding protein - Arabidopsis thaliana
  misc_feature (18)..(291): Homolog of NCBI NO: 1076251 NR Description: RNA-binding protein - common ice plant
  misc_feature (41)..(291): Homolog of NCBI NO: 1076305 NR Description: RNA-binding protein cp31 precursor - Arabidopsis
  misc_feature (41)..(291): Homolog of NCBI NO: 681908 NR Description: cp31 [Arabidopsis thaliana]
  misc_feature (3)..(291): Homolog of NCBI NO: 15240641 NR Description: chloroplast RNA-binding protein cp31, putative
RKMTSSVLTPSLKLLAMTNSSSSTLFCIPSIFNISSSESHRFNFSLSSRPVNLTLSLKSKTLRNSSPVVTFVSQTSNWAEEEEGEDGSIGGTSVTVDESFESEDGVGFPEPPEEAKLFVGNLPYDVDSQALAMLFEQAGTVEISEVIYNRDTDQSRGFGFVTMSTVEEAEKAVEKFNSFEVNGRRLTVNRAAPRGSRPERQPRVYDAAFRIYVGNLPWDVDSGRLERLFSEHGKVVDARVVSDRETGRSRGFGFVQMSNENEVNVAIAALDGQNLEGRAIKVNVAEERTRR

SEQ ID NO: 47010 - protein, 289 aa, Arabidopsis thaliana
  peptide (1)..(289): Ceres Seq. ID no. 12576109
  misc_feature (209)..(280): Pfam Name: RNA recognition motif. (a.k.a. RRM, RBD, or RNP domain) Pfam Description: RNA recognition motif. (a.k.a. RRM, RBD, or RNP
  misc_feature (209)..(280): Pfam Name: RNA recognition motif. (a.k.a. RRM, RBD, or RNP domain) Pfam Description: RNA recognition motif. (a.k.a. RRM, RBD, or RNP
  misc_feature (70)..(289): Homolog of NCBI NO: 133247 NR Description: 28 KDA RIBONUCLEOPROTEIN, CHLOROPLAST (28RNP)
  misc_feature (71)..(289): Homolog of NCBI NO: 629557 NR Description: RNA-binding protein RNP-D precursor - Arabidopsis
  misc_feature (71)..(289): Homolog of NCBI NO: 15233980 NR Description: 31 kDa ribonucleoprotein, chloroplast precursor
  misc_feature (71)..(289): Homolog of NCBI NO: 15294254 NR Description: AT4g24770/F22K18_30 [Arabidopsis thaliana]
  misc_feature (71)..(289): Homolog of NCBI NO: 475719 NR Description: RNA-binding protein 2
  misc_feature (70)..(289): Homolog of NCBI NO: 133247 NR Description: 28 KDA RIBONUCLEOPROTEIN, CHLOROPLAST (28RNP)
  misc_feature (71)..(289): Homolog of NCBI NO: 15233980 NR Description: 31 kDa ribonucleoprotein, chloroplast precursor
  misc_feature (71)..(289): Homolog of NCBI NO: 475719 NR Description: RNA-binding protein 2
  misc_feature (1)..(289): Homolog of NCBI NO: 15240641 NR Description: chloroplast RNA-binding protein cp31, putative
  misc_feature (39)..(289): Homolog of NCBI NO: 681908 NR Description: cp31 [Arabidopsis thaliana]
  misc_feature (39)..(289): Homolog of NCBI NO: 1076305 NR Description: RNA-binding protein cp31 precursor - Arabidopsis
  misc_feature (16)..(289): Homolog of NCBI NO: 1076251 NR Description: RNA-binding protein - common ice plant
  misc_feature (61)..(289): Homolog of NCBI NO: 99684 NR Description: DNA-binding protein - Arabidopsis thaliana
  misc_feature (71)..(289): Homolog of NCBI NO: 15294254 NR Description: AT4g24770/F22K18_30 [Arabidopsis thaliana]
  misc_feature (71)..(289): Homolog of NCBI NO: 629557 NR Description: RNA-binding protein RNP-D precursor - Arabidopsis
  misc_feature (61)..(289): Homolog of NCBI NO: 99684 NR Description: DNA-binding protein - Arabidopsis thaliana
  misc_feature (16)..(289): Homolog of NCBI NO: 1076251 NR Description: RNA-binding protein - common ice plant
  misc_feature (39)..(289): Homolog of NCBI NO: 1076305 NR Description: RNA-binding protein cp31 precursor - Arabidopsis
  misc_feature (39)..(289): Homolog of NCBI NO: 681908 NR Description: cp31 [Arabidopsis thaliana]
  misc_feature (1)..(289): Homolog of NCBI NO: 15240641 NR Description: chloroplast RNA-binding protein cp31, putative
MTSSVLTPSLKLLAMTNSSSSTLFCIPSIFNISSSESHRFNFSLSSRPVNLTLSLKSKTLRNSSPVVTFVSQTSNWAEEEEGEDGSIGGTSVTVDESFESEDGVGFPEPPEEAKLFVGNLPYDVDSQALAMLFEQAGTVEISEVIYNRDTDQSRGFGFVTMSTVEEAEKAVEKFNSFEVNGRRLTVNRAAPRGSRPERQPRVYDAAFRIYVGNLPWDVDSGRLERLFSEHGKVVDARVVSDRETGRSRGFGFVQMSNENEVNVAIAALDGQNLEGRAIKVNVAEERTRR

SEQ ID NO: 47011 - protein, 275 aa, Arabidopsis thaliana
  peptide (1)..(275): Ceres Seq. ID no. 12576110
  misc_feature (195)..(266): Pfam Name: RNA recognition motif. (a.k.a. RRM, RBD, or RNP domain) Pfam Description: RNA recognition motif. (a.k.a. RRM, RBD, or RNP
  misc_feature (195)..(266): Pfam Name: RNA recognition motif. (a.k.a. RRM, RBD, or RNP domain) Pfam Description: RNA recognition motif. (a.k.a. RRM, RBD, or RNP
  misc_feature (56)..(275): Homolog of NCBI NO: 133247 NR Description: 28 KDA RIBONUCLEOPROTEIN, CHLOROPLAST (28RNP)
  misc_feature (57)..(275): Homolog of NCBI NO: 15233980 NR Description: 31 kDa ribonucleoprotein, chloroplast precursor
  misc_feature (57)..(275): Homolog of NCBI NO: 15294254 NR Description: AT4g24770/F22K18_30 [Arabidopsis thaliana]
  misc_feature (57)..(275): Homolog of NCBI NO: 629557 NR Description: RNA-binding protein RNP-D precursor - Arabidopsis
  misc_feature (57)..(275): Homolog of NCBI NO: 475719 NR Description: RNA-binding protein 2
  misc_feature (56)..(275): Homolog of NCBI NO: 133247 NR Description: 28 KDA RIBONUCLEOPROTEIN, CHLOROPLAST (28RNP)
  misc_feature (57)..(275): Homolog of NCBI NO: 15294254 NR Description: AT4g24770/F22K18_30 [Arabidopsis thaliana]
  misc_feature (57)..(275): Homolog of NCBI NO: 475719 NR Description: RNA-binding protein 2
  misc_feature (1)..(275): Homolog of NCBI NO: 15240641 NR Description: chloroplast RNA-binding protein cp31, putative
  misc_feature (25)..(275): Homolog of NCBI NO: 681908 NR Description: cp31 [Arabidopsis thaliana]
  misc_feature (25)..(275): Homolog of NCBI NO: 1076305 NR Description: RNA-binding protein cp31 precursor - Arabidopsis
  misc_feature (2)..(275): Homolog of NCBI NO: 1076251 NR Description: RNA-binding protein - common ice plant
  misc_feature (47)..(275): Homolog of NCBI NO: 99684 NR Description: DNA-binding protein - Arabidopsis thaliana
  misc_feature (57)..(275): Homolog of NCBI NO: 629557 NR Description: RNA-binding protein RNP-D precursor - Arabidopsis
  misc_feature (57)..(275): Homolog of NCBI NO: 15233980 NR Description: 31 kDa ribonucleoprotein, chloroplast precursor
  misc_feature (47)..(275): Homolog of NCBI NO: 99684 NR Description: DNA-binding protein - Arabidopsis thaliana
  misc_feature (2)..(275): Homolog of NCBI NO: 1076251 NR Description: RNA-binding protein - common ice plant
  misc_feature (25)..(275): Homolog of NCBI NO: 1076305 NR Description: RNA-binding protein cp31 precursor - Arabidopsis
  misc_feature (25)..(275): Homolog of NCBI NO: 681908 NR Description: cp31 [Arabidopsis thaliana]
  misc_feature (1)..(275): Homolog of NCBI NO: 15240641 NR Description: chloroplast RNA-binding protein cp31, putative
MTNSSSSTLFCIPSIFNISSSESHRFNFSLSSRPVNLTLSLKSKTLRNSSPVVTFVSQTSNWAEEEEGEDGSIGGTSVTVDESFESEDGVGFPEPPEEAKLFVGNLPYDVDSQALAMLFEQAGTVEISEVIYNRDTDQSRGFGFVTMSTVEEAEKAVEKFNSFEVNGRRLTVNRAAPRGSRPERQPRVYDAAFRIYVGNLPWDVDSGRLERLFSEHGKVVDARVVSDRETGRSRGFGFVQMSNENEVNVAIAALDGQNLEGRAIKVNVAEERTRR

SEQ ID NO: 47012 - DNA, 945 bp, Arabidopsis thaliana; identical to SEQ ID NO: 22011
  misc_feature (1)..(945): Ceres Seq. ID no. 13592238
  misc_feature: MA Experiment ID: 108434 Result: Up-regulated in Transcription
  misc_feature: MA Experiment 108434 PARAMETER Experiment Name: At_Root_Tips_cDNA_P Parameter: Tissue Value: Root Tips
  misc_feature: MA Experiment ID: 108435 Result: Down-regulated in Transcription
  misc_feature: MA Experiment 108435 PARAMETER Experiment Name: At_stm_Mutants_cDNA_P Parameter: Plant Line Value: wt Landsburg vs stm
  misc_feature: MA Experiment 108435 PARAMETER Experiment Name: At_stm_Mutants_cDNA_P Parameter: Tissue Value: Shoot Apical Meristem Region
  misc_feature: MA Experiment ID: 108488 Result: Up-regulated in Transcription
  misc_feature: MA Experiment ID: 108595 Result: Down-regulated in Transcription
  misc_feature: MA Experiment 108595 PARAMETER Experiment Name: At_Ler-pi_Ovule_cDNA_P Parameter: Plant Line Value: null
  misc_feature: MA Experiment ID: 20000071 Result: Down-regulated in Transcription
  misc_feature: MA Experiment 20000071 PARAMETER Experiment Name: At_100uM_ABA_Mutants_cDNA_P Parameter: Plant Line Value: CS8104
  misc_feature: MA Experiment 20000071 PARAMETER Experiment Name: At_100uM_ABA_Mutants_cDNA_P Parameter: Timepoint (hr) Value: 6
  misc_feature: MA Experiment 20000071 PARAMETER Experiment Name: At_100uM_ABA_Mutants_cDNA_P Parameter: Tissue Value: Aerial
  misc_feature: MA Experiment 20000071 PARAMETER Experiment Name: At_100uM_ABA_Mutants_cDNA_P Parameter: Treatment Value: 100uM ABA vs. No Treatment
  misc_feature: MA Experiment ID: 20000185 Result: Down-regulated in Transcription
  misc_feature: MA Experiment 20000185 PARAMETER Experiment Name: At_Roots__P Parameter: Age (day) Value: 7 vs. 21
  misc_feature: MA Experiment 20000185 PARAMETER Experiment Name: At_Roots__P Parameter: Organism Value: A. thaliana
  misc_feature: MA Experiment 20000185 PARAMETER Experiment Name: At_Roots__P Parameter: Tissue Value: Roots vs. Whole Plant
  misc_feature: MA Experiment ID: 20000437 Result: Down-regulated in Transcription
  misc_feature: MA Experiment 20000437 PARAMETER Experiment Name: At_Drought_P Parameter: Age (day) Value: 8
  misc_feature: MA Experiment 20000437 PARAMETER Experiment Name: At_Drought_P Parameter: Organism Value: A. thaliana
  misc_feature: MA Experiment 20000437 PARAMETER Experiment Name: At_Drought_P Parameter: Plant Line Value: WS
  misc_feature: MA Experiment 20000437 PARAMETER Experiment Name: At_Drought_P Parameter: Timepoint (hr) Value: 24
  misc_feature: MA Experiment 20000437 PARAMETER Experiment Name: At_Drought_P Parameter: Tissue Value: Whole Plant
  misc_feature: MA Experiment 20000437 PARAMETER Experiment Name: At_Drought_P Parameter: Treatment Value: Drought vs. No Drought
  misc_feature: MA Experiment ID: 20000439 Result: Down-regulated in Transcription
  misc_feature: MA Experiment 20000439 PARAMETER Experiment Name: At_Roots__P Parameter: Age (day) Value: 14 vs. 21
  misc_feature: MA Experiment 20000439 PARAMETER Experiment Name: At_Roots__P Parameter: Organism Value: A. thaliana
  misc_feature: MA Experiment 20000439 PARAMETER Experiment Name: At_Roots__P Parameter: Tissue Value: Roots vs. Whole Plant
  misc_feature: MA Experiment ID: 20000794 Result: Down-regulated in Transcription
  misc_feature: MA Experiment 20000794 PARAMETER Experiment Name: At_Petals_P Parameter: Age (day) Value: 23-25 days
  misc_feature: MA Experiment 20000794 PARAMETER Experiment Name: At_Petals_P Parameter: Plant Line Value: WS
  misc_feature: MA Experiment 20000794 PARAMETER Experiment Name: At_Petals_P Parameter: Tissue Value: Petals vs. Whole plant
  misc_feature: MA Experiment ID: 20001757 Result: Up-regulated in Transcription
  misc_feature: MA Experiment 20001757 PARAMETER Experiment Name: At_50mM_NH4NO3_L-to-H_P Parameter: Timepoint (hr) Value: 6
  misc_feature: MA Experiment 20001757 PARAMETER Experiment Name: At_50mM_NH4NO3_L-to-H_P Parameter: Tissue Value: Leaf
  misc_feature: MA Experiment 20001757 PARAMETER Experiment Name: At_50mM_NH4NO3_L-to-H_P Parameter: Treatment Value: 50mM NH4NO3 vs 100mM Mannitol
  misc_feature: MA Experiment ID: 20001906 Result: Down-regulated in Transcription
  misc_feature: MA Experiment 20001906 PARAMETER Experiment Name: At_Drought_Reproduction_P Parameter: Age (day) Value: 35
  misc_feature: MA Experiment 20001906 PARAMETER Experiment Name: At_Drought_Reproduction_P Parameter: Organism Value: A. thaliana
  misc_feature: MA Experiment 20001906 PARAMETER Experiment Name: At_Drought_Reproduction_P Parameter: Plant Line Value: WS
  misc_feature: MA Experiment 20001906 PARAMETER Experiment Name: At_Drought_Reproduction_P Parameter: Timepoint (day) Value: 5
  misc_feature: MA Experiment 20001906 PARAMETER Experiment Name: At_Drought_Reproduction_P Parameter: Tissue Value: Siliques
  misc_feature: MA Experiment 20001906 PARAMETER Experiment Name: At_Drought_Reproduction_P Parameter: Treatment Value: Drought vs. No Drought
  misc_feature: MA Experiment ID: 20001911 Result: Down-regulated in Transcription
  misc_feature: MA Experiment 20001911 PARAMETER Experiment Name: At_Drought_Reproduction_P Parameter: Age (day) Value: 40
  misc_feature: MA Experiment 20001911 PARAMETER Experiment Name: At_Drought_Reproduction_P Parameter: Organism Value: A. thaliana
  misc_feature: MA Experiment 20001911 PARAMETER Experiment Name: At_Drought_Reproduction_P Parameter: Plant Line Value: WS
  misc_feature: MA Experiment 20001911 PARAMETER Experiment Name: At_Drought_Reproduction_P Parameter: Timepoint (day) Value: 10
  misc_feature: MA Experiment 20001911 PARAMETER Experiment Name: At_Drought_Reproduction_P Parameter: Tissue Value: Flowers
  misc_feature: MA Experiment 20001911 PARAMETER Experiment Name: At_Drought_Reproduction_P Parameter: Treatment Value: Drought vs. No Drought

SEQ ID NO: 47013 - protein, 255 aa, Arabidopsis thaliana; identical to SEQ ID NO: 22012
  peptide (1)..(255): Ceres Seq. ID no. 13592239
  misc_feature (119)..(246): Pfam Name: Ribosomal protein L13 Pfam Description: Ribosomal protein L13
  misc_feature (119)..(246): Pfam Name: Ribosomal protein L13 Pfam Description: Ribosomal protein L13
  misc_feature (117)..(247): Homolog of NCBI NO: 23042794 NR Description: hypothetical protein [Trichodesmium erythraeum
  misc_feature (116)..(236): Homolog of NCBI NO: 23124102 NR Description: hypothetical protein [Nostoc punctiforme]
  misc_feature (102)..(246): Homolog of NCBI NO: 33241135 NR Description: Ribosomal protein L13
  misc_feature (114)..(246): Homolog of NCBI NO: 16329914 NR Description: 50S ribosomal protein L13 [Synechocystis sp. PCC
  misc_feature (116)..(246): Homolog of NCBI NO: 33864025 NR Description: 50S ribosomal protein L13 [Prochlorococcus
  misc_feature (117)..(247): Homolog of NCBI NO: 23042794 NR Description: hypothetical protein [Trichodesmium erythraeum
  misc_feature (102)..(246): Homolog of NCBI NO: 33241135 NR Description: Ribosomal protein L13
  misc_feature (116)..(246): Homolog of NCBI NO: 33864025 NR Description: 50S ribosomal protein L13 [Prochlorococcus
  misc_feature (15)..(255): Homolog of NCBI NO: 15218435 NR Description: ribosomal protein L13p family [Arabidopsis
  misc_feature (15)..(255): Homolog of NCBI NO: 132659 NR Description: 50S RIBOSOMAL PROTEIN L13, CHLOROPLAST PRECURSOR
  misc_feature (66)..(252): Homolog of NCBI NO: 34909522 NR Description: putative ribosomal protein L13
  misc_feature (116)..(246): Homolog of NCBI NO: 17231680 NR Description: 50S ribosomal protein L13 [Nostoc sp. PCC 7120]
  misc_feature (119)..(246): Homolog of NCBI NO: 22297652 NR Description: 50S ribosomal protein L13 [Thermosynechococcus
  misc_feature (114)..(246): Homolog of NCBI NO: 16329914 NR Description: 50S ribosomal protein L13 [Synechocystis sp. PCC
  misc_feature (116)..(236): Homolog of NCBI NO: 23124102 NR Description: hypothetical protein [Nostoc punctiforme]
  misc_feature (119)..(246): Homolog of NCBI NO: 22297652 NR Description: 50S ribosomal protein L13 [Thermosynechococcus
  misc_feature (116)..(246): Homolog of NCBI NO: 17231680 NR Description: 50S ribosomal protein L13 [Nostoc sp. PCC 7120]
  misc_feature (66)..(252): Homolog of NCBI NO: 34909522 NR Description: putative ribosomal protein L13
  misc_feature (15)..(255): Homolog of NCBI NO: 132659 NR Description: 50S RIBOSOMAL PROTEIN L13, CHLOROPLAST PRECURSOR
  misc_feature (15)..(255): Homolog of NCBI NO: 15218435 NR Description: ribosomal protein L13p family [Arabidopsis

SEQ ID NO: 47014 - protein, 241 aa, Arabidopsis thaliana; identical to SEQ ID NO: 22013
  peptide (1)..(241): Ceres Seq. ID no. 13592240
  misc_feature (105)..(232): Pfam Name: Ribosomal protein L13 Pfam Description: Ribosomal protein L13
  misc_feature (105)..(232): Pfam Name: Ribosomal protein L13 Pfam Description: Ribosomal protein L13
  misc_feature (103)..(233): Homolog of NCBI NO: 23042794 NR Description: hypothetical protein [Trichodesmium erythraeum
  misc_feature (102)..(222): Homolog of NCBI NO: 23124102 NR Description: hypothetical protein [Nostoc punctiforme]
  misc_feature (88)..(232): Homolog of NCBI NO: 33241135 NR Description: Ribosomal protein L13
  misc_feature (100)..(232): Homolog of NCBI NO: 16329914 NR Description: 50S ribosomal protein L13 [Synechocystis sp. PCC
  misc_feature (102)..(232): Homolog of NCBI NO: 33864025 NR Description: 50S ribosomal protein L13 [Prochlorococcus
  misc_feature (103)..(233): Homolog of NCBI NO: 23042794 NR Description: hypothetical protein [Trichodesmium erythraeum
  misc_feature (88)..(232): Homolog of NCBI NO: 33241135 NR Description: Ribosomal protein L13
  misc_feature (102)..(232): Homolog of NCBI NO: 33864025 NR Description: 50S ribosomal protein L13 [Prochlorococcus
  misc_feature (1)..(241): Homolog of NCBI NO: 15218435 NR Description: ribosomal protein L13p family [Arabidopsis
  misc_feature (1)..(241): Homolog of NCBI NO: 132659 NR Description: 50S RIBOSOMAL PROTEIN L13, CHLOROPLAST PRECURSOR
  misc_feature (52)..(238): Homolog of NCBI NO: 34909522 NR Description: putative ribosomal protein L13
  misc_feature (102)..(232): Homolog of NCBI NO: 17231680 NR Description: 50S ribosomal protein L13 [Nostoc sp. PCC 7120]
  misc_feature (105)..(232): Homolog of NCBI NO: 22297652 NR Description: 50S ribosomal protein L13 [Thermosynechococcus
  misc_feature (100)..(232): Homolog of NCBI NO: 16329914 NR Description: 50S ribosomal protein L13 [Synechocystis sp. PCC
  misc_feature (102)..(222): Homolog of NCBI NO: 23124102 NR Description: hypothetical protein [Nostoc punctiforme]
  misc_feature (105)..(232): Homolog of NCBI NO: 22297652 NR Description: 50S ribosomal protein L13 [Thermosynechococcus
  misc_feature (102)..(232): Homolog of NCBI NO: 17231680 NR Description: 50S ribosomal protein L13 [Nostoc sp. PCC 7120]
  misc_feature (52)..(238): Homolog of NCBI NO: 34909522 NR Description: putative ribosomal protein L13
  misc_feature (1)..(241): Homolog of NCBI NO: 132659 NR Description: 50S RIBOSOMAL PROTEIN L13, CHLOROPLAST PRECURSOR
  misc_feature (1)..(241): Homolog of NCBI NO: 15218435 NR Description: ribosomal protein L13p family [Arabidopsis

SEQ ID NO: 47015 - protein, 167 aa, Arabidopsis thaliana; identical to SEQ ID NO: 22014
  peptide (1)..(167): Ceres Seq. ID no. 13592241
  misc_feature (31)..(158): Pfam Name: Ribosomal protein L13 Pfam Description: Ribosomal protein L13
  misc_feature (31)..(158): Pfam Name: Ribosomal protein L13 Pfam Description: Ribosomal protein L13
  misc_feature (29)..(159): Homolog of NCBI NO: 23042794 NR Description: hypothetical protein [Trichodesmium erythraeum
  misc_feature (28)..(148): Homolog of NCBI NO: 23124102 NR Description: hypothetical protein [Nostoc punctiforme]
  misc_feature (14)..(158): Homolog of NCBI NO: 33241135 NR Description: Ribosomal protein L13
  misc_feature (26)..(158): Homolog of NCBI NO: 16329914 NR Description: 50S ribosomal protein L13 [Synechocystis sp. PCC
  misc_feature (28)..(158): Homolog of NCBI NO: 33864025 NR Description: 50S ribosomal protein L13 [Prochlorococcus
  misc_feature (29)..(159): Homolog of NCBI NO: 23042794 NR Description: hypothetical protein [Trichodesmium erythraeum
  misc_feature (14)..(158): Homolog of NCBI NO: 33241135 NR Description: Ribosomal protein L13
  misc_feature (28)..(158): Homolog of NCBI NO: 33864025 NR Description: 50S ribosomal protein L13 [Prochlorococcus
  misc_feature (1)..(167): Homolog of NCBI NO: 15218435 NR Description: ribosomal protein L13p family [Arabidopsis
  misc_feature (1)..(167): Homolog of NCBI NO: 132659 NR Description: 50S RIBOSOMAL PROTEIN L13, CHLOROPLAST PRECURSOR
  misc_feature (1)..(164): Homolog of NCBI NO: 34909522 NR Description: putative ribosomal protein L13
  misc_feature (28)..(158): Homolog of NCBI NO: 17231680 NR Description: 50S ribosomal protein L13 [Nostoc sp. PCC 7120]
  misc_feature (31)..(158): Homolog of NCBI NO: 22297652 NR Description: 50S ribosomal protein L13 [Thermosynechococcus
  misc_feature (26)..(158): Homolog of NCBI NO: 16329914 NR Description: 50S ribosomal protein L13 [Synechocystis sp. PCC
  misc_feature (28)..(148): Homolog of NCBI NO: 23124102 NR Description: hypothetical protein [Nostoc punctiforme]
  misc_feature (31)..(158): Homolog of NCBI NO: 22297652 NR Description: 50S ribosomal protein L13 [Thermosynechococcus
  misc_feature (28)..(158): Homolog of NCBI NO: 17231680 NR Description: 50S ribosomal protein L13 [Nostoc sp. PCC 7120]
  misc_feature (1)..(164): Homolog of NCBI NO: 34909522 NR Description: putative ribosomal protein L13
  misc_feature (1)..(167): Homolog of NCBI NO: 132659 NR Description: 50S RIBOSOMAL PROTEIN L13, CHLOROPLAST PRECURSOR
  misc_feature (1)..(167): Homolog of NCBI NO: 15218435 NR Description: ribosomal protein L13p family [Arabidopsis

SEQ ID NO: 47016 - DNA, 1917 bp, Arabidopsis thaliana
  misc_feature (1)..(1917): Ceres Seq. ID no. 12728489
  misc_feature: MA Experiment ID: 20000437 Result: Up-regulated in Transcription
  misc_feature: MA Experiment 20000437 PARAMETER Experiment Name: At_Drought_P Parameter: Age (day) Value: 8
  misc_feature: MA Experiment 20000437 PARAMETER Experiment Name: At_Drought_P Parameter: Organism Value: A. thaliana
  misc_feature: MA Experiment 20000437 PARAMETER Experiment Name: At_Drought_P Parameter: Plant Line Value: WS
  misc_feature: MA Experiment 20000437 PARAMETER Experiment Name: At_Drought_P Parameter: Timepoint (hr) Value: 24
  misc_feature: MA Experiment 20000437 PARAMETER Experiment Name: At_Drought_P Parameter: Tissue Value: Whole Plant
  misc_feature: MA Experiment 20000437 PARAMETER Experiment Name: At_Drought_P Parameter: Treatment Value: Drought vs. No Drought
  misc_feature: MA Experiment ID: 20001911 Result: Up-regulated in Transcription
  misc_feature: MA Experiment 20001911 PARAMETER Experiment Name: At_Drought_Reproduction_P Parameter: Age (day) Value: 40
  misc_feature: MA Experiment 20001911 PARAMETER Experiment Name: At_Drought_Reproduction_P Parameter: Organism Value: A. thaliana
  misc_feature: MA Experiment 20001911 PARAMETER Experiment Name: At_Drought_Reproduction_P Parameter: Plant Line Value: WS
  misc_feature: MA Experiment 20001911 PARAMETER Experiment Name: At_Drought_Reproduction_P Parameter: Timepoint (day) Value: 10
  misc_feature: MA Experiment 20001911 PARAMETER Experiment Name: At_Drought_Reproduction_P Parameter: Tissue Value: Flowers
  misc_feature: MA Experiment 20001911 PARAMETER Experiment Name: At_Drought_Reproduction_P Parameter: Treatment Value: Drought vs. No Drought
aaacgaagatctatctgcatgatttgggcttagctttttcgtccccaaatattgcgcttcatcgagattgctagggtttctcctcttcgatcttcgctgctcatcaacatctattgattcaattttcgtgctattgtttccctctctgatttcttaatcggaaatttcgtctcgattcgattcattaggttccatcactcttttctgatcggtgaaaggaggagaagacctgttgttttcttatgtaagtgattctgatattcgttatctgttggctggtttgatgaggaagaagcggaaaggtagtgaaactgagggttgggagaatttaccagatgatttatcatgttcaactgcatcacgatcatccaacttcaggtcgcacttttcactagagggttatgctagacttaagaaacggtgtaaggagactgaagctgtcgagtctgttggttcctttaagagacgaattgctggtgttgctactgcacctccttgtggtgcatcatctttggtttcgtcaggaagaggtttgaagaggaagatagggtgcatagatgtttccacacagactggtaggaagaataaaatagacgatgactatgtttttggtcgaaatattgggaaagggaaatttgggtcagtcaggatctgtaagtctaggaagaatgggactgagtttgcttgtaaaactctgaagaagggggaggagactgttcaccgggaagttgagataatgcaacatttgtctggtcatcctcgggttgtcacattgcatgctgtgtatgaagagtcagactgtttccatcttgtgatggagctgtgttcagggggacgtttgattgatcagatggtaaaggtgggcaggtattctgagcaacgagcagctaatatattcaaggaccttatgctagtgatcaattattgccatgagatgggagttgtgcatagagatataaaacctgagaatattctcctaacagctgctgggaagatacagctggctgattttggcctcgccatgagaattgcaaaaggtcaaacactgtcaggattggcaggaagtcctgcttatgttgcacctgaagttctttccgaaaattattcagagaaggttgacgtttggagtgcaggtgtcctcttatacgctctcttgtctggtgtactcccttttaagggagactcattggatgctattttcgaagcaatcaaaaacgtgaagcttgatttcaacacgggagtgtgggagtctgtgtccaaacctgcccgtgatctcttggcgagaatgctaacaagggaagaatctgccagaatcacagcggatgaagtgctaaggcatccatggatactcttttacacagaccggacactcaagaccatgtgtatcaagtcgaagcacaagagtcaagcaggatcttctacgtgtctccagaatcgcagtcccacagagaaaactgacctaaacagagctgacagggaaaagaagataccatctgattcaccgactgattcattctccaacacagaggaggaagaagatgagagcggtgtggtcgatgtgcttgttgttgcaatcgccaacgtgaggatctcagaaccaaagagaagcagagtctgtagtcccaccaataaccccattgagcagcaacactcttctaacttgacctcgactagtacactctgtcgagctttctgacaaaaccacaaacgcagatgggcattgtccaagcgacaagctatggtttctccacgatcttagtgacctttctgttataatagttggtgatatgattctgtgttttttcctcttctatatctcttactttgaccatgtacagatcatgtaaatagaatatgctaaacaaatgattgatccgatttggatcggagttataaggtgttgtttctagtcccttc

SEQ ID NO: 47017 - protein, 470 aa, Arabidopsis thaliana
  peptide (1)..(470): Ceres Seq. ID no. 12728490
  misc_feature (107)..(355): Pfam Name: Protein kinase domain Pfam Description: Protein kinase domain
  misc_feature (98)..(355): Homolog of NCBI NO: 2944385 NR Description: calcium dependent protein kinase [Oryza sativa]
  misc_feature (99)..(355): Homolog of NCBI NO: 7428007 NR Description: calcium-dependent protein kinase (EC 2.7.1.-) -
  misc_feature (103)..(362): Homolog of NCBI NO: 34898032 NR Description: ESTs AU030197(E50746),AU030196(E50746) correspond a region of the predicted gene.~Similar to calcium-dependent
  misc_feature (103)..(362): Homolog of NCBI NO: 25553562 NR Description: OSJNBa0038F22.11 [Oryza sativa (japonica
  misc_feature (84)..(354): Homolog of NCBI NO: 15224978 NR Description: putative calcium-dependent protein kinase
  misc_feature (107)..(370): Homolog of NCBI NO: 6721111 NR Description: T4O12.25 [Arabidopsis thaliana]
  misc_feature (101)..(355): Homolog of NCBI NO: 15222023 NR Description: calcium-dependent protein kinase, putative
  misc_feature (103)..(386): Homolog of NCBI NO: 21064945 NR Description: CDPK-like protein [Solanum tuberosum]
  misc_feature (1)..(470): Homolog of NCBI NO: 15222045 NR Description: calcium dependent protein kinase, putative
  misc_feature (1)..(470): Homolog of NCBI NO: 25402738 NR Description: protein T12C24.22 [imported] - Arabidopsis
MRKKRKGSETEGWENLPDDLSCSTASRSSNFRSHFSLEGYARLKKRCKETEAVESVGSFKRRIAGVATAPPCGASSLVSSGRGLKRKIGCIDVSTQTGRKNKIDDDYVFGRNIGKGKFGSVRICKSRKNGTEFACKTLKKGEETVHREVEIMQHLSGHPRVVTLHAVYEESDCFHLVMELCSGGRLIDQMVKVGRYSEQRAANIFKDLMLVINYCHEMGVVHRDIKPENILLTAAGKIQLADFGLAMRIAKGQTLSGLAGSPAYVAPEVLSENYSEKVDVWSAGVLLYALLSGVLPFKGDSLDAIFEAIKNVKLDFNTGVWESVSKPARDLLARMLTREESARITADEVLRHPWILFYTDRTLKTMCIKSKHKSQAGSSTCLQNRSPTEKTDLNRADREKKIPSDSPTDSFSNTEEEEDESGVVDVLVVAIANVRISEPKRSRVCSPTNNPIEQQHSSNLTSTSTLCRAF

SEQ ID NO: 47018 - protein, 319 aa, Arabidopsis thaliana
  peptide (1)..(319): Ceres Seq. ID no. 12728491
  misc_feature (1)..(204): Pfam Name: Protein kinase domain Pfam Description: Protein kinase domain
  misc_feature (1)..(204): Homolog of NCBI NO: 2944385 NR Description: calcium dependent protein kinase [Oryza sativa]
  misc_feature (1)..(204): Homolog of NCBI NO: 7428007 NR Description: calcium-dependent protein kinase (EC 2.7.1.-) -
  misc_feature (1)..(211): Homolog of NCBI NO: 34898032 NR Description: ESTs AU030197(E50746),AU030196(E50746) correspond a region of the predicted gene.~Similar to calcium-dependent
  misc_feature (1)..(211): Homolog of NCBI NO: 25553562 NR Description: OSJNBa0038F22.11 [Oryza sativa (japonica
  misc_feature (1)..(203): Homolog of NCBI NO: 15224978 NR Description: putative calcium-dependent protein kinase
  misc_feature (1)..(219): Homolog of NCBI NO: 6721111 NR Description: T4O12.25 [Arabidopsis thaliana]
  misc_feature (1)..(204): Homolog of NCBI NO: 15222023 NR Description: calcium-dependent protein kinase, putative
  misc_feature (1)..(235): Homolog of NCBI NO: 21064945 NR Description: CDPK-like protein [Solanum tuberosum]
  misc_feature (1)..(319): Homolog of NCBI NO: 15222045 NR Description: calcium dependent protein kinase, putative
  misc_feature (1)..(319): Homolog of NCBI NO: 25402738 NR Description: protein T12C24.22 [imported] - Arabidopsis
MQHLSGHPRVVTLHAVYEESDCFHLVMELCSGGRLIDQMVKVGRYSEQRAANIFKDLMLVINYCHEMGVVHRDIKPENILLTAAGKIQLADFGLAMRIAKGQTLSGLAGSPAYVAPEVLSENYSEKVDVWSAGVLLYALLSGVLPFKGDSLDAIFEAIKNVKLDFNTGVWESVSKPARDLLARMLTREESARITADEVLRHPWILFYTDRTLKTMCIKSKHKSQAGSSTCLQNRSPTEKTDLNRADREKKIPSDSPTDSFSNTEEEEDESGVVDVLVVAIANVRISEPKRSRVCSPTNNPIEQQHSSNLTSTSTLCRAF

SEQ ID NO: 47019 - protein, 293 aa, Arabidopsis thaliana
  peptide (1)..(293): Ceres Seq. ID no. 12728492
  misc_feature (1)..(178): Pfam Name: Protein kinase domain Pfam Description: Protein kinase domain
  misc_feature (1)..(178): Homolog of NCBI NO: 2944385 NR Description: calcium dependent protein kinase [Oryza sativa]
  misc_feature (1)..(178): Homolog of NCBI NO: 7428007 NR Description: calcium-dependent protein kinase (EC 2.7.1.-) -
  misc_feature (1)..(185): Homolog of NCBI NO: 34898032 NR Description: ESTs AU030197(E50746),AU030196(E50746) correspond a region of the predicted gene.~Similar to calcium-dependent
  misc_feature (1)..(185): Homolog of NCBI NO: 25553562 NR Description: OSJNBa0038F22.11 [Oryza sativa (japonica
  misc_feature (1)..(177): Homolog of NCBI NO: 15224978 NR Description: putative calcium-dependent protein kinase
  misc_feature (1)..(193): Homolog of NCBI NO: 6721111 NR Description: T4O12.25 [Arabidopsis thaliana]
  misc_feature (1)..(178): Homolog of NCBI NO: 15222023 NR Description: calcium-dependent protein kinase, putative
  misc_feature (1)..(209): Homolog of NCBI NO: 21064945 NR Description: CDPK-like protein [Solanum tuberosum]
  misc_feature (1)..(293): Homolog of NCBI NO: 15222045 NR Description: calcium dependent protein kinase, putative
  misc_feature (1)..(293): Homolog of NCBI NO: 25402738 NR Description: protein T12C24.22 [imported] - Arabidopsis
MELCSGGRLIDQMVKVGRYSEQRAANIFKDLMLVINYCHEMGVVHRDIKPENILLTAAGKIQLADFGLAMRIAKGQTLSGLAGSPAYVAPEVLSENYSEKVDVWSAGVLLYALLSGVLPFKGDSLDAIFEAIKNVKLDFNTGVWESVSKPARDLLARMLTREESARITADEVLRHPWILFYTDRTLKTMCIKSKHKSQAGSSTCLQNRSPTEKTDLNRADREKKIPSDSPTDSFSNTEEEEDESGVVDVLVVAIANVRISEPKRSRVCSPTNNPIEQQHSSNLTSTSTLCRAF

SEQ ID NO: 47020 - DNA, 1479 bp, Arabidopsis thaliana
  misc_feature (1)..(1479): Ceres Seq. ID no. 14310182
  misc_feature: MA Experiment ID: 20000166 Result: Up-regulated in Transcription
  misc_feature: MA Experiment 20000166 PARAMETER Experiment Name: At_100uM_ABA_P Parameter: Age (day) Value: 14
  misc_feature: MA Experiment 20000166 PARAMETER Experiment Name: At_100uM_ABA_P Parameter: Organism Value: A. thaliana
  misc_feature: MA Experiment 20000166 PARAMETER Experiment Name: At_100uM_ABA_P Parameter: Plant Line Value: WS
  misc_feature: MA Experiment 20000166 PARAMETER Experiment Name: At_100uM_ABA_P Parameter: Timepoint (hr) Value: 1
  misc_feature: MA Experiment 20000166 PARAMETER Experiment Name: At_100uM_ABA_P Parameter: Tissue Value: Aerial
  misc_feature: MA Experiment 20000166 PARAMETER Experiment Name: At_100uM_ABA_P Parameter: Treatment Value: 100uM ABA vs. No Treatment
  misc_feature: MA Experiment ID: 20000173 Result: Down-regulated in Transcription
  misc_feature: MA Experiment 20000173 PARAMETER Experiment Name: At_42deg_Heat_P Parameter: Age (day) Value: 14
  misc_feature: MA Experiment 20000173 PARAMETER Experiment Name: At_42deg_Heat_P Parameter: Organism Value: A. thaliana
  misc_feature: MA Experiment 20000173 PARAMETER Experiment Name: At_42deg_Heat_P Parameter: Plant Line Value: WS
  misc_feature: MA Experiment 20000173 PARAMETER Experiment Name: At_42deg_Heat_P Parameter: Temperature (deg C) Value: 42 vs. 22
  misc_feature: MA Experiment 20000173 PARAMETER Experiment Name: At_42deg_Heat_P Parameter: Timepoint (hr) Value: 6
  misc_feature: MA Experiment 20000173 PARAMETER Experiment Name: At_42deg_Heat_P Parameter: Tissue Value: Aerial
  misc_feature: MA Experiment ID: 20000180 Result: Down-regulated in Transcription
  misc_feature: MA Experiment 20000180 PARAMETER Experiment Name: At_Germinating_Seeds_P Parameter: Age (hr) Value: 24 vs. 0
  misc_feature: MA Experiment 20000180 PARAMETER Experiment Name: At_Germinating_Seeds_P Parameter: Tissue Value: Germinating Seeds
  misc_feature: MA Experiment ID: 20000182 Result: Up-regulated in Transcription
  misc_feature: MA Experiment 20000182 PARAMETER Experiment Name: At_2mM_SA_P Parameter: Age (day) Value: 14
  misc_feature: MA Experiment 20000182 PARAMETER Experiment Name: At_2mM_SA_P Parameter: Organism Value: A. thaliana
  misc_feature: MA Experiment 20000182 PARAMETER Experiment Name: At_2mM_SA_P Parameter: Plant Line Value: WS
  misc_feature: MA Experiment 20000182 PARAMETER Experiment Name: At_2mM_SA_P Parameter: Timepoint (hr) Value: 6
  misc_feature: MA Experiment 20000182 PARAMETER Experiment Name: At_2mM_SA_P Parameter: Tissue Value: Aerial
  misc_feature: MA Experiment 20000182 PARAMETER Experiment Name: At_2mM_SA_P Parameter: Treatment Value: 2mM SA vs. No Treatment
  misc_feature: MA Experiment ID: 20000185 Result: Up-regulated in Transcription
  misc_feature: MA Experiment 20000185 PARAMETER Experiment Name: At_Roots__P Parameter: Age (day) Value: 7 vs. 21
  misc_feature: MA Experiment 20000185 PARAMETER Experiment Name: At_Roots__P Parameter: Organism Value: A. thaliana
  misc_feature: MA Experiment 20000185 PARAMETER Experiment Name: At_Roots__P Parameter: Tissue Value: Roots vs. Whole Plant
  misc_feature: MA Experiment ID: 20000234 Result: Down-regulated in Transcription
  misc_feature: MA Experiment 20000234 PARAMETER Experiment Name: At_Siliques_P Parameter: Age (day) Value: 21
  misc_feature: MA Experiment 20000234 PARAMETER Experiment Name: At_Siliques_P Parameter: Organism Value: A. thaliana
  misc_feature: MA Experiment 20000234 PARAMETER Experiment Name: At_Siliques_P Parameter: Plant Line Value: WS
  misc_feature: MA Experiment 20000234 PARAMETER Experiment Name: At_Siliques_P Parameter: Tissue Value: Less Than 5mm Siliques vs. Whole Plant
  misc_feature: MA Experiment ID: 20000264 Result: Down-regulated in Transcription
  misc_feature: MA Experiment 20000264 PARAMETER Experiment Name: At_Open_Flower_P Parameter: Age (day) Value: 21
  misc_feature: MA Experiment 20000264 PARAMETER Experiment Name: At_Open_Flower_P Parameter: Plant Line Value: WS
  misc_feature: MA Experiment 20000264 PARAMETER Experiment Name: At_Open_Flower_P Parameter: Tissue Value: Open Flower vs. Whole Plant
  misc_feature: MA Experiment ID: 20000265 Result: Down-regulated in Transcription
  misc_feature: MA Experiment 20000265 PARAMETER Experiment Name: At_Open_Flower_P Parameter: Age (day) Value: 21
  misc_feature: MA Experiment 20000265 PARAMETER Experiment Name: At_Open_Flower_P Parameter: Plant Line Value: WS
  misc_feature: MA Experiment 20000265 PARAMETER Experiment Name: At_Open_Flower_P Parameter: Tissue Value: Closed Flower vs. Whole Plant
  misc_feature: MA Experiment ID: 20000438 Result: Down-regulated in Transcription
  misc_feature: MA Experiment 20000438 PARAMETER Experiment Name: At_Shoots__P Parameter: Age (day) Value: 14
  misc_feature: MA Experiment 20000438 PARAMETER Experiment Name: At_Shoots__P Parameter: Tissue Value: Shoots vs. Whole Plant
  misc_feature: MA Experiment ID: 20000439 Result: Up-regulated in Transcription
  misc_feature: MA Experiment 20000439 PARAMETER Experiment Name: At_Roots__P Parameter: Age (day) Value: 14 vs. 21
  misc_feature: MA Experiment 20000439 PARAMETER Experiment Name: At_Roots__P Parameter: Organism Value: A. thaliana
  misc_feature: MA Experiment 20000439 PARAMETER Experiment Name: At_Roots__P Parameter: Tissue Value: Roots vs. Whole Plant
  misc_feature: MA Experiment ID: 20000443 Result: Up-regulated in Transcription
  misc_feature: MA Experiment 20000443 PARAMETER Experiment Name: At_1uM_BR-BRZ__P Parameter: Tissue Value: Shoot Apices
  misc_feature: MA Experiment 20000443 PARAMETER Experiment Name: At_1uM_BR-BRZ__P Parameter: Treatment Value: 1uM BRZ vs. No Treatment
  misc_feature: MA Experiment ID: 20000445 Result: Up-regulated in Transcription
  misc_feature: MA Experiment 20000445 PARAMETER Experiment Name: At_100uM_NAA__P Parameter: Age (day) Value: 14
  misc_feature: MA Experiment 20000445 PARAMETER Experiment Name: At_100uM_NAA__P Parameter: Organism Value: A. thaliana
  misc_feature: MA Experiment 20000445 PARAMETER Experiment Name: At_100uM_NAA__P Parameter: Plant Line Value: WS
  misc_feature: MA Experiment 20000445 PARAMETER Experiment Name: At_100uM_NAA__P Parameter: Timepoint (hr) Value: 6
  misc_feature: MA Experiment 20000445 PARAMETER Experiment Name: At_100uM_NAA__P Parameter: Tissue Value: Aerial
  misc_feature: MA Experiment 20000445 PARAMETER Experiment Name: At_100uM_NAA__P Parameter: Treatment Value: 100uM NAA vs. No Treatment
  misc_feature: MA Experiment ID: 20000456 Result: Up-regulated in Transcription
  misc_feature: MA Experiment 20000456 PARAMETER Experiment Name: At_100uM_BA_P Parameter: Age (day) Value: 14
  misc_feature: MA Experiment 20000456 PARAMETER Experiment Name: At_100uM_BA_P Parameter: Organism Value: A. thaliana
  misc_feature: MA Experiment 20000456 PARAMETER Experiment Name: At_100uM_BA_P Parameter: Plant Line Value: WS
  misc_feature: MA Experiment 20000456 PARAMETER Experiment Name: At_100uM_BA_P Parameter: Timepoint (hr) Value: 6
  misc_feature: MA Experiment 20000456 PARAMETER Experiment Name: At_100uM_BA_P Parameter: Tissue Value: Aerial
  misc_feature: MA Experiment 20000456 PARAMETER Experiment Name: At_100uM_BA_P Parameter: Treatment Value: 100uM BA vs. No Treatment
  misc_feature: MA Experiment ID: 20000527 Result: Down-regulated in Transcription
  misc_feature: MA Experiment 20000527 PARAMETER Experiment Name: At_10percent_PEG_P Parameter: Age (day) Value: 20
  misc_feature: MA Experiment 20000527 PARAMETER Experiment Name: At_10percent_PEG_P Parameter: Organism Value: A. thaliana
  misc_feature: MA Experiment 20000527 PARAMETER Experiment Name: At_10percent_PEG_P Parameter: Plant Line Value: WS
  misc_feature: MA Experiment 20000527 PARAMETER Experiment Name: At_10percent_PEG_P Parameter: Timepoint (day) Value: 20
  misc_feature: MA Experiment 20000527 PARAMETER Experiment Name: At_10percent_PEG_P Parameter: Tissue Value: Whole Plant
  misc_feature: MA Experiment 20000527 PARAMETER Experiment Name: At_10percent_PEG_P Parameter: Treatment Value: 10percent PEG vs. No Treatment
  misc_feature: MA Experiment ID: 20000575 Result: Down-regulated in Transcription
  misc_feature: MA Experiment 20000575 PARAMETER Experiment Name: At_100uM_ABA_Mutants__P Parameter: Organism Value: A. thaliana
  misc_feature: MA Experiment 20000575 PARAMETER Experiment Name: At_100uM_ABA_Mutants__P Parameter: Plant Line Value: CS22
  misc_feature: MA Experiment 20000575 PARAMETER Experiment Name: At_100uM_ABA_Mutants__P Parameter: Timepoint (hr) Value: 6
  misc_feature: MA Experiment 20000575 PARAMETER Experiment Name: At_100uM_ABA_Mutants__P Parameter: Tissue Value: Whole Plant
  misc_feature: MA Experiment 20000575 PARAMETER Experiment Name: At_100uM_ABA_Mutants__P Parameter: Treatment Value: 1uM ABA vs. No Treatment
  misc_feature: MA Experiment ID: 20000576 Result: Down-regulated in Transcription
  misc_feature: MA Experiment 20000576 PARAMETER Experiment Name: At_100uM_ABA_Mutants__P Parameter: Organism Value: A. thaliana
  misc_feature: MA Experiment 20000576 PARAMETER Experiment Name: At_100uM_ABA_Mutants__P Parameter: Plant Line Value: CS23
  misc_feature: MA Experiment 20000576 PARAMETER Experiment Name: At_100uM_ABA_Mutants__P Parameter: Timepoint (hr) Value: 6
  misc_feature: MA Experiment 20000576 PARAMETER Experiment Name: At_100uM_ABA_Mutants__P Parameter: Tissue Value: Whole Plant
  misc_feature: MA Experiment 20000576 PARAMETER Experiment Name: At_100uM_ABA_Mutants__P Parameter: Treatment Value: 1uM ABA vs. No Treatment
  misc_feature: MA Experiment ID: 20000709 Result: Up-regulated in Transcription
  misc_feature: MA Experiment 20000709 PARAMETER Experiment Name: At_15mM_NH4NO3_L-to-H_P Parameter: Age (hr) Value: 14
  misc_feature: MA Experiment 20000709 PARAMETER Experiment Name: At_15mM_NH4NO3_L-to-H_P Parameter: Organism Value: A. thaliana
  misc_feature: MA Experiment 20000709 PARAMETER Experiment Name: At_15mM_NH4NO3_L-to-H_P Parameter: Plant Line Value: WS
  misc_feature: MA Experiment 20000709 PARAMETER Experiment Name: At_15mM_NH4NO3_L-to-H_P Parameter: Timepoint (hr) Value: 4
  misc_feature: MA Experiment 20000709 PARAMETER Experiment Name: At_15mM_NH4NO3_L-to-H_P Parameter: Tissue Value: Aerial
  misc_feature: MA Experiment 20000709 PARAMETER Experiment Name: At_15mM_NH4NO3_L-to-H_P Parameter: Treatment Value: 15mM NH4NO3 vs. 30mM Mannitol
  misc_feature: MA Experiment ID: 20000794 Result: Down-regulated in Transcription
  misc_feature: MA Experiment 20000794 PARAMETER Experiment Name: At_Petals_P Parameter: Age (day) Value: 23-25 days
  misc_feature: MA Experiment 20000794 PARAMETER Experiment Name: At_Petals_P Parameter: Plant Line Value: WS
  misc_feature: MA Experiment 20000794 PARAMETER Experiment Name: At_Petals_P Parameter: Tissue Value: Petals vs. Whole plant
  misc_feature: MA Experiment ID: 20001560 Result: Up-regulated in Transcription
  misc_feature: MA Experiment 20001560 PARAMETER Experiment Name: At_Drought_Soil_Dry_P Parameter: Age (day) Value: 28
  misc_feature: MA Experiment 20001560 PARAMETER Experiment Name: At_Drought_Soil_Dry_P Parameter: Organism Value: A. thaliana
  misc_feature: MA Experiment 20001560 PARAMETER Experiment Name: At_Drought_Soil_Dry_P Parameter: Plant Line Value: WS
  misc_feature: MA Experiment 20001560 PARAMETER Experiment Name: At_Drought_Soil_Dry_P Parameter: Post Timepoint (hr) Value: None
  misc_feature: MA Experiment 20001560 PARAMETER Experiment Name: At_Drought_Soil_Dry_P Parameter: Post-Treatment Value: None
  misc_feature: MA Experiment 20001560 PARAMETER Experiment Name: At_Drought_Soil_Dry_P Parameter: Timepoint (day) Value: 14
  misc_feature: MA Experiment 20001560 PARAMETER Experiment Name: At_Drought_Soil_Dry_P Parameter: Treatment Value: Drought vs. No Drought
  misc_feature: MA Experiment ID: 20001755 Result: Down-regulated in Transcription
  misc_feature: MA Experiment 20001755 PARAMETER Experiment Name: At_50mM_NH4NO3_L-to-H_P Parameter: Timepoint (hr) Value: 2
  misc_feature: MA Experiment 20001755 PARAMETER Experiment Name: At_50mM_NH4NO3_L-to-H_P Parameter: Tissue Value: Leaf
  misc_feature: MA Experiment 20001755 PARAMETER Experiment Name: At_50mM_NH4NO3_L-to-H_P Parameter: Treatment Value: 50mM NH4NO3 vs 100mM Mannitol
  misc_feature: MA Experiment ID: 20001904 Result: Down-regulated in Transcription
  misc_feature: MA Experiment 20001904 PARAMETER Experiment Name: At_Drought_Reproduction_P Parameter: Age (day) Value: 37
  misc_feature: MA Experiment 20001904 PARAMETER Experiment Name: At_Drought_Reproduction_P Parameter: Organism Value: A. thaliana
  misc_feature: MA Experiment 20001904 PARAMETER Experiment Name: At_Drought_Reproduction_P Parameter: Plant Line Value: WS
  misc_feature: MA Experiment 20001904 PARAMETER Experiment Name: At_Drought_Reproduction_P Parameter: Timepoint (day) Value: 7
  misc_feature: MA Experiment 20001904 PARAMETER Experiment Name: At_Drought_Reproduction_P Parameter: Tissue Value: Rosettes
  misc_feature: MA Experiment 20001904 PARAMETER Experiment Name: At_Drought_Reproduction_P Parameter: Treatment Value: Drought vs. No Drought
gagagagaaattcacaacaaaaatggagactagggaaacaaaaccagtgatctttctcttccctttccctttacaaggtcacttaaacccaatgtttcagctcgccaacatcttcttcaacagaggcttctccatcactgtgatccacactaagttcaactctccaaactcttccaatttccctcacttcagtttcgtatccattcccgatggcttgtctgaacctgaatcctatcccgatgtcattgagattctccatgacctcaattccaagtgtgttgctccttttggtgattgcttaaagaagcttatatctgaagaaccaacagcagcttgtgtgattgttgacgctctttggtacttcactcacgatttaaccgagaaattcaatttcccgaggattgttctccgaaccgttaacctctcagctttcgtcgctttctcaaagtttcatgttttacgagagaaagggtatctttctttacaagagactaaggcagactcaccggttccggagcttccgtatcttagaatgaaggatcttccatggttccagacagaagatccaagatcaggggataagttacagataggtgtgatgaagtcactaaagtcttcctcaggaatcatattcaaagccattgaagatcttgaaacagatcagcttgatgaagcccgcatagaattcccagttccactcttctgtattggaccctttcacaggtacgtttcagcttcatccagtagcttacttgcacacgacatgacttgtctctcctggttagacaagcaagcaacaaattccgtaatctacgcaagtcttggaagcattgcttcgatcgatgaatctgaattcttggagattgcttggggtctaagaaacagcaaccaaccttttctatgggtggttagacccggtttaatccacgggaaagaatggatcgagattctgcctaaagggttcatcaaaaatctcgagggccggtgtaaaatagtgaaatgggcacctcagcctgaagttttagctcaccgtgcaacaggcggattcttaacacattgtggatggaactcaacacttgagggcatatgtgaagctataccaatgatatgcagaccatcttttggggaccagagggtgaatgctagatacattaacgatgtttggaagatcggattgcatttggaaaacaaggtagagagactagtgatcgaaaacgcggttagaacactaatgacgagctcggaaggggaagagatccgcaagaggattatgcccatgaaggaaactgttgaacaatgccttaagcttggaggttcatcatttcggaatctcgaaaacttaattgcttatatattgtctttctaatgcggtgttcttcttctccacatccaaatttgctttcctttgatttaatctgcattcccataataagacacattttatcattcaaaaactttaccatgtatatttgaattatc

SEQ ID NO: 47021 - protein, 454 aa, Arabidopsis thaliana
  peptide (1)..(454): Ceres Seq. ID no. 14310183
  misc_feature (15)..(444): Pfam Name: UDP-glucoronosyl and UDP-glucosyl transferase Pfam Description: UDP-glucoronosyl and UDP-glucosyl transferase
  misc_feature (19)..(454): Homolog of NCBI NO: 21593451 NR Description: glucuronosyl transferase-like protein
  misc_feature (8)..(454): Homolog of NCBI NO: 15228174 NR Description: glycosyltransferase family [Arabidopsis thaliana]
  misc_feature (17)..(454): Homolog of NCBI NO: 15239287 NR Description: glucuronosyl transferase-related protein
  misc_feature (17)..(454): Homolog of NCBI NO: 15239288 NR Description: glucuronosyl transferase-related protein
  misc_feature (17)..(454): Homolog of NCBI NO: 15239259 NR Description: UDP-glycosyltransferase family [Arabidopsis
  misc_feature (8)..(448): Homolog of NCBI NO: 15239258 NR Description: glucuronosyl transferase-related protein
  misc_feature (8)..(452): Homolog of NCBI NO: 15239257 NR Description: glucuronosyl transferase-related protein
  misc_feature (228)..(454): Homolog of NCBI NO: 12322891 NR Description: putative UDP-glucuronosyltransferase, 5' partial;
  misc_feature (8)..(454): Homolog of NCBI NO: 26452976 NR Description: unknown protein [Arabidopsis thaliana]
  misc_feature (8)..(454): Homolog of NCBI NO: 15229731 NR Description: glycosyltransferase family [Arabidopsis thaliana]
REKFTTKMETRETKPVIFLFPFPLQGHLNPMFQLANIFFNRGFSITVIHTKFNSPNSSNFPHFSFVSIPDGLSEPESYPDVIEILHDLNSKCVAPFGDCLKKLISEEPTAACVIVDALWYFTHDLTEKFNFPRIVLRTVNLSAFVAFSKFHVLREKGYLSLQETKADSPVPELPYLRMKDLPWFQTEDPRSGDKLQIGVMKSLKSSSGIIFKAIEDLETDQLDEARIEFPVPLFCIGPFHRYVSASSSSLLAHDMTCLSWLDKQATNSVIYASLGSIASIDESEFLEIAWGLRNSNQPFLWVVRPGLIHGKEWIEILPKGFIKNLEGRCKIVKWAPQPEVLAHRATGGFLTHCGWNSTLEGICEAIPMICRPSFGDQRVNARYINDVWKIGLHLENKVERLVIENAVRTLMTSSEGEEIRKRIMPMKETVEQCLKLGGSSFRNLENLIAYILSF

SEQ ID NO: 47022 - protein, 447 aa, Arabidopsis thaliana
  peptide (1)..(447): Ceres Seq. ID no. 14310184
  misc_feature (8)..(437): Pfam Name: UDP-glucoronosyl and UDP-glucosyl transferase Pfam Description: UDP-glucoronosyl and UDP-glucosyl transferase
  misc_feature (12)..(447): Homolog of NCBI NO: 21593451 NR Description: glucuronosyl transferase-like protein
  misc_feature (1)..(447): Homolog of NCBI NO: 15228174 NR Description: glycosyltransferase family [Arabidopsis thaliana]
  misc_feature (10)..(447): Homolog of NCBI NO: 15239287 NR Description: glucuronosyl transferase-related protein
  misc_feature (10)..(447): Homolog of NCBI NO: 15239288 NR Description: glucuronosyl transferase-related protein
  misc_feature (10)..(447): Homolog of NCBI NO: 15239259 NR Description: UDP-glycosyltransferase family [Arabidopsis
  misc_feature (1)..(441): Homolog of NCBI NO: 15239258 NR Description: glucuronosyl transferase-related protein
  misc_feature (1)..(445): Homolog of NCBI NO: 15239257 NR Description: glucuronosyl transferase-related protein
  misc_feature (221)..(447): Homolog of NCBI NO: 12322891 NR Description: putative UDP-glucuronosyltransferase, 5' partial;
  misc_feature (1)..(447): Homolog of NCBI NO: 26452976 NR Description: unknown protein [Arabidopsis thaliana]
  misc_feature (1)..(447): Homolog of NCBI NO: 15229731 NR Description: glycosyltransferase family [Arabidopsis thaliana]
METRETKPVIFLFPFPLQGHLNPMFQLANIFFNRGFSITVIHTKFNSPNSSNFPHFSFVSIPDGLSEPESYPDVIEILHDLNSKCVAPFGDCLKKLISEEPTAACVIVDALWYFTHDLTEKFNFPRIVLRTVNLSAFVAFSKFHVLREKGYLSLQETKADSPVPELPYLRMKDLPWFQTEDPRSGDKLQIGVMKSLKSSSGIIFKAIEDLETDQLDEARIEFPVPLFCIGPFHRYVSASSSSLLAHDMTCLSWLDKQATNSVIYASLGSIASIDESEFLEIAWGLRNSNQPFLWVVRPGLIHGKEWIEILPKGFIKNLEGRCKIVKWAPQPEVLAHRATGGFLTHCGWNSTLEGICEAIPMICRPSFGDQRVNARYINDVWKIGLHLENKVERLVIENAVRTLMTSSEGEEIRKRIMPMKETVEQCLKLGGSSFRNLENLIAYILSF

SEQ ID NO: 47023 - protein, 424 aa, Arabidopsis thaliana
  peptide (1)..(424): Ceres Seq. ID no. 14310185
  misc_feature (1)..(414): Pfam Name: UDP-glucoronosyl and UDP-glucosyl transferase Pfam Description: UDP-glucoronosyl and UDP-glucosyl transferase
  misc_feature (1)..(424): Homolog of NCBI NO: 21593451 NR Description: glucuronosyl transferase-like protein
  misc_feature (1)..(424): Homolog of NCBI NO: 15228174 NR Description: glycosyltransferase family [Arabidopsis thaliana]
  misc_feature (1)..(424): Homolog of NCBI NO: 15239287 NR Description: glucuronosyl transferase-related protein
  misc_feature (1)..(424): Homolog of NCBI NO: 15239288 NR Description: glucuronosyl transferase-related protein
  misc_feature (1)..(424): Homolog of NCBI NO: 15239259 NR Description: UDP-glycosyltransferase family [Arabidopsis
  misc_feature (1)..(418): Homolog of NCBI NO: 15239258 NR Description: glucuronosyl transferase-related protein
  misc_feature (1)..(422): Homolog of NCBI NO: 15239257 NR Description: glucuronosyl transferase-related protein
  misc_feature (198)..(424): Homolog of NCBI NO: 12322891 NR Description: putative UDP-glucuronosyltransferase, 5' partial;
  misc_feature (1)..(424): Homolog of NCBI NO: 26452976 NR Description: unknown protein [Arabidopsis thaliana]
  misc_feature (1)..(424): Homolog of NCBI NO: 15229731 NR Description: glycosyltransferase family [Arabidopsis thaliana]
MFQLANIFFNRGFSITVIHTKFNSPNSSNFPHFSFVSIPDGLSEPESYPDVIEILHDLNSKCVAPFGDCLKKLISEEPTAACVIVDALWYFTHDLTEKFNFPRIVLRTVNLSAFVAFSKFHVLREKGYLSLQETKADSPVPELPYLRMKDLPWFQTEDPRSGDKLQIGVMKSLKSSSGIIFKAIEDLETDQLDEARIEFPVPLFCIGPFHRYVSASSSSLLAHDMTCLSWLDKQATNSVIYASLGSIASIDESEFLEIAWGLRNSNQPFLWVVRPGLIHGKEWIEILPKGFIKNLEGRCKIVKWAPQPEVLAHRATGGFLTHCGWNSTLEGICEAIPMICRPSFGDQRVNARYINDVWKIGLHLENKVERLVIENAVRTLMTSSEGEEIRKRIMPMKETVEQCLKLGGSSFRNLENLIAYILSF

SEQ ID NO: 47024 - DNA, 2930 bp, Arabidopsis thaliana
  misc_feature (1)..(2930): Ceres Seq. ID no. 13591795
  misc_feature: MA Experiment ID: 20000185 Result: Up-regulated in Transcription
  misc_feature: MA Experiment 20000185 PARAMETER Experiment Name: At_Roots__P Parameter: Age (day) Value: 7 vs. 21
  misc_feature: MA Experiment 20000185 PARAMETER Experiment Name: At_Roots__P Parameter: Organism Value: A. thaliana
  misc_feature: MA Experiment 20000185 PARAMETER Experiment Name: At_Roots__P Parameter: Tissue Value: Roots vs. Whole Plant
  misc_feature: MA Experiment ID: 20000227 Result: Down-regulated in Transcription
  misc_feature: MA Experiment 20000227 PARAMETER Experiment Name: At_Root-Tips-vs-Tops_P Parameter: Tissue Value: Root Tips vs. Root Tops
  misc_feature: MA Experiment ID: 20000235 Result: Up-regulated in Transcription
  misc_feature: MA Experiment 20000235 PARAMETER Experiment Name: At_Siliques_P Parameter: Age (day) Value: 21
  misc_feature: MA Experiment 20000235 PARAMETER Experiment Name: At_Siliques_P Parameter: Organism Value: A. thaliana
  misc_feature: MA Experiment 20000235 PARAMETER Experiment Name: At_Siliques_P Parameter: Plant Line Value: WS
  misc_feature: MA Experiment 20000235 PARAMETER Experiment Name: At_Siliques_P Parameter: Tissue Value: 5-10mm Siliques vs. Whole Plant
  misc_feature: MA Experiment ID: 20000264 Result: Up-regulated in Transcription
  misc_feature: MA Experiment 20000264 PARAMETER Experiment Name: At_Open_Flower_P Parameter: Age (day) Value: 21
  misc_feature: MA Experiment 20000264 PARAMETER Experiment Name: At_Open_Flower_P Parameter: Plant Line Value: WS
  misc_feature: MA Experiment 20000264 PARAMETER Experiment Name: At_Open_Flower_P Parameter: Tissue Value: Open Flower vs. Whole Plant
  misc_feature: MA Experiment ID: 20000265 Result: Up-regulated in Transcription
  misc_feature: MA Experiment 20000265 PARAMETER Experiment Name: At_Open_Flower_P Parameter: Age (day) Value: 21
  misc_feature: MA Experiment 20000265 PARAMETER Experiment Name: At_Open_Flower_P Parameter: Plant Line Value: WS
  misc_feature: MA Experiment 20000265 PARAMETER Experiment Name: At_Open_Flower_P Parameter: Tissue Value: Closed Flower vs. Whole Plant
  misc_feature: MA Experiment ID: 20000286 Result: Up-regulated in Transcription
  misc_feature: MA Experiment 20000286 PARAMETER Experiment Name: At_Open_Flower_P Parameter: Age (day) Value: 21
  misc_feature: MA Experiment 20000286 PARAMETER Experiment Name: At_Open_Flower_P Parameter: Plant Line Value: WS
  misc_feature: MA Experiment 20000286 PARAMETER Experiment Name: At_Open_Flower_P Parameter: Tissue Value: Half Open vs. Whole Plant
  misc_feature: MA Experiment ID: 20000437 Result: Up-regulated in Transcription
  misc_feature: MA Experiment 20000437 PARAMETER Experiment Name: At_Drought_P Parameter: Age (day) Value: 8
  misc_feature: MA Experiment 20000437 PARAMETER Experiment Name: At_Drought_P Parameter: Organism Value: A. thaliana
  misc_feature: MA Experiment 20000437 PARAMETER Experiment Name: At_Drought_P Parameter: Plant Line Value: WS
  misc_feature: MA Experiment 20000437 PARAMETER Experiment Name: At_Drought_P Parameter: Timepoint (hr) Value: 24
  misc_feature: MA Experiment 20000437 PARAMETER Experiment Name: At_Drought_P Parameter: Tissue Value: Whole Plant
  misc_feature: MA Experiment 20000437 PARAMETER Experiment Name: At_Drought_P Parameter: Treatment Value: Drought vs. No Drought
  misc_feature: MA Experiment ID: 20000439 Result: Up-regulated in Transcription
  misc_feature: MA Experiment 20000439 PARAMETER Experiment Name: At_Roots__P Parameter: Age (day) Value: 14 vs. 21
  misc_feature: MA Experiment 20000439 PARAMETER Experiment Name: At_Roots__P Parameter: Organism Value: A. thaliana
  misc_feature: MA Experiment 20000439 PARAMETER Experiment Name: At_Roots__P Parameter: Tissue Value: Roots vs. Whole Plant
  misc_feature: MA Experiment ID: 20000495 Result: Up-regulated in Transcription
  misc_feature: MA Experiment 20000495 PARAMETER Experiment Name: At_Guard_Cells_P Parameter: Harvest Date Value: 8/2/2002
  misc_feature: MA Experiment 20000495 PARAMETER Experiment Name: At_Guard_Cells_P Parameter: Organism Value: A. thaliana
  misc_feature: MA Experiment 20000495 PARAMETER Experiment Name: At_Guard_Cells_P Parameter: Tissue Value: Guard Cells vs. Leaves
  misc_feature: MA Experiment ID: 20000496 Result: Up-regulated in Transcription
  misc_feature: MA Experiment 20000496 PARAMETER Experiment Name: At_Guard_Cells_P Parameter: Harvest Date Value: 7/19/2002
  misc_feature: MA Experiment 20000496 PARAMETER Experiment Name: At_Guard_Cells_P Parameter: Organism Value: Canola
  misc_feature: MA Experiment 20000496 PARAMETER Experiment Name: At_Guard_Cells_P Parameter: Tissue Value: Guard Cells vs. Leaves
  misc_feature: MA Experiment ID: 20000794 Result: Up-regulated in Transcription
  misc_feature: MA Experiment 20000794 PARAMETER Experiment Name: At_Petals_P Parameter: Age (day) Value: 23-25 days
  misc_feature: MA Experiment 20000794 PARAMETER Experiment Name: At_Petals_P Parameter: Plant Line Value: WS
  misc_feature: MA Experiment 20000794 PARAMETER Experiment Name: At_Petals_P Parameter: Tissue Value: Petals vs. Whole plant
  misc_feature: MA Experiment ID: 20001911 Result: Up-regulated in Transcription
  misc_feature: MA Experiment 20001911 PARAMETER Experiment Name: At_Drought_Reproduction_P Parameter: Age (day) Value: 40
  misc_feature: MA Experiment 20001911 PARAMETER Experiment Name: At_Drought_Reproduction_P Parameter: Organism Value: A. thaliana
  misc_feature: MA Experiment 20001911 PARAMETER Experiment Name: At_Drought_Reproduction_P Parameter: Plant Line Value: WS
  misc_feature: MA Experiment 20001911 PARAMETER Experiment Name: At_Drought_Reproduction_P Parameter: Timepoint (day) Value: 10
  misc_feature: MA Experiment 20001911 PARAMETER Experiment Name: At_Drought_Reproduction_P Parameter: Tissue Value: Flowers
  misc_feature: MA Experiment 20001911 PARAMETER Experiment Name: At_Drought_Reproduction_P Parameter: Treatment Value: Drought vs. No Drought
aaatctcctcacctgcaagagaaaaaaaaaactttcattttattcgtcgtcagtttcatcttgttgcttcggagcgagcgagaattatcgtcggagaatttatcgtctctctctctgaaaattctgatcggtgaagaatcgtcggatcgaaagttcgtttatcttctcgtttacgtttccgtgatttaaatcctttggggtttttttttcttggtaatgtctgtgtttctgaatgtgtggttgatttttgttcgtacactttactttgatcgattaggtttatgtatagttaattgaaattttttggaagatttcagaagaagaagagaagaaacaatccgtaatctagacccttgaattgacctaataataggatacatatgatgactatgaagcagtctttgagtggcagggttcttaggggggtctttggtatctatctgtaggagggcttttaggtgctgtttcgggagattaaagccagattcaaggtgagtctgagagcttggttcttgtatcttcttgtttaccaatgggaatctaggtcactgagaaaccatccttcttgttgatctagtggaaaaaatcgattatttttctatcccaagtagttgctttttctttcttaaccttaacttgtgcaatcttcattctacctaagcatttccccttgataatgaaactctttaatcatctctgatttggccaagagtgttctttttttttgtcatctcatctatggtggattaacagaggttcctcttagttattcttcaagaaggcggcatgaatgctcactttgtttgtagtctgcttatctcagctatggtctccatagtgagtttcccttagagcatatctcgttgttgtccatgatgaagtttttgctccatgcggatcttgtgaacttgctagtagaatttttccgggtaacggcatcagaagatttttattccttcgattatggggttaccatttaggtcaagccaaaacaggtcagctttaaagatgggggtccattaactaggagtacccttcaagcctttgtttccttaaagaaatttctgattcgtatgttgactgaagagatctggtgcaaagtggcagtgggaggtaggtctatcctctttggacacttacccatctctttaaaacccggttatcccaagttttatgtcagtcccaaaccttgtttgatggtgtttgccttgcttttacgataggttggtcatatccggttgaaactggatagatttcccaagattgaaggactgaagtgaacactcaatgtgctaagcttttatttctctatgaaagctccatcaaccaagagggctgtttttagttgtttaacagggtatttgtagatcttcttgttttggtgattgttcctcttggagaaagctgattggagctgtttcaaaaatggattgtcttggtgtggtgcaatgtagatggaagcaacagttcatcgagtttttttgctggattttcaggtgactgataatgtttgcgaaatgaggaatagattttctaaatattttcttacttgcaggtttcataagctttccatcaactagcagtatctgccaatatcacagacagataattcgtaatgggagacgtatatttcaaccatttcgctcagcaactgcagatgtctgaccaagagaagggtgaaatgtcaagacattcacaccctcattcaatcaatgaagaatctgagtcgtcaactctggaaagggtagcagcagagtcattaacaaacaaagtccttgatagaggactaatggagtatgggtaggttttactccctatttgtatattcttagctttgagcttgtttcttggatgaatacccctatgttcttgcagatgtccacattacagaagaaggtgttgcattagagctccttgctgtaatgagatctttggttgccatcactgtcattatgaggcgaagaacaacataaatgtagatcagaagcagaggcatgatattcctcgccaccaagttgaacaggttatttgtttactttgtggtactgaacaagaggtgggccaaatttgtatccactgtggagtgtgcatggggaagtacttctgtaaagtctgcaagctctacgatgatgatacgtctaaaaaacagtaccactgcgatgggtgtggaatttgcagaatcggaggacgtgaaaatttctttcactgttacaagtgtggctgttgttattcaatcctcctcaagaacggtcacccttgtgtcgaaggagcaatgcatcacgactgccccatttgctttgagtttctgtttgaatcacggaacgatgtgacggttttaccatgtggacacacaattcatcagaagtgcttggaggaaatgagagatcattaccaatatgcgtgcccactttgctcaaaatctgtatgcgacatgtcaaaagtgtgggagaagtttgacatggagattgcggctacaccaatgccagaaccataccagaacagaatggttcagattctctgcaacgactgtgggaagaaagcagaggtacagtaccatgtggtggctcagaaatgcccaaactgcaaatcatacaacactcgccaaaccagaggctgaagctttttttgaagttgatttgctatcaaatgcaattaagagcttttcacttgatccaatagtgtcattggatccttaacttgaggactgggtctctcgagtctatctcttctcactctcttcttcaatattctctgagtcgtctcttgttcactagtctatatgtttccttggtgttgtttgatggtctggttagtttccattgtgattcatctcctttgtaattctgcggctttattgaaaagtttcgtttaatctgttaaaaaccctaaaaaatttgaacttgtatgaataaaaaattttagctgctcgc

SEQ ID NO: 47025 - protein, 175 aa, Arabidopsis thaliana
  peptide (1)..(175): Ceres Seq. ID no. 13591796
  misc_feature (66)..(108): Pfam Name: Zinc finger, C3HC4 type (RING finger) Pfam Description: Zinc finger, C3HC4 type (RING finger)
  misc_feature (1)..(69): Homolog of NCBI NO: 15239467 NR Description: hypothetical protein [Arabidopsis thaliana]
  misc_feature (1)..(172): Homolog of NCBI NO: 30695702 NR Description: expressed protein [Arabidopsis thaliana]
  misc_feature (1)..(172): Homolog of NCBI NO: 30102616 NR Description: At3g62970 [Arabidopsis thaliana]
  misc_feature (1)..(171): Homolog of NCBI NO: 15238890 NR Description: expressed protein [Arabidopsis thaliana]
  misc_feature (1)..(175): Homolog of NCBI NO: 21593716 NR Description: PGPD14 protein [Arabidopsis thaliana]
  misc_feature (1)..(175): Homolog of NCBI NO: 15237169 NR Description: PGPD14 protein [Arabidopsis thaliana]
  misc_feature (1)..(175): Homolog of NCBI NO: 37535002 NR Description: putative PGPD14 protein (pollen germination
  misc_feature (8)..(175): Homolog of NCBI NO: 15239467 NR Description: hypothetical protein [Arabidopsis thaliana]
  misc_feature (1)..(175): Homolog of NCBI NO: 4105798 NR Description: PGPD14 [Petunia x hybrida]
  misc_feature (1)..(172): Homolog of NCBI NO: 34910658 NR Description: putative PGPD14 protein (pollen germination
MGKYFCKVCKLYDDDTSKKQYHCDGCGICRIGGRENFFHCYKCGCCYSILLKNGHPCVEGAMHHDCPICFEFLFESRNDVTVLPCGHTIHQKCLEEMRDHYQYACPLCSKSVCDMSKVWEKFDMEIAATPMPEPYQNRMVQILCNDCGKKAEVQYHVVAQKCPNCKSYNTRQTRG

SEQ ID NO: 47026 - protein, 114 aa, Arabidopsis thaliana
  peptide (1)..(114): Ceres Seq. ID no. 13591797
  misc_feature (5)..(47): Pfam Name: Zinc finger, C3HC4 type (RING finger) Pfam Description: Zinc finger, C3HC4 type (RING finger)
  misc_feature (1)..(111): Homolog of NCBI NO: 11358168 NR Description: hypothetical protein T20O10.70 - Arabidopsis
  misc_feature (1)..(111): Homolog of NCBI NO: 30695702 NR Description: expressed protein [Arabidopsis thaliana]
  misc_feature (1)..(111): Homolog of NCBI NO: 30102616 NR Description: At3g62970 [Arabidopsis thaliana]
  misc_feature (1)..(110): Homolog of NCBI NO: 15238890 NR Description: expressed protein [Arabidopsis thaliana]
  misc_feature (1)..(114): Homolog of NCBI NO: 21593716 NR Description: PGPD14 protein [Arabidopsis thaliana]
  misc_feature (1)..(114): Homolog of NCBI NO: 15237169 NR Description: PGPD14 protein [Arabidopsis thaliana]
  misc_feature (1)..(114): Homolog of NCBI NO: 37535002 NR Description: putative PGPD14 protein (pollen germination
  misc_feature (1)..(114): Homolog of NCBI NO: 15239467 NR Description: hypothetical protein [Arabidopsis thaliana]
  misc_feature (1)..(114): Homolog of NCBI NO: 4105798 NR Description: PGPD14 [Petunia x hybrida]
  misc_feature (1)..(111): Homolog of NCBI NO: 34910658 NR Description: putative PGPD14 protein (pollen germination
MHHDCPICFEFLFESRNDVTVLPCGHTIHQKCLEEMRDHYQYACPLCSKSVCDMSKVWEKFDMEIAATPMPEPYQNRMVQILCNDCGKKAEVQYHVVAQKCPNCKSYNTRQTRG

SEQ ID NO: 47027 - protein, 111 aa, Arabidopsis thaliana
  peptide (1)..(111): Ceres Seq. ID no. 13591798
MIFLATKLNRLFVYFVVLNKRWAKFVSTVECAWGSTSVKSASSTMMIRLKNSTTAMGVEFAESEDVKISFTVTSVAVVIQSSSRTVTLVSKEQCITTAPFALSFCLNHGTM

SEQ ID NO: 47028 - DNA, 2058 bp, Arabidopsis thaliana
  misc_feature (1)..(2058): Ceres Seq. ID no. 12574655
  misc_feature: MA Experiment ID: 20000307 Result: Up-regulated in Transcription
  misc_feature: MA Experiment 20000307 PARAMETER Experiment Name: At_Germinating_Seeds_Sub_P Parameter: Age (hr) Value: 24 vs. 0
  misc_feature: MA Experiment 20000307 PARAMETER Experiment Name: At_Germinating_Seeds_Sub_P Parameter: Organism Value: A. thaliana
  misc_feature: MA Experiment 20000307 PARAMETER Experiment Name: At_Germinating_Seeds_Sub_P Parameter: Plant Line Value: WS
  misc_feature: MA Experiment 20000307 PARAMETER Experiment Name: At_Germinating_Seeds_Sub_P Parameter: Tissue Value: Germinating Seeds
  misc_feature: MA Experiment ID: 20000355 Result: Up-regulated in Transcription
  misc_feature: MA Experiment 20000355 PARAMETER Experiment Name: At_Siliques_Sub_P Parameter: Age (day) Value: 21
  misc_feature: MA Experiment 20000355 PARAMETER Experiment Name: At_Siliques_Sub_P Parameter: Organism Value: A. thaliana
  misc_feature: MA Experiment 20000355 PARAMETER Experiment Name: At_Siliques_Sub_P Parameter: Plant Line Value: WS
  misc_feature: MA Experiment 20000355 PARAMETER Experiment Name: At_Siliques_Sub_P Parameter: Tissue Value: Less Than 5mm Siliques vs. Whole Plant
atgggttgtggatttcacttcccttggttcttcttcttgatcattggccttcaagctcctctctcattgtccctcacttcccaaggatccgcattgttgaagttccgggcaagagtcaactcagatcctcatgggactcttgcgaattggaatgtttctggtattaatgatctctgctattggtcaggggttacttgtgttgacggtaaagtgcagattctggatcttagcggatattctttggaaggaacgttagctcctgagcttagccaattgagtgacttaagatctctaatactctctcggaaccatttctccggtggaattccaaaggagtatgggagtttcgaaaacttggaagtcctggatttgagagagaatgatttgagcggacaaattccacctgagctaagcaatggcttatcgctaaaacacttgttgctttctggtaacaaattttcggatgatatgagaataaagatcgtgagacttcaatcttcgtatgaagttcggttaaagaagagtccaaagttatcacctttggctgttctcggctgtattaacagaaaacttggacactgtgtttcaagaaaccgtatcattcaagtaaaaaaggtagaagctattgtattccggatcaaagcaacctccagacgtttcttgaaagcattccctagctttttggaggaaactgatatctacaaacgacgtgagctactcgaggagacaagtaatttagcggctgagcctgctccttcagctcctagtccttctcccgggattataactgaagcttcacctcgaagcagcgggtctttccctgcagtaaccaatgcaaagaagagaagaccacctttagtccctcctgtaccttctcctgataagggcagtactagtcctgatatctctaagaatcagccacaagataataaacagtcaaaaggatcaaaacatgtatggctgtatgtggttatcgcggttgcttctttcgtcggtttactgattatagtagcggttatcttcttctgccggaaaagagctgtcaagagcataggtccttggaaaactggtcttagtggacaattgcagaaagcttttgttaccggggtaccaaagctcaatcggtctgagcttgaaacagcgtgtgaagatttcagcaacatcatagagacatttgacggttacactgtgtataaaggaacattgtcgagtggtgttgagatagcggtagcttcaaccgcgattgctgaatctaaagaatggacaagagccatggaaatggcataccgtagaaagattgatactctgtcacggatcaaccataagaactttgtgaatctgattggatactgcgaagaagatgatccttttaataggatgatggtctttgaatatgctccaaatggaactcttttcgaacatttgcacgttaataacgttttccgcctatcagataaggagacagagcatcttgattggagcgcacggatgagaataataatgggaacggcttactgtcttcaacatatgcacgggatgaacccgcctatggctcatacggacttcaattcatcggaaatctacctaaccgatgactacgcagccaaggtctcggagattccattcaacttagaggcaagattaaatccgaagaaacacgtgagtggagacttagagcaaacgtcattgttactacctccagaaccggaggctaacgtccatagcttcggagtcctgatgctcgaaatcatctctggaaagctctctttctcagacgaatacggatctatcgagcaatgggcatcgaagtaccttgaaaaagacgacttgggagagatgatagatccatcgttaaagacattcaaagaagaggagcttgaagtgatctgcgatgtgatacgagaatgtctgaaaacagaacagagacaacgaccttcaatgaaagatgtagcggaacaactgaaacaagttatcaacataactcctgagaaagctactccaagatcctctcctctttggtgggcagagctcgaaatcttgtcctctgaagctacttga

SEQ ID NO: 47029 - protein, 685 aa, Arabidopsis thaliana
  peptide (1)..(685): Ceres Seq. ID no. 12574656
  misc_feature (252)..(682): Homolog of NCBI NO: 18405327 NR Description: putative protein kinase
  misc_feature (252)..(682): Homolog of NCBI NO: 4588001 NR Description: hypothetical Ser-Thr protein kinase [Arabidopsis
  misc_feature (262)..(682): Homolog of NCBI NO: 15228810 NR Description: putative protein kinase
  misc_feature (348)..(683): Homolog of NCBI NO: 28916446 NR Description: ser-thr protein kinase [Gossypium hirsutum]
  misc_feature (247)..(685): Homolog of NCBI NO: 34898222 NR Description: P0034A04.22 [Oryza sativa (japonica
  misc_feature (24)..(181): Homolog of NCBI NO: 34911074 NR Description: putative receptor protein kinase-like protein
  misc_feature (270)..(685): Homolog of NCBI NO: 34911074 NR Description: putative receptor protein kinase-like protein
  misc_feature (10)..(685): Homolog of NCBI NO: 34903782 NR Description: unnamed protein product [Oryza sativa (japonica
  misc_feature (1)..(685): Homolog of NCBI NO: 15242513 NR Description: leucine-rich repeat transmembrane protein kinase,
  misc_feature (1)..(685): Homolog of NCBI NO: 9758931 NR Description: receptor protein kinase-like protein [Arabidopsis
MGCGFHFPWFFFLIIGLQAPLSLSLTSQGSALLKFRARVNSDPHGTLANWNVSGINDLCYWSGVTCVDGKVQILDLSGYSLEGTLAPELSQLSDLRSLILSRNHFSGGIPKEYGSFENLEVLDLRENDLSGQIPPELSNGLSLKHLLLSGNKFSDDMRIKIVRLQSSYEVRLKKSPKLSPLAVLGCINRKLGHCVSRNRIIQVKKVEAIVFRIKATSRRFLKAFPSFLEETDIYKRRELLEETSNLAAEPAPSAPSPSPGIITEASPRSSGSFPAVTNAKKRRPPLVPPVPSPDKGSTSPDISKNQPQDNKQSKGSKHVWLYVVIAVASFVGLLIIVAVIFFCRKRAVKSIGPWKTGLSGQLQKAFVTGVPKLNRSELETACEDFSNIIETFDGYTVYKGTLSSGVEIAVASTAIAESKEWTRAMEMAYRRKIDTLSRINHKNFVNLIGYCEEDDPFNRMMVFEYAPNGTLFEHLHVNNVFRLSDKETEHLDWSARMRIIMGTAYCLQHMHGMNPPMAHTDFNSSEIYLTDDYAAKVSEIPFNLEARLNPKKHVSGDLEQTSLLLPPEPEANVHSFGVLMLEIISGKLSFSDEYGSIEQWASKYLEKDDLGEMIDPSLKTFKEEELEVICDVIRECLKTEQRQRPSMKDVAEQLKQVINITPEKATPRSSPLWWAELEILSSEAT

SEQ ID NO: 47030 - protein, 529 aa, Arabidopsis thaliana
  peptide (1)..(529): Ceres Seq. ID no. 12574657
  misc_feature (96)..(526): Homolog of NCBI NO: 18405327 NR Description: putative protein kinase
  misc_feature (96)..(526): Homolog of NCBI NO: 4588001 NR Description: hypothetical Ser-Thr protein kinase [Arabidopsis
  misc_feature (106)..(526): Homolog of NCBI NO: 15228810 NR Description: putative protein kinase
  misc_feature (192)..(527): Homolog of NCBI NO: 28916446 NR Description: ser-thr protein kinase [Gossypium hirsutum]
  misc_feature (91)..(529): Homolog of NCBI NO: 34898222 NR Description: P0034A04.22 [Oryza sativa (japonica
  misc_feature (1)..(25): Homolog of NCBI NO: 34911074 NR Description: putative receptor protein kinase-like protein
  misc_feature (114)..(529): Homolog of NCBI NO: 34911074 NR Description: putative receptor protein kinase-like protein
  misc_feature (1)..(529): Homolog of NCBI NO: 34903782 NR Description: unnamed protein product [Oryza sativa (japonica
  misc_feature (1)..(529): Homolog of NCBI NO: 15242513 NR Description: leucine-rich repeat transmembrane protein kinase,
  misc_feature (1)..(529): Homolog of NCBI NO: 9758931 NR Description: receptor protein kinase-like protein [Arabidopsis
MRIKIVRLQSSYEVRLKKSPKLSPLAVLGCINRKLGHCVSRNRIIQVKKVEAIVFRIKATSRRFLKAFPSFLEETDIYKRRELLEETSNLAAEPAPSAPSPSPGIITEASPRSSGSFPAVTNAKKRRPPLVPPVPSPDKGSTSPDISKNQPQDNKQSKGSKHVWLYVVIAVASFVGLLIIVAVIFFCRKRAVKSIGPWKTGLSGQLQKAFVTGVPKLNRSELETACEDFSNIIETFDGYTVYKGTLSSGVEIAVASTAIAESKEWTRAMEMAYRRKIDTLSRINHKNFVNLIGYCEEDDPFNRMMVFEYAPNGTLFEHLHVNNVFRLSDKETEHLDWSARMRIIMGTAYCLQHMHGMNPPMAHTDFNSSEIYLTDDYAAKVSEIPFNLEARLNPKKHVSGDLEQTSLLLPPEPEANVHSFGVLMLEIISGKLSFSDEYGSIEQWASKYLEKDDLGEMIDPSLKTFKEEELEVICDVIRECLKTEQRQRPSMKDVAEQLKQVINITPEKATPRSSPLWWAELEILSSEAT

SEQ ID NO: 47031 - DNA, 1509 bp, Arabidopsis thaliana; identical to SEQ ID NO: 43466
  misc_feature (1)..(1509): Ceres Seq. ID no. 13646986
  misc_feature: MA Experiment ID: 20000264 Result: Up-regulated in Transcription
  misc_feature: MA Experiment 20000264 PARAMETER Experiment Name: At_Open_Flower_P Parameter: Age (day) Value: 21
  misc_feature: MA Experiment 20000264 PARAMETER Experiment Name: At_Open_Flower_P Parameter: Plant Line Value: WS
  misc_feature: MA Experiment 20000264 PARAMETER Experiment Name: At_Open_Flower_P Parameter: Tissue Value: Open Flower vs. Whole Plant
  misc_feature: MA Experiment ID: 20000265 Result: Up-regulated in Transcription
  misc_feature: MA Experiment 20000265 PARAMETER Experiment Name: At_Open_Flower_P Parameter: Age (day) Value: 21
  misc_feature: MA Experiment 20000265 PARAMETER Experiment Name: At_Open_Flower_P Parameter: Plant Line Value: WS
  misc_feature: MA Experiment 20000265 PARAMETER Experiment Name: At_Open_Flower_P Parameter: Tissue Value: Closed Flower vs. Whole Plant
  misc_feature: MA Experiment ID: 20000286 Result: Up-regulated in Transcription
  misc_feature: MA Experiment 20000286 PARAMETER Experiment Name: At_Open_Flower_P Parameter: Age (day) Value: 21
  misc_feature: MA Experiment 20000286 PARAMETER Experiment Name: At_Open_Flower_P Parameter: Plant Line Value: WS
  misc_feature: MA Experiment 20000286 PARAMETER Experiment Name: At_Open_Flower_P Parameter: Tissue Value: Half Open vs. Whole Plant
  misc_feature: MA Experiment ID: 20000794 Result: Up-regulated in Transcription
  misc_feature: MA Experiment 20000794 PARAMETER Experiment Name: At_Petals_P Parameter: Age (day) Value: 23-25 days
  misc_feature: MA Experiment 20000794 PARAMETER Experiment Name: At_Petals_P Parameter: Plant Line Value: WS
  misc_feature: MA Experiment 20000794 PARAMETER Experiment Name: At_Petals_P Parameter: Tissue Value: Petals vs. Whole plant

SEQ ID NO: 47032 - protein, 393 aa, Arabidopsis thaliana; identical to SEQ ID NO: 43467
  peptide (1)..(393): Ceres Seq. ID no. 13646987
  misc_feature (227)..(249): Pfam Name: Zinc finger, C2H2 type Pfam Description: Zinc finger, C2H2 type
  misc_feature (227)..(249): Pfam Name: Zinc finger, C2H2 type Pfam Description: Zinc finger, C2H2 type
  misc_feature (134)..(362): Homolog of NCBI NO: 34908460 NR Description: P0683F02.21 [Oryza sativa (japonica
  misc_feature (103)..(375): Homolog of NCBI NO: 15223175 NR Description: WIP3 protein [Arabidopsis thaliana]
  misc_feature (199)..(383): Homolog of NCBI NO: 30693123 NR Description: transparent testa 1 (TT1) protein [Arabidopsis
  misc_feature (199)..(381): Homolog of NCBI NO: 18253283 NR Description: transparent testa 1 [Arabidopsis thaliana]
  misc_feature (152)..(388): Homolog of NCBI NO: 15222242 NR Description: zinc finger protein -related [Arabidopsis
  misc_feature (134)..(362): Homolog of NCBI NO: 34908460 NR Description: P0683F02.21 [Oryza sativa (japonica
  misc_feature (199)..(383): Homolog of NCBI NO: 30693123 NR Description: transparent testa 1 (TT1) protein [Arabidopsis
  misc_feature (152)..(388): Homolog of NCBI NO: 15222242 NR Description: zinc finger protein -related [Arabidopsis
  misc_feature (11)..(393): Homolog of NCBI NO: 15230370 NR Description: zinc finger - like protein [Arabidopsis thaliana]
  misc_feature (11)..(393): Homolog of NCBI NO: 28973719 NR Description: putative zinc finger protein [Arabidopsis
  misc_feature (126)..(382): Homolog of NCBI NO: 9294415 NR Description: zinc finger-like protein [Arabidopsis thaliana]
  misc_feature (126)..(382): Homolog of NCBI NO: 30685975 NR Description: DNA-binding protein -related [Arabidopsis
  misc_feature (116)..(382): Homolog of NCBI NO: 15223781 NR Description: expressed protein [Arabidopsis thaliana]
  misc_feature (199)..(381): Homolog of NCBI NO: 18253283 NR Description: transparent testa 1 [Arabidopsis thaliana]
  misc_feature (103)..(375): Homolog of NCBI NO: 15223175 NR Description: WIP3 protein [Arabidopsis thaliana]
  misc_feature (116)..(382): Homolog of NCBI NO: 15223781 NR Description: expressed protein [Arabidopsis thaliana]
  misc_feature (126)..(382): Homolog of NCBI NO: 30685975 NR Description: DNA-binding protein -related [Arabidopsis
  misc_feature (126)..(382): Homolog of NCBI NO: 9294415 NR Description: zinc finger-like protein [Arabidopsis thaliana]
  misc_feature (11)..(393): Homolog of NCBI NO: 28973719 NR Description: putative zinc finger protein [Arabidopsis
  misc_feature (11)..(393): Homolog of NCBI NO: 15230370 NR Description: zinc finger - like protein [Arabidopsis thaliana]

SEQ ID NO: 47033 - protein, 383 aa, Arabidopsis thaliana; identical to SEQ ID NO: 43468
  peptide (1)..(383): Ceres Seq. ID no. 13646988
  misc_feature (217)..(239): Pfam Name: Zinc finger, C2H2 type Pfam Description: Zinc finger, C2H2 type
  misc_feature (217)..(239): Pfam Name: Zinc finger, C2H2 type Pfam Description: Zinc finger, C2H2 type
  misc_feature (124)..(352): Homolog of NCBI NO: 34908460 NR Description: P0683F02.21 [Oryza sativa (japonica
  misc_feature (93)..(365): Homolog of NCBI NO: 15223175 NR Description: WIP3 protein [Arabidopsis thaliana]
  misc_feature (189)..(373): Homolog of NCBI NO: 30693123 NR Description: transparent testa 1 (TT1) protein [Arabidopsis
  misc_feature (189)..(371): Homolog of NCBI NO: 18253283 NR Description: transparent testa 1 [Arabidopsis thaliana]
  misc_feature (142)..(378): Homolog of NCBI NO: 15222242 NR Description: zinc finger protein -related [Arabidopsis
  misc_feature (124)..(352): Homolog of NCBI NO: 34908460 NR Description: P0683F02.21 [Oryza sativa (japonica
  misc_feature (189)..(373): Homolog of NCBI NO: 30693123 NR Description: transparent testa 1 (TT1) protein [Arabidopsis
  misc_feature (142)..(378): Homolog of NCBI NO: 15222242 NR Description: zinc finger protein -related [Arabidopsis
  misc_feature (1)..(383): Homolog of NCBI NO: 15230370 NR Description: zinc finger - like protein [Arabidopsis thaliana]
  misc_feature (1)..(383): Homolog of NCBI NO: 28973719 NR Description: putative zinc finger protein [Arabidopsis
  misc_feature (116)..(372): Homolog of NCBI NO: 9294415 NR Description: zinc finger-like protein [Arabidopsis thaliana]
  misc_feature (116)..(372): Homolog of NCBI NO: 30685975 NR Description: DNA-binding protein -related [Arabidopsis
  misc_feature (106)..(372): Homolog of NCBI NO: 15223781 NR Description: expressed protein [Arabidopsis thaliana]
  misc_feature (189)..(371): Homolog of NCBI NO: 18253283 NR Description: transparent testa 1 [Arabidopsis thaliana]
  misc_feature (93)..(365): Homolog of NCBI NO: 15223175 NR Description: WIP3 protein [Arabidopsis thaliana]
  misc_feature (106)..(372): Homolog of NCBI NO: 15223781 NR Description: expressed protein [Arabidopsis thaliana]
  misc_feature (116)..(372): Homolog of NCBI NO: 30685975 NR Description: DNA-binding protein -related [Arabidopsis
  misc_feature (116)..(372): Homolog of NCBI NO: 9294415 NR Description: zinc finger-like protein [Arabidopsis thaliana]
  misc_feature (1)..(383): Homolog of NCBI NO: 28973719 NR Description: putative zinc finger protein [Arabidopsis
  misc_feature (1)..(383): Homolog of NCBI NO: 15230370 NR Description: zinc finger - like protein [Arabidopsis thaliana]

SEQ ID NO: 47034 - protein, 284 aa, Arabidopsis thaliana; identical to SEQ ID NO: 43469
  peptide (1)..(284): Ceres Seq. ID no. 13646989
  misc_feature (118)..(140): Pfam Name: Zinc finger, C2H2 type Pfam Description: Zinc finger, C2H2 type
  misc_feature (118)..(140): Pfam Name: Zinc finger, C2H2 type Pfam Description: Zinc finger, C2H2 type
  misc_feature (25)..(253): Homolog of NCBI NO: 34908460 NR Description: P0683F02.21 [Oryza sativa (japonica
  misc_feature (1)..(266): Homolog of NCBI NO: 15223175 NR Description: WIP3 protein [Arabidopsis thaliana]
  misc_feature (90)..(274): Homolog of NCBI NO: 30693123 NR Description: transparent testa 1 (TT1) protein [Arabidopsis
  misc_feature (90)..(272): Homolog of NCBI NO: 18253283 NR Description: transparent testa 1 [Arabidopsis thaliana]
  misc_feature (43)..(279): Homolog of NCBI NO: 15222242 NR Description: zinc finger protein -related [Arabidopsis
  misc_feature (25)..(253): Homolog of NCBI NO: 34908460 NR Description: P0683F02.21 [Oryza sativa (japonica
  misc_feature (90)..(274): Homolog of NCBI NO: 30693123 NR Description: transparent testa 1 (TT1) protein [Arabidopsis
  misc_feature (43)..(279): Homolog of NCBI NO: 15222242 NR Description: zinc finger protein -related [Arabidopsis
  misc_feature (1)..(284): Homolog of NCBI NO: 15230370 NR Description: zinc finger - like protein [Arabidopsis thaliana]
  misc_feature (1)..(284): Homolog of NCBI NO: 28973719 NR Description: putative zinc finger protein [Arabidopsis
  misc_feature (17)..(273): Homolog of NCBI NO: 9294415 NR Description: zinc finger-like protein [Arabidopsis thaliana]
  misc_feature (17)..(273): Homolog of NCBI NO: 30685975 NR Description: DNA-binding protein -related [Arabidopsis
  misc_feature (7)..(273): Homolog of NCBI NO: 15223781 NR Description: expressed protein [Arabidopsis thaliana]
  misc_feature (90)..(272): Homolog of NCBI NO: 18253283 NR Description: transparent testa 1 [Arabidopsis thaliana]
  misc_feature (1)..(266): Homolog of NCBI NO: 15223175 NR Description: WIP3 protein [Arabidopsis thaliana]
  misc_feature (7)..(273): Homolog of NCBI NO: 15223781 NR Description: expressed protein [Arabidopsis thaliana]
  misc_feature (17)..(273): Homolog of NCBI NO: 30685975 NR Description: DNA-binding protein -related [Arabidopsis
  misc_feature (17)..(273): Homolog of NCBI NO: 9294415 NR Description: zinc finger-like protein [Arabidopsis thaliana]
  misc_feature (1)..(284): Homolog of NCBI NO: 28973719 NR Description: putative zinc finger protein [Arabidopsis
  misc_feature (1)..(284): Homolog of NCBI NO: 15230370 NR Description: zinc finger - like protein [Arabidopsis thaliana]

SEQ ID NO: 47035 - DNA, 2079 bp, Arabidopsis thaliana
  misc_feature (1)..(2079): Ceres Seq. ID no. 13578677
  misc_feature: MA Experiment ID: 20000171 Result: Up-regulated in Transcription
  misc_feature: MA Experiment 20000171 PARAMETER Experiment Name: At_42deg_Heat_P Parameter: Age (day) Value: 14
  misc_feature: MA Experiment 20000171 PARAMETER Experiment Name: At_42deg_Heat_P Parameter: Organism Value: A. thaliana
  misc_feature: MA Experiment 20000171 PARAMETER Experiment Name: At_42deg_Heat_P Parameter: Plant Line Value: WS
  misc_feature: MA Experiment 20000171 PARAMETER Experiment Name: At_42deg_Heat_P Parameter: Temperature (deg C) Value: 42 vs. 22
  misc_feature: MA Experiment 20000171 PARAMETER Experiment Name: At_42deg_Heat_P Parameter: Timepoint (hr) Value: 1
  misc_feature: MA Experiment 20000171 PARAMETER Experiment Name: At_42deg_Heat_P Parameter: Tissue Value: Aerial
  misc_feature: MA Experiment ID: 20000173 Result: Up-regulated in Transcription
  misc_feature: MA Experiment 20000173 PARAMETER Experiment Name: At_42deg_Heat_P Parameter: Age (day) Value: 14
  misc_feature: MA Experiment 20000173 PARAMETER Experiment Name: At_42deg_Heat_P Parameter: Organism Value: A. thaliana
  misc_feature: MA Experiment 20000173 PARAMETER Experiment Name: At_42deg_Heat_P Parameter: Plant Line Value: WS
  misc_feature: MA Experiment 20000173 PARAMETER Experiment Name: At_42deg_Heat_P Parameter: Temperature (deg C) Value: 42 vs. 22
  misc_feature: MA Experiment 20000173 PARAMETER Experiment Name: At_42deg_Heat_P Parameter: Timepoint (hr) Value: 6
  misc_feature: MA Experiment 20000173 PARAMETER Experiment Name: At_42deg_Heat_P Parameter: Tissue Value: Aerial
  misc_feature: MA Experiment ID: 20000179 Result: Down-regulated in Transcription
  misc_feature: MA Experiment 20000179 PARAMETER Experiment Name: At_Germinating_Seeds_P Parameter: Age (hr) Value: 6 vs. 0
  misc_feature: MA Experiment 20000179 PARAMETER Experiment Name: At_Germinating_Seeds_P Parameter: Tissue Value: Germinating Seeds
  misc_feature: MA Experiment ID: 20000227 Result: Down-regulated in Transcription
  misc_feature: MA Experiment 20000227 PARAMETER Experiment Name: At_Root-Tips-vs-Tops_P Parameter: Tissue Value: Root Tips vs. Root Tops
  misc_feature: MA Experiment ID: 20000437 Result: Up-regulated in Transcription
  misc_feature: MA Experiment 20000437 PARAMETER Experiment Name: At_Drought_P Parameter: Age (day) Value: 8
  misc_feature: MA Experiment 20000437 PARAMETER Experiment Name: At_Drought_P Parameter: Organism Value: A. thaliana
  misc_feature: MA Experiment 20000437 PARAMETER Experiment Name: At_Drought_P Parameter: Plant Line Value: WS
  misc_feature: MA Experiment 20000437 PARAMETER Experiment Name: At_Drought_P Parameter: Timepoint (hr) Value: 24
  misc_feature: MA Experiment 20000437 PARAMETER Experiment Name: At_Drought_P Parameter: Tissue Value: Whole Plant
  misc_feature: MA Experiment 20000437 PARAMETER Experiment Name: At_Drought_P Parameter: Treatment Value: Drought vs. No Drought
  misc_feature: MA Experiment ID: 20001905 Result: Up-regulated in Transcription
  misc_feature: MA Experiment 20001905 PARAMETER Experiment Name: At_Drought_Reproduction_P Parameter: Age (day) Value: 40
  misc_feature: MA Experiment 20001905 PARAMETER Experiment Name: At_Drought_Reproduction_P Parameter: Organism Value: A. thaliana
  misc_feature: MA Experiment 20001905 PARAMETER Experiment Name: At_Drought_Reproduction_P Parameter: Plant Line Value: WS
  misc_feature: MA Experiment 20001905 PARAMETER Experiment Name: At_Drought_Reproduction_P Parameter: Timepoint (day) Value: 10
  misc_feature: MA Experiment 20001905 PARAMETER Experiment Name: At_Drought_Reproduction_P Parameter: Tissue Value: Rosettes
  misc_feature: MA Experiment 20001905 PARAMETER Experiment Name: At_Drought_Reproduction_P Parameter: Treatment Value: Drought vs. No Drought
gaatcaaagagagagatcccgtaaatgttttatactctgatttctagggtttgcttttgattctctttcgcgttccagataaataaatccttttgtggaataatttcgtgatttcgtttgtgggttatccgaattttgtctgaatttgagtttttgagaaggaaaggtttgttttttcgggggatggtggaaatgaggaaatctggaggtttaagaccggagtctgaatcggcggccaggtgccgagatgagctaccggtgaaattggagattgctgaagatgatttagaagaagagcatggtcctctcaacaaacgatctaggttatggagtcctgggacaagctcatcgacaatggcaccagctaagtataacccgcttgatgagccgagtcctcttggattgagtcttaagaagagtccatctttgttggagttgattcagatgaagataacgcattgtggtgatcctaaagcagctgaaacgttgaaagctggtgcacttggctctggtcttaagagagaaagtaaaactattgctgctgctgcatcagttggaccgactttggcgccaggaagtattgagaagctgaaagcttctaactttcctgcttcgcttttgaagatcgggcagtgggagtataaatcgaggtatgaaggtgatttggtggcaaagtgttactttgctaaacacaaacttgtttgggaagtgttggaacaaggtcttaagagtaaaatcgagatccagtggtcagatattatggctttgaaggcaaactgtcctgaagacggacctggaactttgactctcgtgcttgctagacagcccttatttttccgggaaacaaacccacagcctagaaagcataccttgtggcaggcgacatcagatttcactgatggccaagccagcatgaacaggcagcattttctgcaatgtgctcaagggataatgaacaaacattttgaaaagctcgttcaatgtgatcatcgtctgttccatctaagccgacagccggagatagctattgactctccctactttgatgcacggcaatctatttttgaggatccaagtgaatcaaaaggccatccttttgggaatttgaatcttagtacaggtccttcgatctctgggactcagaatttagcatctcctgttggggctcagtcatcatctgagcatatgtatctgtctcatgaagcaccatcacccagctcagtgatagatgctcgtgcaaatgaaggaattgggggttctgaagcagtcaattcaagaaacagaacagattgtggtcagatcgaagcacctggaatacaccaatctatgtcactgagtgatttccttgcggttctctgtgatacaaaaaacacaacggatttgaatctggctgacgacgtagatggactacaccaatctatgtcagttagtgatttcgttgcatatttatctgattcaagaaacataactgattcagatcagataaaagtacctggactacaccaatctatgtcagtgagcgatttcgttggacttctctctgattctgctggtggaagtcatccggaacatatggagaaatttgagatcatgaaacagcagttgctaagtgataatatccagttcgaggcaccagatgagaagtctctcatgccaagggttaactctttattcaacctcttgtacaaggatcccaacgtcgctgcaaactcacagctcaataccgaaatgtcggttggattgaagtctgaacccaagggaattgtttctgacaacaacaacaacaacaacaacaacaacagagttcttgatacagcttctagcagcaaaccacagggtatgttaaggaaagactcattcagcgatttgctattacacctcccccggatcacatccttgccaaagttcttgtccaacatttcagaagaagatggtgatgcatataatagataatttatagataccgcctttcttttctggatttggcaagtataggaacctggactagtagcttttctgttttttttttcttgtaaatcaaaattatcacttggtaactacaacccccacagggatttg

SEQ ID NO: 47036 - protein, 589 aa, Arabidopsis thaliana
  peptide (1)..(589): Ceres Seq. ID no. 13578678
  misc_feature (254)..(393): Homolog of NCBI NO: 18400458 NR Description: expressed protein [Arabidopsis thaliana]
  misc_feature (254)..(393): Homolog of NCBI NO: 25371341 NR Description: hypothetical protein At2g24100 [imported] -
  misc_feature (4)..(110): Homolog of NCBI NO: 18400458 NR Description: expressed protein [Arabidopsis thaliana]
  misc_feature (1)..(110): Homolog of NCBI NO: 25371341 NR Description: hypothetical protein At2g24100 [imported] -
  misc_feature (125)..(303): Homolog of NCBI NO: 20218825 NR Description: hypothetical protein [Pinus pinaster]
  misc_feature (424)..(583): Homolog of NCBI NO: 25371341 NR Description: hypothetical protein At2g24100 [imported] -
  misc_feature (424)..(583): Homolog of NCBI NO: 18400458 NR Description: expressed protein [Arabidopsis thaliana]
  misc_feature (62)..(355): Homolog of NCBI NO: 25371341 NR Description: hypothetical protein At2g24100 [imported] -
  misc_feature (62)..(355): Homolog of NCBI NO: 18400458 NR Description: expressed protein [Arabidopsis thaliana]
  misc_feature (1)..(589): Homolog of NCBI NO: 15234853 NR Description: expressed protein [Arabidopsis thaliana]
MVEMRKSGGLRPESESAARCRDELPVKLEIAEDDLEEEHGPLNKRSRLWSPGTSSSTMAPAKYNPLDEPSPLGLSLKKSPSLLELIQMKITHCGDPKAAETLKAGALGSGLKRESKTIAAAASVGPTLAPGSIEKLKASNFPASLLKIGQWEYKSRYEGDLVAKCYFAKHKLVWEVLEQGLKSKIEIQWSDIMALKANCPEDGPGTLTLVLARQPLFFRETNPQPRKHTLWQATSDFTDGQASMNRQHFLQCAQGIMNKHFEKLVQCDHRLFHLSRQPEIAIDSPYFDARQSIFEDPSESKGHPFGNLNLSTGPSISGTQNLASPVGAQSSSEHMYLSHEAPSPSSVIDARANEGIGGSEAVNSRNRTDCGQIEAPGIHQSMSLSDFLAVLCDTKNTTDLNLADDVDGLHQSMSVSDFVAYLSDSRNITDSDQIKVPGLHQSMSVSDFVGLLSDSAGGSHPEHMEKFEIMKQQLLSDNIQFEAPDEKSLMPRVNSLFNLLYKDPNVAANSQLNTEMSVGLKSEPKGIVSDNNNNNNNNNRVLDTASSSKPQGMLRKDSFSDLLLHLPRITSLPKFLSNISEEDGDAYNR

SEQ ID NO: 47037 - protein, 586 aa, Arabidopsis thaliana
  peptide (1)..(586): Ceres Seq. ID no. 13578679
  misc_feature (251)..(390): Homolog of NCBI NO: 18400458 NR Description: expressed protein [Arabidopsis thaliana]
  misc_feature (251)..(390): Homolog of NCBI NO: 25371341 NR Description: hypothetical protein At2g24100 [imported] -
  misc_feature (1)..(107): Homolog of NCBI NO: 18400458 NR Description: expressed protein [Arabidopsis thaliana]
  misc_feature (1)..(107): Homolog of NCBI NO: 25371341 NR Description: hypothetical protein At2g24100 [imported] -
  misc_feature (122)..(300): Homolog of NCBI NO: 20218825 NR Description: hypothetical protein [Pinus pinaster]
  misc_feature (421)..(580): Homolog of NCBI NO: 25371341 NR Description: hypothetical protein At2g24100 [imported] -
  misc_feature (421)..(580): Homolog of NCBI NO: 18400458 NR Description: expressed protein [Arabidopsis thaliana]
  misc_feature (59)..(352): Homolog of NCBI NO: 25371341 NR Description: hypothetical protein At2g24100 [imported] -
  misc_feature (59)..(352): Homolog of NCBI NO: 18400458 NR Description: expressed protein [Arabidopsis thaliana]
  misc_feature (1)..(586): Homolog of NCBI NO: 15234853 NR Description: expressed protein [Arabidopsis thaliana]
MRKSGGLRPESESAARCRDELPVKLEIAEDDLEEEHGPLNKRSRLWSPGTSSSTMAPAKYNPLDEPSPLGLSLKKSPSLLELIQMKITHCGDPKAAETLKAGALGSGLKRESKTIAAAASVGPTLAPGSIEKLKASNFPASLLKIGQWEYKSRYEGDLVAKCYFAKHKLVWEVLEQGLKSKIEIQWSDIMALKANCPEDGPGTLTLVLARQPLFFRETNPQPRKHTLWQATSDFTDGQASMNRQHFLQCAQGIMNKHFEKLVQCDHRLFHLSRQPEIAIDSPYFDARQSIFEDPSESKGHPFGNLNLSTGPSISGTQNLASPVGAQSSSEHMYLSHEAPSPSSVIDARANEGIGGSEAVNSRNRTDCGQIEAPGIHQSMSLSDFLAVLCDTKNTTDLNLADDVDGLHQSMSVSDFVAYLSDSRNITDSDQIKVPGLHQSMSVSDFVGLLSDSAGGSHPEHMEKFEIMKQQLLSDNIQFEAPDEKSLMPRVNSLFNLLYKDPNVAANSQLNTEMSVGLKSEPKGIVSDNNNNNNNNNRVLDTASSSKPQGMLRKDSFSDLLLHLPRITSLPKFLSNISEEDGDAYNR

SEQ ID NO: 47038 - protein, 532 aa, Arabidopsis thaliana
  peptide (1)..(532): Ceres Seq. ID no. 13578680
  misc_feature (197)..(336): Homolog of NCBI NO: 18400458 NR Description: expressed protein [Arabidopsis thaliana]
  misc_feature (197)..(336): Homolog of NCBI NO: 25371341 NR Description: hypothetical protein At2g24100 [imported] -
  misc_feature (1)..(53): Homolog of NCBI NO: 18400458 NR Description: expressed protein [Arabidopsis thaliana]
  misc_feature (1)..(53): Homolog of NCBI NO: 25371341 NR Description: hypothetical protein At2g24100 [imported] -
  misc_feature (68)..(246): Homolog of NCBI NO: 20218825 NR Description: hypothetical protein [Pinus pinaster]
  misc_feature (367)..(526): Homolog of NCBI NO: 25371341 NR Description: hypothetical protein At2g24100 [imported] -
  misc_feature (367)..(526): Homolog of NCBI NO: 18400458 NR Description: expressed protein [Arabidopsis thaliana]
  misc_feature (5)..(298): Homolog of NCBI NO: 25371341 NR Description: hypothetical protein At2g24100 [imported] -
  misc_feature (5)..(298): Homolog of NCBI NO: 18400458 NR Description: expressed protein [Arabidopsis thaliana]
  misc_feature (1)..(532): Homolog of NCBI NO: 15234853 NR Description: expressed protein [Arabidopsis thaliana]
MAPAKYNPLDEPSPLGLSLKKSPSLLELIQMKITHCGDPKAAETLKAGALGSGLKRESKTIAAAASVGPTLAPGSIEKLKASNFPASLLKIGQWEYKSRYEGDLVAKCYFAKHKLVWEVLEQGLKSKIEIQWSDIMALKANCPEDGPGTLTLVLARQPLFFRETNPQPRKHTLWQATSDFTDGQASMNRQHFLQCAQGIMNKHFEKLVQCDHRLFHLSRQPEIAIDSPYFDARQSIFEDPSESKGHPFGNLNLSTGPSISGTQNLASPVGAQSSSEHMYLSHEAPSPSSVIDARANEGIGGSEAVNSRNRTDCGQIEAPGIHQSMSLSDFLAVLCDTKNTTDLNLADDVDGLHQSMSVSDFVAYLSDSRNITDSDQIKVPGLHQSMSVSDFVGLLSDSAGGSHPEHMEKFEIMKQQLLSDNIQFEAPDEKSLMPRVNSLFNLLYKDPNVAANSQLNTEMSVGLKSEPKGIVSDNNNNNNNNNRVLDTASSSKPQGMLRKDSFSDLLLHLPRITSLPKFLSNISEEDGDAYNR

SEQ ID NO: 47039 - DNA, 824 bp, Arabidopsis thaliana
  misc_feature (1)..(824): Ceres Seq. ID no. 13592007
  misc_feature: MA Experiment ID: 20000265 Result: Up-regulated in Transcription
  misc_feature: MA Experiment 20000265 PARAMETER Experiment Name: At_Open_Flower_P Parameter: Age (day) Value: 21
  misc_feature: MA Experiment 20000265 PARAMETER Experiment Name: At_Open_Flower_P Parameter: Plant Line Value: WS
  misc_feature: MA Experiment 20000265 PARAMETER Experiment Name: At_Open_Flower_P Parameter: Tissue Value: Closed Flower vs. Whole Plant
agtcatcatcaaagctttctgatacctgaacaacaacaacaacccctaaaatctcggaagccataatgagcagagcattgttcaggaacgtagccgtcgacaccgctcggctcatacggcggaacgcggcggcgtcaacagaccaatatggtaagaccggagttgctcaatcgagaccttatttccggtcacgtcagcttctcgaaagagcaaaagaaacaggagtctcaccttctccttctttgggtttctcttcttcttcatctccgtcgaggattgggttcgttggatggtatcttggtatggttaaatcacacccagttgtgaccaaaagtgtcacttcctctcttatttacattgccgccgacttgtcttctcagacgattgcgaaaacttcttctgagtcttatgacttggtgagaacagcaaggatgggaggatatggtttatttgtcttgggtccaacacttcactactggttcaatttcatgtcaagactctttcctaaacaagatttgatcacaacgtttaagaaaatggctatgggacagacgatctacgggcctattatgactgttattttcttctcattgaatgcatccctacaaggggaacgcggttcagttatacttgccagattgaaaagggacttactccccgcgctctttaacggtgtcatgtattggcctctatgtgattttatcacattcagattcttccctgttcatttacagcctcttgtaagcaactcattttcgtatgtatggactatctacatgacttacatggcaaaccgtgaaaaaccagtcgcaatttcaacctga

SEQ ID NO: 47040 - protein, 252 aa, Arabidopsis thaliana
  peptide (1)..(252): Ceres Seq. ID no. 13592008
  misc_feature (180)..(247): Pfam Name: Mpv17 / PMP22 family Pfam Description: Mpv17 / PMP22 family
  misc_feature (66)..(238): Homolog of NCBI NO: 10954089 NR Description: 22 kDa peroxisomal membrane protein PMP22 [Mus
  misc_feature (61)..(245): Homolog of NCBI NO: 21594286 NR Description: unknown [Arabidopsis thaliana]
  misc_feature (61)..(245): Homolog of NCBI NO: 16648746 NR Description: AT5g19750/T29J13_170 [Arabidopsis thaliana]
  misc_feature (61)..(245): Homolog of NCBI NO: 15241166 NR Description: expressed protein [Arabidopsis thaliana]
  misc_feature (63)..(223): Homolog of NCBI NO: 9757841 NR Description: contains similarity to 22 kDa peroxisomal
  misc_feature (63)..(246): Homolog of NCBI NO: 18422298 NR Description: peroxisomal membrane protein family (22 kDa)
  misc_feature (63)..(246): Homolog of NCBI NO: 21553640 NR Description: contains similarity to 22 kDa peroxisomal
  misc_feature (1)..(225): Homolog of NCBI NO: 7485624 NR Description: hypothetical protein F17I5.90 - Arabidopsis
  misc_feature (1)..(250): Homolog of NCBI NO: 18418319 NR Description: peroxisomal membrane protein, putative (22 kDa)
  misc_feature (1)..(252): Homolog of NCBI NO: 15226016 NR Description: peroxisomal membrane protein, putative (22 kDa)
MSRALFRNVAVDTARLIRRNAAASTDQYGKTGVAQSRPYFRSRQLLERAKETGVSPSPSLGFSSSSSPSRIGFVGWYLGMVKSHPVVTKSVTSSLIYIAADLSSQTIAKTSSESYDLVRTARMGGYGLFVLGPTLHYWFNFMSRLFPKQDLITTFKKMAMGQTIYGPIMTVIFFSLNASLQGERGSVILARLKRDLLPALFNGVMYWPLCDFITFRFFPVHLQPLVSNSFSYVWTIYMTYMANREKPVAIST

SEQ ID NO: 47041 - protein, 173 aa, Arabidopsis thaliana
  peptide (1)..(173): Ceres Seq. ID no. 13592009
  misc_feature (101)..(168): Pfam Name: Mpv17 / PMP22 family Pfam Description: Mpv17 / PMP22 family
  misc_feature (1)..(159): Homolog of NCBI NO: 10954089 NR Description: 22 kDa peroxisomal membrane protein PMP22 [Mus
  misc_feature (1)..(166): Homolog of NCBI NO: 21594286 NR Description: unknown [Arabidopsis thaliana]
  misc_feature (1)..(166): Homolog of NCBI NO: 16648746 NR Description: AT5g19750/T29J13_170 [Arabidopsis thaliana]
  misc_feature (1)..(166): Homolog of NCBI NO: 15241166 NR Description: expressed protein [Arabidopsis thaliana]
  misc_feature (1)..(144): Homolog of NCBI NO: 9757841 NR Description: contains similarity to 22 kDa peroxisomal
  misc_feature (1)..(167): Homolog of NCBI NO: 18422298 NR Description: peroxisomal membrane protein family (22 kDa)
  misc_feature (1)..(167): Homolog of NCBI NO: 21553640 NR Description: contains similarity to 22 kDa peroxisomal
  misc_feature (1)..(146): Homolog of NCBI NO: 7485624 NR Description: hypothetical protein F17I5.90 - Arabidopsis
  misc_feature (1)..(171): Homolog of NCBI NO: 18418319 NR Description: peroxisomal membrane protein, putative (22 kDa)
  misc_feature (1)..(173): Homolog of NCBI NO: 15226016 NR Description: peroxisomal membrane protein, putative (22 kDa)
MVKSHPVVTKSVTSSLIYIAADLSSQTIAKTSSESYDLVRTARMGGYGLFVLGPTLHYWFNFMSRLFPKQDLITTFKKMAMGQTIYGPIMTVIFFSLNASLQGERGSVILARLKRDLLPALFNGVMYWPLCDFITFRFFPVHLQPLVSNSFSYVWTIYMTYMANREKPVAIST

SEQ ID NO: 47042 - protein, 130 aa, Arabidopsis thaliana
  peptide (1)..(130): Ceres Seq. ID no. 13592010
  misc_feature (58)..(125): Pfam Name: Mpv17 / PMP22 family Pfam Description: Mpv17 / PMP22 family
  misc_feature (1)..(116): Homolog of NCBI NO: 10954089 NR Description: 22 kDa peroxisomal membrane protein PMP22 [Mus
  misc_feature (1)..(123): Homolog of NCBI NO: 21594286 NR Description: unknown [Arabidopsis thaliana]
  misc_feature (1)..(123): Homolog of NCBI NO: 16648746 NR Description: AT5g19750/T29J13_170 [Arabidopsis thaliana]
  misc_feature (1)..(123): Homolog of NCBI NO: 15241166 NR Description: expressed protein [Arabidopsis thaliana]
  misc_feature (1)..(101): Homolog of NCBI NO: 9757841 NR Description: contains similarity to 22 kDa peroxisomal
  misc_feature (1)..(124): Homolog of NCBI NO: 18422298 NR Description: peroxisomal membrane protein family (22 kDa)
  misc_feature (1)..(124): Homolog of NCBI NO: 21553640 NR Description: contains similarity to 22 kDa peroxisomal
  misc_feature (1)..(103): Homolog of NCBI NO: 7485624 NR Description: hypothetical protein F17I5.90 - Arabidopsis
  misc_feature (1)..(128): Homolog of NCBI NO: 18418319 NR Description: peroxisomal membrane protein, putative (22 kDa)
  misc_feature (1)..(130): Homolog of NCBI NO: 15226016 NR Description: peroxisomal membrane protein, putative (22 kDa)
MGGYGLFVLGPTLHYWFNFMSRLFPKQDLITTFKKMAMGQTIYGPIMTVIFFSLNASLQGERGSVILARLKRDLLPALFNGVMYWPLCDFITFRFFPVHLQPLVSNSFSYVWTIYMTYMANREKPVAIST

SEQ ID NO: 47043 - DNA, 2739 bp, Arabidopsis thaliana; identical to SEQ ID NO: 46051
  misc_feature (1)..(2739): Ceres Seq. ID no. 13591630
  misc_feature: MA Experiment ID: 20000306 Result: Down-regulated in Transcription
  misc_feature: MA Experiment 20000306 PARAMETER Experiment Name: At_Germinating_Seeds_Sub_P Parameter: Age (hr) Value: 6 vs. 0
  misc_feature: MA Experiment 20000306 PARAMETER Experiment Name: At_Germinating_Seeds_Sub_P Parameter: Organism Value: A. thaliana
  misc_feature: MA Experiment 20000306 PARAMETER Experiment Name: At_Germinating_Seeds_Sub_P Parameter: Plant Line Value: WS
  misc_feature: MA Experiment 20000306 PARAMETER Experiment Name: At_Germinating_Seeds_Sub_P Parameter: Tissue Value: Germinating Seeds
  misc_feature: MA Experiment ID: 20000307 Result: Down-regulated in Transcription
  misc_feature: MA Experiment 20000307 PARAMETER Experiment Name: At_Germinating_Seeds_Sub_P Parameter: Age (hr) Value: 24 vs. 0
  misc_feature: MA Experiment 20000307 PARAMETER Experiment Name: At_Germinating_Seeds_Sub_P Parameter: Organism Value: A. thaliana
  misc_feature: MA Experiment 20000307 PARAMETER Experiment Name: At_Germinating_Seeds_Sub_P Parameter: Plant Line Value: WS
  misc_feature: MA Experiment 20000307 PARAMETER Experiment Name: At_Germinating_Seeds_Sub_P Parameter: Tissue Value: Germinating Seeds
  misc_feature: MA Experiment ID: 20000327 Result: Up-regulated in Transcription
  misc_feature: MA Experiment 20000327 PARAMETER Experiment Name: At_42deg_Heat_Sub_P Parameter: Age (day) Value: 14
  misc_feature: MA Experiment 20000327 PARAMETER Experiment Name: At_42deg_Heat_Sub_P Parameter: Organism Value: A. thaliana
  misc_feature: MA Experiment 20000327 PARAMETER Experiment Name: At_42deg_Heat_Sub_P Parameter: Plant Line Value: WS
  misc_feature: MA Experiment 20000327 PARAMETER Experiment Name: At_42deg_Heat_Sub_P Parameter: Temperature (deg C) Value: 42 vs. 22
  misc_feature: MA Experiment 20000327 PARAMETER Experiment Name: At_42deg_Heat_Sub_P Parameter: Timepoint (hr) Value: 1
  misc_feature: MA Experiment 20000327 PARAMETER Experiment Name: At_42deg_Heat_Sub_P Parameter: Tissue Value: Aerial
  misc_feature: MA Experiment ID: 20000328 Result: Up-regulated in Transcription
  misc_feature: MA Experiment 20000328 PARAMETER Experiment Name: At_42deg_Heat_Sub_P Parameter: Age (day) Value: 14
  misc_feature: MA Experiment 20000328 PARAMETER Experiment Name: At_42deg_Heat_Sub_P Parameter: Organism Value: A. thaliana
  misc_feature: MA Experiment 20000328 PARAMETER Experiment Name: At_42deg_Heat_Sub_P Parameter: Plant Line Value: WS
  misc_feature: MA Experiment 20000328 PARAMETER Experiment Name: At_42deg_Heat_Sub_P Parameter: Temperature (deg C) Value: 42 vs. 22
  misc_feature: MA Experiment 20000328 PARAMETER Experiment Name: At_42deg_Heat_Sub_P Parameter: Timepoint (hr) Value: 6
  misc_feature: MA Experiment 20000328 PARAMETER Experiment Name: At_42deg_Heat_Sub_P Parameter: Tissue Value: Aerial

SEQ ID NO: 47044 - protein, 809 aa, Arabidopsis thaliana; identical to SEQ ID NO: 46052
  peptide (1)..(809): Ceres Seq. ID no. 13591631
  misc_feature (516)..(704): Pfam Name: ATPase family associated with various cellular Pfam Description: ATPase family associated with various cellular
  misc_feature (516)..(704): Pfam Name: ATPase family associated with various cellular Pfam Description: ATPase family associated with various cellular
  misc_feature (161)..(404): Homolog of NCBI NO: 14521559 NR Description: TRANSITIONAL ENDOPLASMIC RETICULUM ATPASE
  misc_feature (392)..(771): Homolog of NCBI NO: 14521559 NR Description: TRANSITIONAL ENDOPLASMIC RETICULUM ATPASE
  misc_feature (161)..(404): Homolog of NCBI NO: 14590568 NR Description: cell division control protein (transitional
  misc_feature (399)..(771): Homolog of NCBI NO: 14590568 NR Description: cell division control protein (transitional
  misc_feature (1)..(768): Homolog of NCBI NO: 30088847 NR Description: AAA family ATPase [Sulfolobus acidocaldarius]
  misc_feature (161)..(404): Homolog of NCBI NO: 14521559 NR Description: TRANSITIONAL ENDOPLASMIC RETICULUM ATPASE
  misc_feature (161)..(404): Homolog of NCBI NO: 14590568 NR Description: cell division control protein (transitional
  misc_feature (1)..(768): Homolog of NCBI NO: 30088847 NR Description: AAA family ATPase [Sulfolobus acidocaldarius]
  misc_feature (1)..(441): Homolog of NCBI NO: 23612492 NR Description: cell division cycle ATPase, putative [Plasmodium
  misc_feature (431)..(766): Homolog of NCBI NO: 23612492 NR Description: cell division cycle ATPase, putative [Plasmodium
  misc_feature (10)..(514): Homolog of NCBI NO: 23481659 NR Description: putative cell division cycle ATPase [Plasmodium
  misc_feature (434)..(766): Homolog of NCBI NO: 23481659 NR Description: putative cell division cycle ATPase [Plasmodium
  misc_feature (30)..(720): Homolog of NCBI NO: 15669345 NR Description: cell division control protein 48 (cdc48), AAA
  misc_feature (399)..(771): Homolog of NCBI NO: 14590568 NR Description: cell division control protein (transitional
  misc_feature (392)..(771): Homolog of NCBI NO: 14521559 NR Description: TRANSITIONAL ENDOPLASMIC RETICULUM ATPASE
  misc_feature (30)..(720): Homolog of NCBI NO: 15669345 NR Description: cell division control protein 48 (cdc48), AAA
  misc_feature (434)..(766): Homolog of NCBI NO: 23481659 NR Description: putative cell division cycle ATPase [Plasmodium
  misc_feature (10)..(514): Homolog of NCBI NO: 23481659 NR Description: putative cell division cycle ATPase [Plasmodium
  misc_feature (431)..(766): Homolog of NCBI NO: 23612492 NR Description: cell division cycle ATPase, putative [Plasmodium
  misc_feature (1)..(441): Homolog of NCBI NO: 23612492 NR Description: cell division cycle ATPase, putative [Plasmodium

SEQ ID NO: 47045 - protein, 760 aa, Arabidopsis thaliana; identical to SEQ ID NO: 46053
  peptide (1)..(760): Ceres Seq. ID no. 13591632
  misc_feature (467)..(655): Pfam Name: ATPase family associated with various cellular Pfam Description: ATPase family associated with various cellular
  misc_feature (467)..(655): Pfam Name: ATPase family associated with various cellular Pfam Description: ATPase family associated with various cellular
  misc_feature (112)..(355): Homolog of NCBI NO: 14521559 NR Description: TRANSITIONAL ENDOPLASMIC RETICULUM ATPASE
  misc_feature (343)..(722): Homolog of NCBI NO: 14521559 NR Description: TRANSITIONAL ENDOPLASMIC RETICULUM ATPASE
  misc_feature (112)..(355): Homolog of NCBI NO: 14590568 NR Description: cell division control protein (transitional
  misc_feature (350)..(722): Homolog of NCBI NO: 14590568 NR Description: cell division control protein (transitional
  misc_feature (1)..(719): Homolog of NCBI NO: 30088847 NR Description: AAA family ATPase [Sulfolobus acidocaldarius]
  misc_feature (112)..(355): Homolog of NCBI NO: 14521559 NR Description: TRANSITIONAL ENDOPLASMIC RETICULUM ATPASE
  misc_feature (112)..(355): Homolog of NCBI NO: 14590568 NR Description: cell division control protein (transitional
  misc_feature (1)..(719): Homolog of NCBI NO: 30088847 NR Description: AAA family ATPase [Sulfolobus acidocaldarius]
  misc_feature (1)..(392): Homolog of NCBI NO: 23612492 NR Description: cell division cycle ATPase, putative [Plasmodium
  misc_feature (382)..(717): Homolog of NCBI NO: 23612492 NR Description: cell division cycle ATPase, putative [Plasmodium
  misc_feature (1)..(465): Homolog of NCBI NO: 23481659 NR Description: putative cell division cycle ATPase [Plasmodium
  misc_feature (385)..(717): Homolog of NCBI NO: 23481659 NR Description: putative cell division cycle ATPase [Plasmodium
  misc_feature (1)..(671): Homolog of NCBI NO: 15669345 NR Description: cell division control protein 48 (cdc48), AAA
  misc_feature (350)..(722): Homolog of NCBI NO: 14590568 NR Description: cell division control protein (transitional
  misc_feature (343)..(722): Homolog of NCBI NO: 14521559 NR Description: TRANSITIONAL ENDOPLASMIC RETICULUM ATPASE
  misc_feature (1)..(671): Homolog of NCBI NO: 15669345 NR Description: cell division control protein 48 (cdc48), AAA
  misc_feature (385)..(717): Homolog of NCBI NO: 23481659 NR Description: putative cell division cycle ATPase [Plasmodium
  misc_feature (1)..(465): Homolog of NCBI NO: 23481659 NR Description: putative cell division cycle ATPase [Plasmodium
  misc_feature (382)..(717): Homolog of NCBI NO: 23612492 NR Description: cell division cycle ATPase, putative [Plasmodium
  misc_feature (1)..(392): Homolog of NCBI NO: 23612492 NR Description: cell division cycle ATPase, putative [Plasmodium

SEQ ID NO: 47046 - protein, 722 aa, Arabidopsis thaliana; identical to SEQ ID NO: 46054
  peptide (1)..(722): Ceres Seq. ID no. 13591633
  misc_feature (429)..(617): Pfam Name: ATPase family associated with various cellular Pfam Description: ATPase family associated with various cellular
  misc_feature (429)..(617): Pfam Name: ATPase family associated with various cellular Pfam Description: ATPase family associated with various cellular
  misc_feature (74)..(317): Homolog of NCBI NO: 14521559 NR Description: TRANSITIONAL ENDOPLASMIC RETICULUM ATPASE
  misc_feature (305)..(684): Homolog of NCBI NO: 14521559 NR Description: TRANSITIONAL ENDOPLASMIC RETICULUM ATPASE
  misc_feature (74)..(317): Homolog of NCBI NO: 14590568 NR Description: cell division control protein (transitional
  misc_feature (312)..(684): Homolog of NCBI NO: 14590568 NR Description: cell division control protein (transitional
  misc_feature (1)..(681): Homolog of NCBI NO: 30088847 NR Description: AAA family ATPase [Sulfolobus acidocaldarius]
  misc_feature (74)..(317): Homolog of NCBI NO: 14521559 NR Description: TRANSITIONAL ENDOPLASMIC RETICULUM ATPASE
  misc_feature (74)..(317): Homolog of NCBI NO: 14590568 NR Description: cell division control protein (transitional
  misc_feature (1)..(681): Homolog of NCBI NO: 30088847 NR Description: AAA family ATPase [Sulfolobus acidocaldarius]
  misc_feature (1)..(354): Homolog of NCBI NO: 23612492 NR Description: cell division cycle ATPase, putative [Plasmodium
  misc_feature (344)..(679): Homolog of NCBI NO: 23612492 NR Description: cell division cycle ATPase, putative [Plasmodium
  misc_feature (1)..(427): Homolog of NCBI NO: 23481659 NR Description: putative cell division cycle ATPase [Plasmodium
  misc_feature (347)..(679): Homolog of NCBI NO: 23481659 NR Description: putative cell division cycle ATPase [Plasmodium
  misc_feature (1)..(633): Homolog of NCBI NO: 15669345 NR Description: cell division control protein 48 (cdc48), AAA
  misc_feature (312)..(684): Homolog of NCBI NO: 14590568 NR Description: cell division control protein (transitional
  misc_feature (305)..(684): Homolog of NCBI NO: 14521559 NR Description: TRANSITIONAL ENDOPLASMIC RETICULUM ATPASE
  misc_feature (1)..(633): Homolog of NCBI NO: 15669345 NR Description: cell division control protein 48 (cdc48), AAA
  misc_feature (347)..(679): Homolog of NCBI NO: 23481659 NR Description: putative cell division cycle ATPase [Plasmodium
  misc_feature (1)..(427): Homolog of NCBI NO: 23481659 NR Description: putative cell division cycle ATPase [Plasmodium
  misc_feature (344)..(679): Homolog of NCBI NO: 23612492 NR Description: cell division cycle ATPase, putative [Plasmodium
  misc_feature (1)..(354): Homolog of NCBI NO: 23612492 NR Description: cell division cycle ATPase, putative [Plasmodium

SEQ ID NO: 47047 - DNA, 1255 bp, Arabidopsis thaliana
  misc_feature (1)..(1255): Ceres Seq. ID no. 13578681
  misc_feature: MA Experiment ID: 20000234 Result: Up-regulated in Transcription
  misc_feature: MA Experiment 20000234 PARAMETER Experiment Name: At_Siliques_P Parameter: Age (day) Value: 21
  misc_feature: MA Experiment 20000234 PARAMETER Experiment Name: At_Siliques_P Parameter: Organism Value: A. thaliana
  misc_feature: MA Experiment 20000234 PARAMETER Experiment Name: At_Siliques_P Parameter: Plant Line Value: WS
  misc_feature: MA Experiment 20000234 PARAMETER Experiment Name: At_Siliques_P Parameter: Tissue Value: Less Than 5mm Siliques vs. Whole Plant
  misc_feature: MA Experiment ID: 20000235 Result: Up-regulated in Transcription
  misc_feature: MA Experiment 20000235 PARAMETER Experiment Name: At_Siliques_P Parameter: Age (day) Value: 21
  misc_feature: MA Experiment 20000235 PARAMETER Experiment Name: At_Siliques_P Parameter: Organism Value: A. thaliana
  misc_feature: MA Experiment 20000235 PARAMETER Experiment Name: At_Siliques_P Parameter: Plant Line Value: WS
  misc_feature: MA Experiment 20000235 PARAMETER Experiment Name: At_Siliques_P Parameter: Tissue Value: 5-10mm Siliques vs. Whole Plant
  misc_feature: MA Experiment ID: 20000264 Result: Up-regulated in Transcription
  misc_feature: MA Experiment 20000264 PARAMETER Experiment Name: At_Open_Flower_P Parameter: Age (day) Value: 21
  misc_feature: MA Experiment 20000264 PARAMETER Experiment Name: At_Open_Flower_P Parameter: Plant Line Value: WS
  misc_feature: MA Experiment 20000264 PARAMETER Experiment Name: At_Open_Flower_P Parameter: Tissue Value: Open Flower vs. Whole Plant
  misc_feature: MA Experiment ID: 20000267 Result: Up-regulated in Transcription
  misc_feature: MA Experiment 20000267 PARAMETER Experiment Name: At_Drought_P Parameter: Age (day) Value: 7
  misc_feature: MA Experiment 20000267 PARAMETER Experiment Name: At_Drought_P Parameter: Organism Value: A. thaliana
  misc_feature: MA Experiment 20000267 PARAMETER Experiment Name: At_Drought_P Parameter: Plant Line Value: WS
  misc_feature: MA Experiment 20000267 PARAMETER Experiment Name: At_Drought_P Parameter: Timepoint (hr) Value: 6
  misc_feature: MA Experiment 20000267 PARAMETER Experiment Name: At_Drought_P Parameter: Tissue Value: Whole Plant
  misc_feature: MA Experiment 20000267 PARAMETER Experiment Name: At_Drought_P Parameter: Treatment Value: Drought vs. No Drought
  misc_feature: MA Experiment ID: 20000268 Result: Up-regulated in Transcription
  misc_feature: MA Experiment 20000268 PARAMETER Experiment Name: At_100mM_NaCl__P Parameter: Age (day) Value: 14
  misc_feature: MA Experiment 20000268 PARAMETER Experiment Name: At_100mM_NaCl__P Parameter: Organism Value: A. thaliana
  misc_feature: MA Experiment 20000268 PARAMETER Experiment Name: At_100mM_NaCl__P Parameter: Plant Line Value: WS
  misc_feature: MA Experiment 20000268 PARAMETER Experiment Name: At_100mM_NaCl__P Parameter: Timepoint (hr) Value: 6
  misc_feature: MA Experiment 20000268 PARAMETER Experiment Name: At_100mM_NaCl__P Parameter: Tissue Value: Whole Plant
  misc_feature: MA Experiment 20000268 PARAMETER Experiment Name: At_100mM_NaCl__P Parameter: Treatment Value: 100mM NaCl vs. No Treatment
  misc_feature: MA Experiment ID: 20000286 Result: Up-regulated in Transcription
  misc_feature: MA Experiment 20000286 PARAMETER Experiment Name: At_Open_Flower_P Parameter: Age (day) Value: 21
  misc_feature: MA Experiment 20000286 PARAMETER Experiment Name: At_Open_Flower_P Parameter: Plant Line Value: WS
  misc_feature: MA Experiment 20000286 PARAMETER Experiment Name: At_Open_Flower_P Parameter: Tissue Value: Half Open vs. Whole Plant
  misc_feature: MA Experiment ID: 20000436 Result: Up-regulated in Transcription
  misc_feature: MA Experiment 20000436 PARAMETER Experiment Name: At_Drought_P Parameter: Age (day) Value: 7
  misc_feature: MA Experiment 20000436 PARAMETER Experiment Name: At_Drought_P Parameter: Organism Value: A. thaliana
  misc_feature: MA Experiment 20000436 PARAMETER Experiment Name: At_Drought_P Parameter: Plant Line Value: WS
  misc_feature: MA Experiment 20000436 PARAMETER Experiment Name: At_Drought_P Parameter: Timepoint (hr) Value: 12
  misc_feature: MA Experiment 20000436 PARAMETER Experiment Name: At_Drought_P Parameter: Tissue Value: Whole Plant
  misc_feature: MA Experiment 20000436 PARAMETER Experiment Name: At_Drought_P Parameter: Treatment Value: Drought vs. No Drought
  misc_feature: MA Experiment ID: 20000437 Result: Up-regulated in Transcription
  misc_feature: MA Experiment 20000437 PARAMETER Experiment Name: At_Drought_P Parameter: Age (day) Value: 8
  misc_feature: MA Experiment 20000437 PARAMETER Experiment Name: At_Drought_P Parameter: Organism Value: A. thaliana
  misc_feature: MA Experiment 20000437 PARAMETER Experiment Name: At_Drought_P Parameter: Plant Line Value: WS
  misc_feature: MA Experiment 20000437 PARAMETER Experiment Name: At_Drought_P Parameter: Timepoint (hr) Value: 24
  misc_feature: MA Experiment 20000437 PARAMETER Experiment Name: At_Drought_P Parameter: Tissue Value: Whole Plant
  misc_feature: MA Experiment 20000437 PARAMETER Experiment Name: At_Drought_P Parameter: Treatment Value: Drought vs. No Drought
  misc_feature: MA Experiment ID: 20000496 Result: Up-regulated in Transcription
  misc_feature: MA Experiment 20000496 PARAMETER Experiment Name: At_Guard_Cells_P Parameter: Harvest Date Value: 7/19/2002
  misc_feature: MA Experiment 20000496 PARAMETER Experiment Name: At_Guard_Cells_P Parameter: Organism Value: Canola
  misc_feature: MA Experiment 20000496 PARAMETER Experiment Name: At_Guard_Cells_P Parameter: Tissue Value: Guard Cells vs. Leaves
  misc_feature: MA Experiment ID: 20000794 Result: Up-regulated in Transcription
  misc_feature: MA Experiment 20000794 PARAMETER Experiment Name: At_Petals_P Parameter: Age (day) Value: 23-25 days
  misc_feature: MA Experiment 20000794 PARAMETER Experiment Name: At_Petals_P Parameter: Plant Line Value: WS
  misc_feature: MA Experiment 20000794 PARAMETER Experiment Name: At_Petals_P Parameter: Tissue Value: Petals vs. Whole plant
  misc_feature: MA Experiment ID: 20001557 Result: Up-regulated in Transcription
  misc_feature: MA Experiment 20001557 PARAMETER Experiment Name: At_Drought_Soil_Dry_P Parameter: Age (day) Value: 27
  misc_feature: MA Experiment 20001557 PARAMETER Experiment Name: At_Drought_Soil_Dry_P Parameter: Organism Value: A. thaliana
  misc_feature: MA Experiment 20001557 PARAMETER Experiment Name: At_Drought_Soil_Dry_P Parameter: Plant Line Value: WS
  misc_feature: MA Experiment 20001557 PARAMETER Experiment Name: At_Drought_Soil_Dry_P Parameter: Post Timepoint (hr) Value: 3
  misc_feature: MA Experiment 20001557 PARAMETER Experiment Name: At_Drought_Soil_Dry_P Parameter: Post-Treatment Value: Re-Water vs. No Drought
  misc_feature: MA Experiment 20001557 PARAMETER Experiment Name: At_Drought_Soil_Dry_P Parameter: Timepoint (day) Value: 13
  misc_feature: MA Experiment 20001557 PARAMETER Experiment Name: At_Drought_Soil_Dry_P Parameter: Treatment Value: Drought vs. No Drought
  misc_feature: MA Experiment ID: 20001559 Result: Up-regulated in Transcription
  misc_feature: MA Experiment 20001559 PARAMETER Experiment Name: At_Drought_Soil_Dry_P Parameter: Age (day) Value: 28
  misc_feature: MA Experiment 20001559 PARAMETER Experiment Name: At_Drought_Soil_Dry_P Parameter: Organism Value: A. thaliana
  misc_feature: MA Experiment 20001559 PARAMETER Experiment Name: At_Drought_Soil_Dry_P Parameter: Plant Line Value: WS
  misc_feature: MA Experiment 20001559 PARAMETER Experiment Name: At_Drought_Soil_Dry_P Parameter: Post Timepoint (hr) Value: 29
  misc_feature: MA Experiment 20001559 PARAMETER Experiment Name: At_Drought_Soil_Dry_P Parameter: Post-Treatment Value: Re-Water vs. No Drought
  misc_feature: MA Experiment 20001559 PARAMETER Experiment Name: At_Drought_Soil_Dry_P Parameter: Timepoint (day) Value: 14
  misc_feature: MA Experiment 20001559 PARAMETER Experiment Name: At_Drought_Soil_Dry_P Parameter: Treatment Value: Drought vs. No Drought
  misc_feature: MA Experiment ID: 20001904 Result: Up-regulated in Transcription
  misc_feature: MA Experiment 20001904 PARAMETER Experiment Name: At_Drought_Reproduction_P Parameter: Age (day) Value: 37
  misc_feature: MA Experiment 20001904 PARAMETER Experiment Name: At_Drought_Reproduction_P Parameter: Organism Value: A. thaliana
  misc_feature: MA Experiment 20001904 PARAMETER Experiment Name: At_Drought_Reproduction_P Parameter: Plant Line Value: WS
  misc_feature: MA Experiment 20001904 PARAMETER Experiment Name: At_Drought_Reproduction_P Parameter: Timepoint (day) Value: 7
  misc_feature: MA Experiment 20001904 PARAMETER Experiment Name: At_Drought_Reproduction_P Parameter: Tissue Value: Rosettes
  misc_feature: MA Experiment 20001904 PARAMETER Experiment Name: At_Drought_Reproduction_P Parameter: Treatment Value: Drought vs. No Drought
  misc_feature: MA Experiment ID: 20001905 Result: Up-regulated in Transcription
  misc_feature: MA Experiment 20001905 PARAMETER Experiment Name: At_Drought_Reproduction_P Parameter: Age (day) Value: 40
  misc_feature: MA Experiment 20001905 PARAMETER Experiment Name: At_Drought_Reproduction_P Parameter: Organism Value: A. thaliana
  misc_feature: MA Experiment 20001905 PARAMETER Experiment Name: At_Drought_Reproduction_P Parameter: Plant Line Value: WS
  misc_feature: MA Experiment 20001905 PARAMETER Experiment Name: At_Drought_Reproduction_P Parameter: Timepoint (day) Value: 10
  misc_feature: MA Experiment 20001905 PARAMETER Experiment Name: At_Drought_Reproduction_P Parameter: Tissue Value: Rosettes
  misc_feature: MA Experiment 20001905 PARAMETER Experiment Name: At_Drought_Reproduction_P Parameter: Treatment Value: Drought vs. No Drought
  misc_feature: MA Experiment ID: 20001911 Result: Up-regulated in Transcription
  misc_feature: MA Experiment 20001911 PARAMETER Experiment Name: At_Drought_Reproduction_P Parameter: Age (day) Value: 40
  misc_feature: MA Experiment 20001911 PARAMETER Experiment Name: At_Drought_Reproduction_P Parameter: Organism Value: A. thaliana
  misc_feature: MA Experiment 20001911 PARAMETER Experiment Name: At_Drought_Reproduction_P Parameter: Plant Line Value: WS
  misc_feature: MA Experiment 20001911 PARAMETER Experiment Name: At_Drought_Reproduction_P Parameter: Timepoint (day) Value: 10
  misc_feature: MA Experiment 20001911 PARAMETER Experiment Name: At_Drought_Reproduction_P Parameter: Tissue Value: Flowers
  misc_feature: MA Experiment 20001911 PARAMETER Experiment Name: At_Drought_Reproduction_P Parameter: Treatment Value: Drought vs. No Drought
gtccagaaccctctctcgctctcccaaaaactcatctctcaccaccgtctcaaaccaagttcgatctaaaagccttttcctttagattctctccaacaacaaatctctttgaatcactcagtcatgtcggttttacttcctctctgtctgattatctccatgttcacctattcaagtaagccctgtttcctctgtttttctacatcttttatcagcaaaatgtttcttgtttatgttatatgttctcagttctaacaagtgggtctataaagattcagaattttagtatgagatctctgataaattcctcaaaaatctgaactttgccttgtgggtttagttctagcttgagccctgtaatgaatatgaatctgtttttgtttgtttggtaaatttttcagacgcagcgtattgtctttgcaaagaggggaacgagcaagtgcttcagaaggcaatagactacgcttgtggaaatggagctgactgtacccagatccaacccaccggagcttgttaccaacctaacaccgtcaaaaaccactgtgacgtcgccgtcaacagttactaccagaaaaaagcttcttccggtgccacctgtgactttaacggcgccgcctccccctctactacccctccgtcaactgcttcaaactgtttaactggttcaagctctagtggcactcctaccacaggaacaccaactactgggacaccaaccagtgggaccccgactaccggaactccgaccaccggaacccccaccactggaactccaaccagtgggactccaactagtggcttcccaaataccgggactccaaacacagggactaacactgggatgccaaattccaacgggatgccaacttcatcgtcatcttcggtgttcccggggactactcttggcccgactgggagcgggggactaggcgatccaaatgctggagagaagctgtctgttcgaactaacacagtggtcttcttattaaccggtgtagcagcaatgcttgtcatatgagggcttagaagtcacacgcggttatggttgtaattgagttgctgagagatcagatcttgccaacggctcatggttgatagagtcatcttttttttcactcgtctttctaggatttggacttaggttggccgagagacgtaatgctggtagtagctagtattttgggttatgtacaactttaactaagagctttacttttgtaaatccggaggatgagatgctcttttgtttctaaac

SEQ ID NO: 47048 - protein, 61 aa, Arabidopsis thaliana
  peptide (1)..(61): Ceres Seq. ID no. 13578682
  misc_feature (1)..(47): Homolog of NCBI NO: 39583863 NR Description: Hypothetical protein CBG08535 [Caenorhabditis
MELTVPRSNPPELVTNLTPSKTTVTSPSTVTTRKKLLPVPPVTLTAPPPPLLPLRQLLQTV

SEQ ID NO: 47049 - protein, 58 aa, Arabidopsis thaliana
  peptide (1)..(58): Ceres Seq. ID no. 13578683
  misc_feature (1)..(58): Pfam Name: Herpes virus major outer envelope glycoprotein (BLLF1) Pfam Description: Herpes virus major outer envelope glycoprotein
  misc_feature (1)..(55): Homolog of NCBI NO: 15222715 NR Description: glycosyl hydrolase family 17 [Arabidopsis
  misc_feature (1)..(41): Homolog of NCBI NO: 22329437 NR Description: expressed protein [Arabidopsis thaliana]
  misc_feature (1)..(25): Homolog of NCBI NO: 21592859 NR Description: unknown [Arabidopsis thaliana]
  misc_feature (1)..(25): Homolog of NCBI NO: 15241485 NR Description: glycosyl hydrolase family 17 [Arabidopsis
  misc_feature (1)..(16): Homolog of NCBI NO: 30697478 NR Description: glycosyl hydrolase family 17 [Arabidopsis
  misc_feature (1)..(16): Homolog of NCBI NO: 8778409 NR Description: F16A14.5 [Arabidopsis thaliana]
  misc_feature (1)..(21): Homolog of NCBI NO: 15222715 NR Description: glycosyl hydrolase family 17 [Arabidopsis
  misc_feature (1)..(41): Homolog of NCBI NO: 25404810 NR Description: unknown protein, 45065-49536 [imported] -
  misc_feature (1)..(58): Homolog of NCBI NO: 21553768 NR Description: unknown [Arabidopsis thaliana]
  misc_feature (1)..(58): Homolog of NCBI NO: 18409239 NR Description: expressed protein [Arabidopsis thaliana]
MPNSNGMPTSSSSSVFPGTTLGPTGSGGLGDPNAGEKLSVRTNTVVFLLTGVAAMLVI

SEQ ID NO: 47050 - protein, 58 aa, Arabidopsis thaliana
  peptide (1)..(58): Ceres Seq. ID no. 13578684
PEPSLALPKTHLSPPSQTKFDLKAFSFRFSPTTNLFESLSHVGFTSSLSDYLHVHLFK

SEQ ID NO: 47051 - DNA, 1425 bp, Arabidopsis thaliana
  misc_feature (1)..(1425): Ceres Seq. ID no. 13578725
  misc_feature: MA Experiment ID: 20000180 Result: Up-regulated in Transcription
  misc_feature: MA Experiment 20000180 PARAMETER Experiment Name: At_Germinating_Seeds_P Parameter: Age (hr) Value: 24 vs. 0
  misc_feature: MA Experiment 20000180 PARAMETER Experiment Name: At_Germinating_Seeds_P Parameter: Tissue Value: Germinating Seeds
  misc_feature: MA Experiment ID: 20000452 Result: Up-regulated in Transcription
  misc_feature: MA Experiment 20000452 PARAMETER Experiment Name: At_CS6879_Shoots-Roots_P Parameter: Age (day) Value: 14
  misc_feature: MA Experiment 20000452 PARAMETER Experiment Name: At_CS6879_Shoots-Roots_P Parameter: Organism Value: A. thaliana
  misc_feature: MA Experiment 20000452 PARAMETER Experiment Name: At_CS6879_Shoots-Roots_P Parameter: Plant Line Value: CS6879 vs. WS
  misc_feature: MA Experiment 20000452 PARAMETER Experiment Name: At_CS6879_Shoots-Roots_P Parameter: Tissue Value: Shoots
atctgattcaggttggattgatcattgttcggagctccgggaaacatggcggcgacgagacaattacgaactctccaatctcagcctgaaaacaaggtatgtgtcgattgcgctcagaagaatcctcaatgggcgtcggtttcgtacggaatcttcatgtgtttggaatgctccgggaaacaccgaggcttaggcgttcacatatccttcgtcagatccgtaaccatggattcatggtctgcgatccagattaagaaaatggaagctggtggtaacgaacggctcaacaaattcttcgcgcaatacggaatcgctaaggagacagatattatctccaagtacaattcgaacgctgcttctgtgtatcgtgaccggatccaagctttagctgaaggtagaccatggaatgatccgccagttgttaaggaagcgaataagaagcctccgttggctcagggcggttacggaaacaacaataacaataacaatggaggatgggatagttgggataacgatgattcttacaaatctgatatgagaaggaatcagtcagcgaatgatttcagggcatcgggaaatagagaaggtgcacatgtgaagtcaaagtcgtcggaggatatctacacgcgatcgcagcttgaggcttctgccgctgggaaagagagtttcttcgcgaggagaatggcggagaatgagtctaagcctgaaggtcttcctccttcgcaaggtggcaagtatgtaggattcggatcaagctcggctccaccaccgagaaataatcaacaggatgatgttttctccgttgtttctcagggttttggaagactgtctctggttgctgcatctgcagctcagtcagctgctagtgttgttcaaacaggaaccaaggagttcacatccaaggtgaaggaaggtgggtatgatcacaaggtgagtgaaactgtaaatgtagttgctaataagacaacagagataggacataggacatggggaatcatgaaaggagtaatggcaatggcgacacagaaggtagaagagtttactaaagaaggatcaacaagctggaatcagcagagtgaaaatgagggcaatggttactaccagaactttggaaatgggaacaaagcagcgaattcatctgttggaggaggaaggccacaatcatcatcgacaagtggtcattacaacaactcgcagaattcaaattcttgggatagttggggagagaatgagaataagaagacagaagcagtagctccaaaggggtcatctgcttctaatgatgatgatggttggactggttgggatgatcatgatgccaaagatgatgggttcgatggtcattaccaaagtgcaggcgataagaaatctgctggtcacaacgggaaatcagacaccgcttggactggtggaggttttctctaa

SEQ ID NO: 47052 - protein, 459 aa, Arabidopsis thaliana
  peptide (1)..(459): Ceres Seq. ID no. 13578726
  misc_feature (4)..(120): Pfam Name: Putative GTPase activating protein for Arf Pfam Description: Putative GTPase activating protein for Arf
  misc_feature (178)..(360): Homolog of NCBI NO: 6319975 NR Description: Zn-finger-containing protein that functions as factor GTPase-activating protein and is involved in regulating
  misc_feature (4)..(417): Homolog of NCBI NO: 21489979 NR Description: ADP-ribosylation factor 1 GTPase activating
  misc_feature (1)..(162): Homolog of NCBI NO: 2286211 NR Description: putative ARF1 GTPase activating protein
  misc_feature (136)..(452): Homolog of NCBI NO: 2286211 NR Description: putative ARF1 GTPase activating protein
  misc_feature (1)..(162): Homolog of NCBI NO: 24663283 NR Description: GTPase-activating protein 69C CG4237-PA
  misc_feature (136)..(452): Homolog of NCBI NO: 24663283 NR Description: GTPase-activating protein 69C CG4237-PA
  misc_feature (149)..(458): Homolog of NCBI NO: 29367415 NR Description: ADP ribosylation GTPase-like protein
  misc_feature (1)..(459): Homolog of NCBI NO: 15224315 NR Description: arabidopsis pde1 suppressor 1 protein (Asp1)
  misc_feature (1)..(450): Homolog of NCBI NO: 10441356 NR Description: ARF GAP-like zinc finger-containing protein ZIGA2
  misc_feature (1)..(459): Homolog of NCBI NO: 15231865 NR Description: ARF GAP-like zinc finger-containing protein
MAATRQLRTLQSQPENKVCVDCAQKNPQWASVSYGIFMCLECSGKHRGLGVHISFVRSVTMDSWSAIQIKKMEAGGNERLNKFFAQYGIAKETDIISKYNSNAASVYRDRIQALAEGRPWNDPPVVKEANKKPPLAQGGYGNNNNNNNGGWDSWDNDDSYKSDMRRNQSANDFRASGNREGAHVKSKSSEDIYTRSQLEASAAGKESFFARRMAENESKPEGLPPSQGGKYVGFGSSSAPPPRNNQQDDVFSVVSQGFGRLSLVAASAAQSAASVVQTGTKEFTSKVKEGGYDHKVSETVNVVANKTTEIGHRTWGIMKGVMAMATQKVEEFTKEGSTSWNQQSENEGNGYYQNFGNGNKAANSSVGGGRPQSSSTSGHYNNSQNSNSWDSWGENENKKTEAVAPKGSSASNDDDGWTGWDDHDAKDDGFDGHYQSAGDKKSAGHNGKSDTAWTGGGFL

SEQ ID NO: 47053 - protein, 422 aa, Arabidopsis thaliana
  peptide (1)..(422): Ceres Seq. ID no. 13578727
  misc_feature (1)..(83): Pfam Name: Putative GTPase activating protein for Arf Pfam Description: Putative GTPase activating protein for Arf
  misc_feature (141)..(323): Homolog of NCBI NO: 6319975 NR Description: Zn-finger-containing protein that functions as factor GTPase-activating protein and is involved in regulating
  misc_feature (1)..(380): Homolog of NCBI NO: 21489979 NR Description: ADP-ribosylation factor 1 GTPase activating
  misc_feature (1)..(125): Homolog of NCBI NO: 2286211 NR Description: putative ARF1 GTPase activating protein
  misc_feature (99)..(415): Homolog of NCBI NO: 2286211 NR Description: putative ARF1 GTPase activating protein
  misc_feature (1)..(125): Homolog of NCBI NO: 24663283 NR Description: GTPase-activating protein 69C CG4237-PA
  misc_feature (99)..(415): Homolog of NCBI NO: 24663283 NR Description: GTPase-activating protein 69C CG4237-PA
  misc_feature (112)..(421): Homolog of NCBI NO: 29367415 NR Description: ADP ribosylation GTPase-like protein
  misc_feature (1)..(422): Homolog of NCBI NO: 15224315 NR Description: arabidopsis pde1 suppressor 1 protein (Asp1)
  misc_feature (1)..(413): Homolog of NCBI NO: 10441356 NR Description: ARF GAP-like zinc finger-containing protein ZIGA2
  misc_feature (1)..(422): Homolog of NCBI NO: 15231865 NR Description: ARF GAP-like zinc finger-containing protein
MCLECSGKHRGLGVHISFVRSVTMDSWSAIQIKKMEAGGNERLNKFFAQYGIAKETDIISKYNSNAASVYRDRIQALAEGRPWNDPPVVKEANKKPPLAQGGYGNNNNNNNGGWDSWDNDDSYKSDMRRNQSANDFRASGNREGAHVKSKSSEDIYTRSQLEASAAGKESFFARRMAENESKPEGLPPSQGGKYVGFGSSSAPPPRNNQQDDVFSVVSQGFGRLSLVAASAAQSAASVVQTGTKEFTSKVKEGGYDHKVSETVNVVANKTTEIGHRTWGIMKGVMAMATQKVEEFTKEGSTSWNQQSENEGNGYYQNFGNGNKAANSSVGGGRPQSSSTSGHYNNSQNSNSWDSWGENENKKTEAVAPKGSSASNDDDGWTGWDDHDAKDDGFDGHYQSAGDKKSAGHNGKSDTAWTGGGFL

SEQ ID NO: 47054 - protein, 399 aa, Arabidopsis thaliana
  peptide (1)..(399): Ceres Seq. ID no. 13578728
  misc_feature (1)..(60): Pfam Name: Putative GTPase activating protein for Arf Pfam Description: Putative GTPase activating protein for Arf
  misc_feature (118)..(300): Homolog of NCBI NO: 6319975 NR Description: Zn-finger-containing protein that functions as factor GTPase-activating protein and is involved in regulating
  misc_feature (1)..(357): Homolog of NCBI NO: 21489979 NR Description: ADP-ribosylation factor 1 GTPase activating
  misc_feature (1)..(102): Homolog of NCBI NO: 2286211 NR Description: putative ARF1 GTPase activating protein
  misc_feature (76)..(392): Homolog of NCBI NO: 2286211 NR Description: putative ARF1 GTPase activating protein
  misc_feature (1)..(102): Homolog of NCBI NO: 24663283 NR Description: GTPase-activating protein 69C CG4237-PA
  misc_feature (76)..(392): Homolog of NCBI NO: 24663283 NR Description: GTPase-activating protein 69C CG4237-PA
  misc_feature (89)..(398): Homolog of NCBI NO: 29367415 NR Description: ADP ribosylation GTPase-like protein
  misc_feature (1)..(399): Homolog of NCBI NO: 15224315 NR Description: arabidopsis pde1 suppressor 1 protein (Asp1)
  misc_feature (1)..(390): Homolog of NCBI NO: 10441356 NR Description: ARF GAP-like zinc finger-containing protein ZIGA2
  misc_feature (1)..(399): Homolog of NCBI NO: 15231865 NR Description: ARF GAP-like zinc finger-containing protein
MDSWSAIQIKKMEAGGNERLNKFFAQYGIAKETDIISKYNSNAASVYRDRIQALAEGRPWNDPPVVKEANKKPPLAQGGYGNNNNNNNGGWDSWDNDDSYKSDMRRNQSANDFRASGNREGAHVKSKSSEDIYTRSQLEASAAGKESFFARRMAENESKPEGLPPSQGGKYVGFGSSSAPPPRNNQQDDVFSVVSQGFGRLSLVAASAAQSAASVVQTGTKEFTSKVKEGGYDHKVSETVNVVANKTTEIGHRTWGIMKGVMAMATQKVEEFTKEGSTSWNQQSENEGNGYYQNFGNGNKAANSSVGGGRPQSSSTSGHYNNSQNSNSWDSWGENENKKTEAVAPKGSSASNDDDGWTGWDDHDAKDDGFDGHYQSAGDKKSAGHNGKSDTAWTGGGFL

SEQ ID NO: 47055 - DNA, 1616 bp, Arabidopsis thaliana
  misc_feature (1)..(1616): Ceres Seq. ID no. 12575638
  misc_feature: MA Experiment ID: 20000234 Result: Down-regulated in Transcription
  misc_feature: MA Experiment 20000234 PARAMETER Experiment Name: At_Siliques_P Parameter: Age (day) Value: 21
  misc_feature: MA Experiment 20000234 PARAMETER Experiment Name: At_Siliques_P Parameter: Organism Value: A. thaliana
  misc_feature: MA Experiment 20000234 PARAMETER Experiment Name: At_Siliques_P Parameter: Plant Line Value: WS
  misc_feature: MA Experiment 20000234 PARAMETER Experiment Name: At_Siliques_P Parameter: Tissue Value: Less Than 5mm Siliques vs. Whole Plant
  misc_feature: MA Experiment ID: 20000235 Result: Down-regulated in Transcription
  misc_feature: MA Experiment 20000235 PARAMETER Experiment Name: At_Siliques_P Parameter: Age (day) Value: 21
  misc_feature: MA Experiment 20000235 PARAMETER Experiment Name: At_Siliques_P Parameter: Organism Value: A. thaliana
  misc_feature: MA Experiment 20000235 PARAMETER Experiment Name: At_Siliques_P Parameter: Plant Line Value: WS
  misc_feature: MA Experiment 20000235 PARAMETER Experiment Name: At_Siliques_P Parameter: Tissue Value: 5-10mm Siliques vs. Whole Plant
  misc_feature: MA Experiment ID: 20000265 Result: Up-regulated in Transcription
  misc_feature: MA Experiment 20000265 PARAMETER Experiment Name: At_Open_Flower_P Parameter: Age (day) Value: 21
  misc_feature: MA Experiment 20000265 PARAMETER Experiment Name: At_Open_Flower_P Parameter: Plant Line Value: WS
  misc_feature: MA Experiment 20000265 PARAMETER Experiment Name: At_Open_Flower_P Parameter: Tissue Value: Closed Flower vs. Whole Plant
  misc_feature: MA Experiment ID: 20000438 Result: Down-regulated in Transcription
  misc_feature: MA Experiment 20000438 PARAMETER Experiment Name: At_Shoots__P Parameter: Age (day) Value: 14
  misc_feature: MA Experiment 20000438 PARAMETER Experiment Name: At_Shoots__P Parameter: Tissue Value: Shoots vs. Whole Plant
  misc_feature: MA Experiment ID: 20000439 Result: Up-regulated in Transcription
  misc_feature: MA Experiment 20000439 PARAMETER Experiment Name: At_Roots__P Parameter: Age (day) Value: 14 vs. 21
  misc_feature: MA Experiment 20000439 PARAMETER Experiment Name: At_Roots__P Parameter: Organism Value: A. thaliana
  misc_feature: MA Experiment 20000439 PARAMETER Experiment Name: At_Roots__P Parameter: Tissue Value: Roots vs. Whole Plant
  misc_feature: MA Experiment ID: 20000496 Result: Down-regulated in Transcription
  misc_feature: MA Experiment 20000496 PARAMETER Experiment Name: At_Guard_Cells_P Parameter: Harvest Date Value: 7/19/2002
  misc_feature: MA Experiment 20000496 PARAMETER Experiment Name: At_Guard_Cells_P Parameter: Organism Value: Canola
  misc_feature: MA Experiment 20000496 PARAMETER Experiment Name: At_Guard_Cells_P Parameter: Tissue Value: Guard Cells vs. Leaves
  misc_feature: MA Experiment ID: 20000527 Result: Down-regulated in Transcription
  misc_feature: MA Experiment 20000527 PARAMETER Experiment Name: At_10percent_PEG_P Parameter: Age (day) Value: 20
  misc_feature: MA Experiment 20000527 PARAMETER Experiment Name: At_10percent_PEG_P Parameter: Organism Value: A. thaliana
  misc_feature: MA Experiment 20000527 PARAMETER Experiment Name: At_10percent_PEG_P Parameter: Plant Line Value: WS
  misc_feature: MA Experiment 20000527 PARAMETER Experiment Name: At_10percent_PEG_P Parameter: Timepoint (day) Value: 20
  misc_feature: MA Experiment 20000527 PARAMETER Experiment Name: At_10percent_PEG_P Parameter: Tissue Value: Whole Plant
  misc_feature: MA Experiment 20000527 PARAMETER Experiment Name: At_10percent_PEG_P Parameter: Treatment Value: 10percent PEG vs. No Treatment
  misc_feature: MA Experiment ID: 20000794 Result: Up-regulated in Transcription
  misc_feature: MA Experiment 20000794 PARAMETER Experiment Name: At_Petals_P Parameter: Age (day) Value: 23-25 days
  misc_feature: MA Experiment 20000794 PARAMETER Experiment Name: At_Petals_P Parameter: Plant Line Value: WS
  misc_feature: MA Experiment 20000794 PARAMETER Experiment Name: At_Petals_P Parameter: Tissue Value: Petals vs. Whole plant
  misc_feature: MA Experiment ID: 20001904 Result: Up-regulated in Transcription
  misc_feature: MA Experiment 20001904 PARAMETER Experiment Name: At_Drought_Reproduction_P Parameter: Age (day) Value: 37
  misc_feature: MA Experiment 20001904 PARAMETER Experiment Name: At_Drought_Reproduction_P Parameter: Organism Value: A. thaliana
  misc_feature: MA Experiment 20001904 PARAMETER Experiment Name: At_Drought_Reproduction_P Parameter: Plant Line Value: WS
  misc_feature: MA Experiment 20001904 PARAMETER Experiment Name: At_Drought_Reproduction_P Parameter: Timepoint (day) Value: 7
  misc_feature: MA Experiment 20001904 PARAMETER Experiment Name: At_Drought_Reproduction_P Parameter: Tissue Value: Rosettes
  misc_feature: MA Experiment 20001904 PARAMETER Experiment Name: At_Drought_Reproduction_P Parameter: Treatment Value: Drought vs. No Drought
  misc_feature: MA Experiment ID: 20001905 Result: Up-regulated in Transcription
  misc_feature: MA Experiment 20001905 PARAMETER Experiment Name: At_Drought_Reproduction_P Parameter: Age (day) Value: 40
  misc_feature: MA Experiment 20001905 PARAMETER Experiment Name: At_Drought_Reproduction_P Parameter: Organism Value: A. thaliana
  misc_feature: MA Experiment 20001905 PARAMETER Experiment Name: At_Drought_Reproduction_P Parameter: Plant Line Value: WS
  misc_feature: MA Experiment 20001905 PARAMETER Experiment Name: At_Drought_Reproduction_P Parameter: Timepoint (day) Value: 10
  misc_feature: MA Experiment 20001905 PARAMETER Experiment Name: At_Drought_Reproduction_P Parameter: Tissue Value: Rosettes
  misc_feature: MA Experiment 20001905 PARAMETER Experiment Name: At_Drought_Reproduction_P Parameter: Treatment Value: Drought vs. No Drought
atgggtgagaaaacaaactcacgttatctcggtgtaatcatcactcgaaaatctataattttcttgttcatatcaatcatcaccgtcctttcttggttttttatcttttcttccacaaaccctaaccgagttctcgatcacatctcagtatcagaatccacagatgtacctctcatcatcatcaagaactcaaacagttctccacaaaacaacgcaccaaaaccccaaaacagagaaggagcagaaacagaggaacccattaaagaaaacagaggaggaacaaaaacagagtcatccatgaatcaaaacagaggcgaaaccctccggtgtatccaaagggtttctccttctccaaggccattgaaagtctacatgtatgatatgagtccagagtttcattttgggttattgggttggaaaccagagagaaacggtgtcgtttggcctgatatcagagtcaatgttcctcaccatccaggtggtcttaacttgcagcacagtgttgagtattggctcacattagatcttttgttctctgagcttccagaagattctagaagctctcgggccgcgatacgtgtaaagaactcgagcgaagctgatgtcgtgttcgtgcccttcttctcttcattgagctataaccgattctctaaggttaaccaaaagcagaagaagagccaggacaaagagttgcaggaaaatgtggtgaaatacgtaacgtcccaaaaagagtggaagacctcaggagggaaggatcatgtgatcatggcgcatcatccgaatagtatgtcgacggcaaggcataagctatttccggcgatgtttgtggtcgctgactttggtagatactcgccacatgttgccaatgttgacaaagacattgtggctccatacaaacaccttgttccatcgtatgttaatgacacatcgggctttgatggccgtccgatcttgctctacttccaaggagccatctaccgcaaagctggtggatttgtgagacaagagctatataatcttctcaaagaagaaaaagacgtccacttctctttcggaagcgtaaggaaccacggcatatctaaagccggcgaaggaatgagatcgtccaagttctgtctcaacatagccggggatacaccatcctcgaatcgcctcttcgacgccatagctagtcactgtatacccgtgatcattagcgatgacatcgagttaccatatgaggatgtcctcaactacaatgagttctgtctctttgtcagatcatcagacgctttaaagaaagggtttctgatgggtcttgtcaggagtattggcagagaagagtataataagatgtggcttcggttgaaggaagtggagaggtatttcgatttgcgttttccggtgaaggatgacgagggagattatgcagttcagatgatttggaaagctgttgccaggaaagctcctttggtgaagatgaaggttcacagatttcagaggtttacaaggcctttttagggtttctaatgatattttgggaatttgatttagatagaaagataatgaatacagtttccaatgcaaccatgtgaatgtttattacagtcagccatgtgaagaaagaggttactttg

SEQ ID NO: 47056 - protein, 499 aa, Arabidopsis thaliana
  peptide (1)..(499): Ceres Seq. ID no. 12575639
  misc_feature (123)..(449): Pfam Name: Exostosin family Pfam Description: Exostosin family
  misc_feature (123)..(449): Pfam Name: Exostosin family Pfam Description: Exostosin family
  misc_feature (115)..(494): Homolog of NCBI NO: 34899802 NR Description: OJ1092_A07.9 [Oryza sativa (japonica
  misc_feature (113)..(494): Homolog of NCBI NO: 30686300 NR Description: Exostosin family [Arabidopsis thaliana]
  misc_feature (364)..(481): Homolog of NCBI NO: 7487224 NR Description: hypothetical protein T1F15.13 - Arabidopsis
  misc_feature (115)..(382): Homolog of NCBI NO: 7487224 NR Description: hypothetical protein T1F15.13 - Arabidopsis
  misc_feature (109)..(498): Homolog of NCBI NO: 19386797 NR Description: OJ1485_B09.5 [Oryza sativa (japonica
  misc_feature (115)..(494): Homolog of NCBI NO: 34899802 NR Description: OJ1092_A07.9 [Oryza sativa (japonica
  misc_feature (364)..(481): Homolog of NCBI NO: 7487224 NR Description: hypothetical protein T1F15.13 - Arabidopsis
  misc_feature (109)..(498): Homolog of NCBI NO: 19386797 NR Description: OJ1485_B09.5 [Oryza sativa (japonica
  misc_feature (1)..(499): Homolog of NCBI NO: 15228598 NR Description: Exostosin family; protein id: At3g03650.1
  misc_feature (109)..(496): Homolog of NCBI NO: 15230692 NR Description: Exostosin family; protein id: At3g45400.1
  misc_feature (121)..(497): Homolog of NCBI NO: 18410670 NR Description: Exostosin family
  misc_feature (121)..(497): Homolog of NCBI NO: 25406363 NR Description: F25A4.34 [imported] - Arabidopsis thaliana
  misc_feature (115)..(498): Homolog of NCBI NO: 22330483 NR Description: Exostosin family; protein id: At1g67410.1
  misc_feature (115)..(382): Homolog of NCBI NO: 7487224 NR Description: hypothetical protein T1F15.13 - Arabidopsis
  misc_feature (113)..(494): Homolog of NCBI NO: 30686300 NR Description: Exostosin family [Arabidopsis thaliana]
  misc_feature (115)..(498): Homolog of NCBI NO: 22330483 NR Description: Exostosin family; protein id: At1g67410.1
  misc_feature (121)..(497): Homolog of NCBI NO: 25406363 NR Description: F25A4.34 [imported] - Arabidopsis thaliana
  misc_feature (121)..(497): Homolog of NCBI NO: 18410670 NR Description: Exostosin family
  misc_feature (109)..(496): Homolog of NCBI NO: 15230692 NR Description: Exostosin family; protein id: At3g45400.1
  misc_feature (1)..(499): Homolog of NCBI NO: 15228598 NR Description: Exostosin family; protein id: At3g03650.1
MGEKTNSRYLGVIITRKSIIFLFISIITVLSWFFIFSSTNPNRVLDHISVSESTDVPLIIIKNSNSSPQNNAPKPQNREGAETEEPIKENRGGTKTESSMNQNRGETLRCIQRVSPSPRPLKVYMYDMSPEFHFGLLGWKPERNGVVWPDIRVNVPHHPGGLNLQHSVEYWLTLDLLFSELPEDSRSSRAAIRVKNSSEADVVFVPFFSSLSYNRFSKVNQKQKKSQDKELQENVVKYVTSQKEWKTSGGKDHVIMAHHPNSMSTARHKLFPAMFVVADFGRYSPHVANVDKDIVAPYKHLVPSYVNDTSGFDGRPILLYFQGAIYRKAGGFVRQELYNLLKEEKDVHFSFGSVRNHGISKAGEGMRSSKFCLNIAGDTPSSNRLFDAIASHCIPVIISDDIELPYEDVLNYNEFCLFVRSSDALKKGFLMGLVRSIGREEYNKMWLRLKEVERYFDLRFPVKDDEGDYAVQMIWKAVARKAPLVKMKVHRFQRFTRPF

SEQ ID NO: 47057 - protein, 400 aa, Arabidopsis thaliana
  peptide (1)..(400): Ceres Seq. ID no. 12575640
  misc_feature (24)..(350): Pfam Name: Exostosin family Pfam Description: Exostosin family
  misc_feature (24)..(350): Pfam Name: Exostosin family Pfam Description: Exostosin family
  misc_feature (16)..(395): Homolog of NCBI NO: 34899802 NR Description: OJ1092_A07.9 [Oryza sativa (japonica
  misc_feature (14)..(395): Homolog of NCBI NO: 30686300 NR Description: Exostosin family [Arabidopsis thaliana]
  misc_feature (265)..(382): Homolog of NCBI NO: 7487224 NR Description: hypothetical protein T1F15.13 - Arabidopsis
  misc_feature (16)..(283): Homolog of NCBI NO: 7487224 NR Description: hypothetical protein T1F15.13 - Arabidopsis
  misc_feature (10)..(399): Homolog of NCBI NO: 19386797 NR Description: OJ1485_B09.5 [Oryza sativa (japonica
  misc_feature (16)..(395): Homolog of NCBI NO: 34899802 NR Description: OJ1092_A07.9 [Oryza sativa (japonica
  misc_feature (265)..(382): Homolog of NCBI NO: 7487224 NR Description: hypothetical protein T1F15.13 - Arabidopsis
  misc_feature (10)..(399): Homolog of NCBI NO: 19386797 NR Description: OJ1485_B09.5 [Oryza sativa (japonica
  misc_feature (1)..(400): Homolog of NCBI NO: 15228598 NR Description: Exostosin family; protein id: At3g03650.1
  misc_feature (10)..(397): Homolog of NCBI NO: 15230692 NR Description: Exostosin family; protein id: At3g45400.1
  misc_feature (22)..(398): Homolog of NCBI NO: 18410670 NR Description: Exostosin family
  misc_feature (22)..(398): Homolog of NCBI NO: 25406363 NR Description: F25A4.34 [imported] - Arabidopsis thaliana
  misc_feature (16)..(399): Homolog of NCBI NO: 22330483 NR Description: Exostosin family; protein id: At1g67410.1
  misc_feature (16)..(283): Homolog of NCBI NO: 7487224 NR Description: hypothetical protein T1F15.13 - Arabidopsis
  misc_feature (14)..(395): Homolog of NCBI NO: 30686300 NR Description: Exostosin family [Arabidopsis thaliana]
  misc_feature (16)..(399): Homolog of NCBI NO: 22330483 NR Description: Exostosin family; protein id: At1g67410.1
  misc_feature (22)..(398): Homolog of NCBI NO: 25406363 NR Description: F25A4.34 [imported] - Arabidopsis thaliana
  misc_feature (22)..(398): Homolog of NCBI NO: 18410670 NR Description: Exostosin family
  misc_feature (10)..(397): Homolog of NCBI NO: 15230692 NR Description: Exostosin family; protein id: At3g45400.1
  misc_feature (1)..(400): Homolog of NCBI NO: 15228598 NR Description: Exostosin family; protein id: At3g03650.1
MNQNRGETLRCIQRVSPSPRPLKVYMYDMSPEFHFGLLGWKPERNGVVWPDIRVNVPHHPGGLNLQHSVEYWLTLDLLFSELPEDSRSSRAAIRVKNSSEADVVFVPFFSSLSYNRFSKVNQKQKKSQDKELQENVVKYVTSQKEWKTSGGKDHVIMAHHPNSMSTARHKLFPAMFVVADFGRYSPHVANVDKDIVAPYKHLVPSYVNDTSGFDGRPILLYFQGAIYRKAGGFVRQELYNLLKEEKDVHFSFGSVRNHGISKAGEGMRSSKFCLNIAGDTPSSNRLFDAIASHCIPVIISDDIELPYEDVLNYNEFCLFVRSSDALKKGFLMGLVRSIGREEYNKMWLRLKEVERYFDLRFPVKDDEGDYAVQMIWKAVARKAPLVKMKVHRFQRFTRPF

SEQ ID NO: 47058 - protein, 375 aa, Arabidopsis thaliana
  peptide (1)..(375): Ceres Seq. ID no. 12575641
  misc_feature (1)..(325): Pfam Name: Exostosin family Pfam Description: Exostosin family
  misc_feature (1)..(325): Pfam Name: Exostosin family Pfam Description: Exostosin family
  misc_feature (1)..(370): Homolog of NCBI NO: 34899802 NR Description: OJ1092_A07.9 [Oryza sativa (japonica
  misc_feature (1)..(370): Homolog of NCBI NO: 30686300 NR Description: Exostosin family [Arabidopsis thaliana]
  misc_feature (240)..(357): Homolog of NCBI NO: 7487224 NR Description: hypothetical protein T1F15.13 - Arabidopsis
  misc_feature (1)..(258): Homolog of NCBI NO: 7487224 NR Description: hypothetical protein T1F15.13 - Arabidopsis
  misc_feature (1)..(374): Homolog of NCBI NO: 19386797 NR Description: OJ1485_B09.5 [Oryza sativa (japonica
  misc_feature (1)..(370): Homolog of NCBI NO: 34899802 NR Description: OJ1092_A07.9 [Oryza sativa (japonica
  misc_feature (240)..(357): Homolog of NCBI NO: 7487224 NR Description: hypothetical protein T1F15.13 - Arabidopsis
  misc_feature (1)..(374): Homolog of NCBI NO: 19386797 NR Description: OJ1485_B09.5 [Oryza sativa (japonica
  misc_feature (1)..(375): Homolog of NCBI NO: 15228598 NR Description: Exostosin family; protein id: At3g03650.1
  misc_feature (1)..(372): Homolog of NCBI NO: 15230692 NR Description: Exostosin family; protein id: At3g45400.1
  misc_feature (1)..(373): Homolog of NCBI NO: 18410670 NR Description: Exostosin family
  misc_feature (1)..(373): Homolog of NCBI NO: 25406363 NR Description: F25A4.34 [imported] - Arabidopsis thaliana
  misc_feature (1)..(374): Homolog of NCBI NO: 22330483 NR Description: Exostosin family; protein id: At1g67410.1
  misc_feature (1)..(258): Homolog of NCBI NO: 7487224 NR Description: hypothetical protein T1F15.13 - Arabidopsis
  misc_feature (1)..(370): Homolog of NCBI NO: 30686300 NR Description: Exostosin family [Arabidopsis thaliana]
  misc_feature (1)..(374): Homolog of NCBI NO: 22330483 NR Description: Exostosin family; protein id: At1g67410.1
  misc_feature (1)..(373): Homolog of NCBI NO: 25406363 NR Description: F25A4.34 [imported] - Arabidopsis thaliana
  misc_feature (1)..(373): Homolog of NCBI NO: 18410670 NR Description: Exostosin family
  misc_feature (1)..(372): Homolog of NCBI NO: 15230692 NR Description: Exostosin family; protein id: At3g45400.1
  misc_feature (1)..(375): Homolog of NCBI NO: 15228598 NR Description: Exostosin family; protein id: At3g03650.1
MYDMSPEFHFGLLGWKPERNGVVWPDIRVNVPHHPGGLNLQHSVEYWLTLDLLFSELPEDSRSSRAAIRVKNSSEADVVFVPFFSSLSYNRFSKVNQKQKKSQDKELQENVVKYVTSQKEWKTSGGKDHVIMAHHPNSMSTARHKLFPAMFVVADFGRYSPHVANVDKDIVAPYKHLVPSYVNDTSGFDGRPILLYFQGAIYRKAGGFVRQELYNLLKEEKDVHFSFGSVRNHGISKAGEGMRSSKFCLNIAGDTPSSNRLFDAIASHCIPVIISDDIELPYEDVLNYNEFCLFVRSSDALKKGFLMGLVRSIGREEYNKMWLRLKEVERYFDLRFPVKDDEGDYAVQMIWKAVARKAPLVKMKVHRFQRFTRPF

SEQ ID NO: 47059 - DNA, 1670 bp, Arabidopsis thaliana
  misc_feature (1)..(1670): Ceres Seq. ID no. 14316585
  misc_feature: MA Experiment ID: 20000173 Result: Down-regulated in Transcription
  misc_feature: MA Experiment 20000173 PARAMETER Experiment Name: At_42deg_Heat_P Parameter: Age (day) Value: 14
  misc_feature: MA Experiment 20000173 PARAMETER Experiment Name: At_42deg_Heat_P Parameter: Organism Value: A. thaliana
  misc_feature: MA Experiment 20000173 PARAMETER Experiment Name: At_42deg_Heat_P Parameter: Plant Line Value: WS
  misc_feature: MA Experiment 20000173 PARAMETER Experiment Name: At_42deg_Heat_P Parameter: Temperature (deg C) Value: 42 vs. 22
  misc_feature: MA Experiment 20000173 PARAMETER Experiment Name: At_42deg_Heat_P Parameter: Timepoint (hr) Value: 6
  misc_feature: MA Experiment 20000173 PARAMETER Experiment Name: At_42deg_Heat_P Parameter: Tissue Value: Aerial
  misc_feature: MA Experiment ID: 20000234 Result: Up-regulated in Transcription
  misc_feature: MA Experiment 20000234 PARAMETER Experiment Name: At_Siliques_P Parameter: Age (day) Value: 21
  misc_feature: MA Experiment 20000234 PARAMETER Experiment Name: At_Siliques_P Parameter: Organism Value: A. thaliana
  misc_feature: MA Experiment 20000234 PARAMETER Experiment Name: At_Siliques_P Parameter: Plant Line Value: WS
  misc_feature: MA Experiment 20000234 PARAMETER Experiment Name: At_Siliques_P Parameter: Tissue Value: Less Than 5mm Siliques vs. Whole Plant
  misc_feature: MA Experiment ID: 20000265 Result: Up-regulated in Transcription
  misc_feature: MA Experiment 20000265 PARAMETER Experiment Name: At_Open_Flower_P Parameter: Age (day) Value: 21
  misc_feature: MA Experiment 20000265 PARAMETER Experiment Name: At_Open_Flower_P Parameter: Plant Line Value: WS
  misc_feature: MA Experiment 20000265 PARAMETER Experiment Name: At_Open_Flower_P Parameter: Tissue Value: Closed Flower vs. Whole Plant
  misc_feature: MA Experiment ID: 20000439 Result: Up-regulated in Transcription
  misc_feature: MA Experiment 20000439 PARAMETER Experiment Name: At_Roots__P Parameter: Age (day) Value: 14 vs. 21
  misc_feature: MA Experiment 20000439 PARAMETER Experiment Name: At_Roots__P Parameter: Organism Value: A. thaliana
  misc_feature: MA Experiment 20000439 PARAMETER Experiment Name: At_Roots__P Parameter: Tissue Value: Roots vs. Whole Plant
  misc_feature: MA Experiment ID: 20000495 Result: Up-regulated in Transcription
  misc_feature: MA Experiment 20000495 PARAMETER Experiment Name: At_Guard_Cells_P Parameter: Harvest Date Value: 8/2/2002
  misc_feature: MA Experiment 20000495 PARAMETER Experiment Name: At_Guard_Cells_P Parameter: Organism Value: A. thaliana
  misc_feature: MA Experiment 20000495 PARAMETER Experiment Name: At_Guard_Cells_P Parameter: Tissue Value: Guard Cells vs. Leaves
gataatttcggagaaaaaaatccacaaaagtttcaaacttttggcaaattaagcggtttttgttaggttttaattattttttccgatgatgaagcggcgatgagtgtcgtcgtcggagatagatcggagagtactctgatgcggagtgactataaagctcctccgagtcaagctattcccaaagctcgattacaagtttggttctttagagtttgttcttgcattttggtttggacttgtttgattcagctcttttggcattcccaaatcttcactggtttaaccaatcacatttctagattctctctcccggttcagtcagttccattacctcctcctcttcctccaaggaattacacaagtaatggaattttactagtgtcctgtaatggcggtttgaatcaaatgcgtgcagcgatttgtgatatggtgactgttgctaggctattgaatttgactcttgttgttcctgagcttgataaaaaatcattctgggctgatacaagtgactttgaggacatttttgatataaagcatttcattgattcgttaagagatgaagttaggatcataaggagacttcctaaacggtatagtaagaagtatggattcaaattgttcgaaatgccgcctgtgagctggtccaacgacaaatattacttgcaacaggtattgccgcggtttagtaaacgtaaagttatacatttcgttcggagtgatacgcgattggcgaacaatggtctttctcttgaccttcaaaggctgagatgccgagtgaatttccaaggactgagattcactccacggattgaggctttgggatcaaagttagttcggattcttcaacaaagagggtcttttgtggctttgcatttgagatatgagatggacatgttggctttctctggttgcactcatggttgtaccgatgaagaagctgaagaactcaaaaagatgaggtatgcatatccatggtggagagagaaagagatagtttcagaagaaaggagagtgcaaggactgtgtcctttgacaccggaggaggcggttttggttcttaaagcattggggtttcaaaaggatacacagatatacattgcagctggtgagatttttggtggtgcaaagagattagcccttctaaaggaatcatttccacgaattgtgaaaaaggaaatgctattagatccaacagaattgcaacagtttcagaaccattcatctcaaatggcagctctagatttcatagtatctgtagccagcaacacttttattcctacctattatggaaacatggcaaaagttgtcgaaggtcatcggaggtaccttgggtttaagaaaacaatcttgctagaccggaagagacttgtggagcttttagacttgcataacaacaaaacgctctcttgggatcagtttgcagtagctgtcaaggatgcccatcaaggacgacgaatgggagaaccaacacatcggaaagttatctccgttagaccgaaggaagaagattacttctatgccaatcctcaagaatgtatcagttaaaatgatatagatcactaaccactagagcaggatttgattagttcttgtttctttctttgtttatagacctttttcagtttctgtaaagtaagatgaagctaaaaagattgtgtcatcgttgtacc

SEQ ID NO: 47060 - protein, 481 aa, Arabidopsis thaliana
  peptide (1)..(481): Ceres Seq. ID no. 14316586
  misc_feature (93)..(440): Pfam Name: Plant protein family Pfam Description: Plant protein family
  misc_feature (93)..(480): Homolog of NCBI NO: 6041793 NR Description: putative auxin-independent growth promoter
  misc_feature (37)..(460): Homolog of NCBI NO: 34896166 NR Description: hypothetical protein~similar to Arabidopsis
  misc_feature (77)..(480): Homolog of NCBI NO: 34902158 NR Description: Putative growth regulator protein
  misc_feature (28)..(480): Homolog of NCBI NO: 30678517 NR Description: auxin-independent growth promoter -related
  misc_feature (26)..(480): Homolog of NCBI NO: 15242375 NR Description: expressed protein [Arabidopsis thaliana]
  misc_feature (28)..(481): Homolog of NCBI NO: 19071634 NR Description: putative auxin independent growth-related protein
  misc_feature (5)..(480): Homolog of NCBI NO: 15223028 NR Description: growth regulator protein -related [Arabidopsis
  misc_feature (8)..(480): Homolog of NCBI NO: 8778398 NR Description: F16A14.24 [Arabidopsis thaliana]
  misc_feature (1)..(481): Homolog of NCBI NO: 15227586 NR Description: axi 1 protein from Nicotiana tabacum -related
  misc_feature (1)..(481): Homolog of NCBI NO: 27754419 NR Description: putative axi 1 protein [Arabidopsis thaliana]
MSVVVGDRSESTLMRSDYKAPPSQAIPKARLQVWFFRVCSCILVWTCLIQLFWHSQIFTGLTNHISRFSLPVQSVPLPPPLPPRNYTSNGILLVSCNGGLNQMRAAICDMVTVARLLNLTLVVPELDKKSFWADTSDFEDIFDIKHFIDSLRDEVRIIRRLPKRYSKKYGFKLFEMPPVSWSNDKYYLQQVLPRFSKRKVIHFVRSDTRLANNGLSLDLQRLRCRVNFQGLRFTPRIEALGSKLVRILQQRGSFVALHLRYEMDMLAFSGCTHGCTDEEAEELKKMRYAYPWWREKEIVSEERRVQGLCPLTPEEAVLVLKALGFQKDTQIYIAAGEIFGGAKRLALLKESFPRIVKKEMLLDPTELQQFQNHSSQMAALDFIVSVASNTFIPTYYGNMAKVVEGHRRYLGFKKTILLDRKRLVELLDLHNNKTLSWDQFAVAVKDAHQGRRMGEPTHRKVISVRPKEEDYFYANPQECIS

SEQ ID NO: 47061 - protein, 468 aa, Arabidopsis thaliana
  peptide (1)..(468): Ceres Seq. ID no. 14316587
  misc_feature (80)..(427): Pfam Name: Plant protein family Pfam Description: Plant protein family
  misc_feature (80)..(467): Homolog of NCBI NO: 6041793 NR Description: putative auxin-independent growth promoter
  misc_feature (24)..(447): Homolog of NCBI NO: 34896166 NR Description: hypothetical protein~similar to Arabidopsis
  misc_feature (64)..(467): Homolog of NCBI NO: 34902158 NR Description: Putative growth regulator protein
  misc_feature (15)..(467): Homolog of NCBI NO: 30678517 NR Description: auxin-independent growth promoter -related
  misc_feature (13)..(467): Homolog of NCBI NO: 15242375 NR Description: expressed protein [Arabidopsis thaliana]
  misc_feature (15)..(468): Homolog of NCBI NO: 19071634 NR Description: putative auxin independent growth-related protein
  misc_feature (1)..(467): Homolog of NCBI NO: 15223028 NR Description: growth regulator protein -related [Arabidopsis
  misc_feature (1)..(467): Homolog of NCBI NO: 8778398 NR Description: F16A14.24 [Arabidopsis thaliana]
  misc_feature (1)..(468): Homolog of NCBI NO: 15227586 NR Description: axi 1 protein from Nicotiana tabacum -related
  misc_feature (1)..(468): Homolog of NCBI NO: 27754419 NR Description: putative axi 1 protein [Arabidopsis thaliana]
MRSDYKAPPSQAIPKARLQVWFFRVCSCILVWTCLIQLFWHSQIFTGLTNHISRFSLPVQSVPLPPPLPPRNYTSNGILLVSCNGGLNQMRAAICDMVTVARLLNLTLVVPELDKKSFWADTSDFEDIFDIKHFIDSLRDEVRIIRRLPKRYSKKYGFKLFEMPPVSWSNDKYYLQQVLPRFSKRKVIHFVRSDTRLANNGLSLDLQRLRCRVNFQGLRFTPRIEALGSKLVRILQQRGSFVALHLRYEMDMLAFSGCTHGCTDEEAEELKKMRYAYPWWREKEIVSEERRVQGLCPLTPEEAVLVLKALGFQKDTQIYIAAGEIFGGAKRLALLKESFPRIVKKEMLLDPTELQQFQNHSSQMAALDFIVSVASNTFIPTYYGNMAKVVEGHRRYLGFKKTILLDRKRLVELLDLHNNKTLSWDQFAVAVKDAHQGRRMGEPTHRKVISVRPKEEDYFYANPQECIS

SEQ ID NO: 47062 - protein, 379 aa, Arabidopsis thaliana
  peptide (1)..(379): Ceres Seq. ID no. 14316588
  misc_feature (1)..(338): Pfam Name: Plant protein family Pfam Description: Plant protein family
  misc_feature (1)..(378): Homolog of NCBI NO: 6041793 NR Description: putative auxin-independent growth promoter
  misc_feature (1)..(358): Homolog of NCBI NO: 34896166 NR Description: hypothetical protein~similar to Arabidopsis
  misc_feature (1)..(378): Homolog of NCBI NO: 34902158 NR Description: Putative growth regulator protein
  misc_feature (1)..(378): Homolog of NCBI NO: 30678517 NR Description: auxin-independent growth promoter -related
  misc_feature (1)..(378): Homolog of NCBI NO: 15242375 NR Description: expressed protein [Arabidopsis thaliana]
  misc_feature (1)..(379): Homolog of NCBI NO: 19071634 NR Description: putative auxin independent growth-related protein
  misc_feature (1)..(378): Homolog of NCBI NO: 15223028 NR Description: growth regulator protein -related [Arabidopsis
  misc_feature (1)..(378): Homolog of NCBI NO: 8778398 NR Description: F16A14.24 [Arabidopsis thaliana]
  misc_feature (1)..(379): Homolog of NCBI NO: 15227586 NR Description: axi 1 protein from Nicotiana tabacum -related
  misc_feature (1)..(379): Homolog of NCBI NO: 27754419 NR Description: putative axi 1 protein [Arabidopsis thaliana]
MRAAICDMVTVARLLNLTLVVPELDKKSFWADTSDFEDIFDIKHFIDSLRDEVRIIRRLPKRYSKKYGFKLFEMPPVSWSNDKYYLQQVLPRFSKRKVIHFVRSDTRLANNGLSLDLQRLRCRVNFQGLRFTPRIEALGSKLVRILQQRGSFVALHLRYEMDMLAFSGCTHGCTDEEAEELKKMRYAYPWWREKEIVSEERRVQGLCPLTPEEAVLVLKALGFQKDTQIYIAAGEIFGGAKRLALLKESFPRIVKKEMLLDPTELQQFQNHSSQMAALDFIVSVASNTFIPTYYGNMAKVVEGHRRYLGFKKTILLDRKRLVELLDLHNNKTLSWDQFAVAVKDAHQGRRMGEPTHRKVISVRPKEEDYFYANPQECIS

SEQ ID NO: 47063 - DNA, 1478 bp, Arabidopsis thaliana
  misc_feature (1)..(1478): Ceres Seq. ID no. 13578741
  misc_feature: MA Experiment ID: 20000184 Result: Up-regulated in Transcription
  misc_feature: MA Experiment 20000184 PARAMETER Experiment Name: At_Shoots__P Parameter: Age (day) Value: 7
  misc_feature: MA Experiment 20000184 PARAMETER Experiment Name: At_Shoots__P Parameter: Tissue Value: Shoots vs. Whole Plant
  misc_feature: MA Experiment ID: 20000185 Result: Up-regulated in Transcription
  misc_feature: MA Experiment 20000185 PARAMETER Experiment Name: At_Roots__P Parameter: Age (day) Value: 7 vs. 21
  misc_feature: MA Experiment 20000185 PARAMETER Experiment Name: At_Roots__P Parameter: Organism Value: A. thaliana
  misc_feature: MA Experiment 20000185 PARAMETER Experiment Name: At_Roots__P Parameter: Tissue Value: Roots vs. Whole Plant
  misc_feature: MA Experiment ID: 20000213 Result: Down-regulated in Transcription
  misc_feature: MA Experiment 20000213 PARAMETER Experiment Name: At_4deg_Cold_P Parameter: Timepoint (hr) Value: 2
  misc_feature: MA Experiment ID: 20000227 Result: Down-regulated in Transcription
  misc_feature: MA Experiment 20000227 PARAMETER Experiment Name: At_Root-Tips-vs-Tops_P Parameter: Tissue Value: Root Tips vs. Root Tops
  misc_feature: MA Experiment ID: 20000234 Result: Down-regulated in Transcription
  misc_feature: MA Experiment 20000234 PARAMETER Experiment Name: At_Siliques_P Parameter: Age (day) Value: 21
  misc_feature: MA Experiment 20000234 PARAMETER Experiment Name: At_Siliques_P Parameter: Organism Value: A. thaliana
  misc_feature: MA Experiment 20000234 PARAMETER Experiment Name: At_Siliques_P Parameter: Plant Line Value: WS
  misc_feature: MA Experiment 20000234 PARAMETER Experiment Name: At_Siliques_P Parameter: Tissue Value: Less Than 5mm Siliques vs. Whole Plant
  misc_feature: MA Experiment ID: 20000235 Result: Down-regulated in Transcription
  misc_feature: MA Experiment 20000235 PARAMETER Experiment Name: At_Siliques_P Parameter: Age (day) Value: 21
  misc_feature: MA Experiment 20000235 PARAMETER Experiment Name: At_Siliques_P Parameter: Organism Value: A. thaliana
  misc_feature: MA Experiment 20000235 PARAMETER Experiment Name: At_Siliques_P Parameter: Plant Line Value: WS
  misc_feature: MA Experiment 20000235 PARAMETER Experiment Name: At_Siliques_P Parameter: Tissue Value: 5-10mm Siliques vs. Whole Plant
  misc_feature: MA Experiment ID: 20000439 Result: Up-regulated in Transcription
  misc_feature: MA Experiment 20000439 PARAMETER Experiment Name: At_Roots__P Parameter: Age (day) Value: 14 vs. 21
  misc_feature: MA Experiment 20000439 PARAMETER Experiment Name: At_Roots__P Parameter: Organism Value: A. thaliana
  misc_feature: MA Experiment 20000439 PARAMETER Experiment Name: At_Roots__P Parameter: Tissue Value: Roots vs. Whole Plant
  misc_feature: MA Experiment ID: 20000451 Result: Down-regulated in Transcription
  misc_feature: MA Experiment 20000451 PARAMETER Experiment Name: At_CS6879_Shoots-Roots_P Parameter: Age (day) Value: 14
  misc_feature: MA Experiment 20000451 PARAMETER Experiment Name: At_CS6879_Shoots-Roots_P Parameter: Organism Value: A. thaliana
  misc_feature: MA Experiment 20000451 PARAMETER Experiment Name: At_CS6879_Shoots-Roots_P Parameter: Plant Line Value: CS6879 vs. WS
  misc_feature: MA Experiment 20000451 PARAMETER Experiment Name: At_CS6879_Shoots-Roots_P Parameter: Tissue Value: Roots
  misc_feature: MA Experiment ID: 20001248 Result: Up-regulated in Transcription
  misc_feature: MA Experiment 20001248 PARAMETER Experiment Name: At_Far-red-induction_P Parameter: Age (day) Value: 7
  misc_feature: MA Experiment 20001248 PARAMETER Experiment Name: At_Far-red-induction_P Parameter: Light Value: Far-red vs. White
  misc_feature: MA Experiment 20001248 PARAMETER Experiment Name: At_Far-red-induction_P Parameter: Organism Value: A. thaliana
  misc_feature: MA Experiment 20001248 PARAMETER Experiment Name: At_Far-red-induction_P Parameter: Plant Line Value: Columbia
  misc_feature: MA Experiment 20001248 PARAMETER Experiment Name: At_Far-red-induction_P Parameter: Timepoint (hr) Value: 4
  misc_feature: MA Experiment 20001248 PARAMETER Experiment Name: At_Far-red-induction_P Parameter: Tissue Value: Whole Plant
  misc_feature: MA Experiment ID: 20001556 Result: Down-regulated in Transcription
  misc_feature: MA Experiment 20001556 PARAMETER Experiment Name: At_Drought_Soil_Dry_P Parameter: Age (day) Value: 26
  misc_feature: MA Experiment 20001556 PARAMETER Experiment Name: At_Drought_Soil_Dry_P Parameter: Organism Value: A. thaliana
  misc_feature: MA Experiment 20001556 PARAMETER Experiment Name: At_Drought_Soil_Dry_P Parameter: Plant Line Value: WS
  misc_feature: MA Experiment 20001556 PARAMETER Experiment Name: At_Drought_Soil_Dry_P Parameter: Post Timepoint (hr) Value: None
  misc_feature: MA Experiment 20001556 PARAMETER Experiment Name: At_Drought_Soil_Dry_P Parameter: Post-Treatment Value: None
  misc_feature: MA Experiment 20001556 PARAMETER Experiment Name: At_Drought_Soil_Dry_P Parameter: Timepoint (day) Value: 12
  misc_feature: MA Experiment 20001556 PARAMETER Experiment Name: At_Drought_Soil_Dry_P Parameter: Treatment Value: Drought vs. No Drought
  misc_feature: MA Experiment ID: 20001557 Result: Down-regulated in Transcription
  misc_feature: MA Experiment 20001557 PARAMETER Experiment Name: At_Drought_Soil_Dry_P Parameter: Age (day) Value: 27
  misc_feature: MA Experiment 20001557 PARAMETER Experiment Name: At_Drought_Soil_Dry_P Parameter: Organism Value: A. thaliana
  misc_feature: MA Experiment 20001557 PARAMETER Experiment Name: At_Drought_Soil_Dry_P Parameter: Plant Line Value: WS
  misc_feature: MA Experiment 20001557 PARAMETER Experiment Name: At_Drought_Soil_Dry_P Parameter: Post Timepoint (hr) Value: 3
  misc_feature: MA Experiment 20001557 PARAMETER Experiment Name: At_Drought_Soil_Dry_P Parameter: Post-Treatment Value: Re-Water vs. No Drought
  misc_feature: MA Experiment 20001557 PARAMETER Experiment Name: At_Drought_Soil_Dry_P Parameter: Timepoint (day) Value: 13
  misc_feature: MA Experiment 20001557 PARAMETER Experiment Name: At_Drought_Soil_Dry_P Parameter: Treatment Value: Drought vs. No Drought
  misc_feature: MA Experiment ID: 20001558 Result: Down-regulated in Transcription
  misc_feature: MA Experiment 20001558 PARAMETER Experiment Name: At_Drought_Soil_Dry_P Parameter: Age (day) Value: 27
  misc_feature: MA Experiment 20001558 PARAMETER Experiment Name: At_Drought_Soil_Dry_P Parameter: Organism Value: A. thaliana
  misc_feature: MA Experiment 20001558 PARAMETER Experiment Name: At_Drought_Soil_Dry_P Parameter: Plant Line Value: WS
  misc_feature: MA Experiment 20001558 PARAMETER Experiment Name: At_Drought_Soil_Dry_P Parameter: Post Timepoint (hr) Value: 6
  misc_feature: MA Experiment 20001558 PARAMETER Experiment Name: At_Drought_Soil_Dry_P Parameter: Post-Treatment Value: Re-Water vs. No Drought
  misc_feature: MA Experiment 20001558 PARAMETER Experiment Name: At_Drought_Soil_Dry_P Parameter: Timepoint (day) Value: 13
  misc_feature: MA Experiment 20001558 PARAMETER Experiment Name: At_Drought_Soil_Dry_P Parameter: Treatment Value: Drought vs. No Drought
  misc_feature: MA Experiment ID: 20001559 Result: Down-regulated in Transcription
  misc_feature: MA Experiment 20001559 PARAMETER Experiment Name: At_Drought_Soil_Dry_P Parameter: Age (day) Value: 28
  misc_feature: MA Experiment 20001559 PARAMETER Experiment Name: At_Drought_Soil_Dry_P Parameter: Organism Value: A. thaliana
  misc_feature: MA Experiment 20001559 PARAMETER Experiment Name: At_Drought_Soil_Dry_P Parameter: Plant Line Value: WS
  misc_feature: MA Experiment 20001559 PARAMETER Experiment Name: At_Drought_Soil_Dry_P Parameter: Post Timepoint (hr) Value: 29
  misc_feature: MA Experiment 20001559 PARAMETER Experiment Name: At_Drought_Soil_Dry_P Parameter: Post-Treatment Value: Re-Water vs. No Drought
  misc_feature: MA Experiment 20001559 PARAMETER Experiment Name: At_Drought_Soil_Dry_P Parameter: Timepoint (day) Value: 14
  misc_feature: MA Experiment 20001559 PARAMETER Experiment Name: At_Drought_Soil_Dry_P Parameter: Treatment Value: Drought vs. No Drought
  misc_feature: MA Experiment ID: 20001560 Result: Down-regulated in Transcription
  misc_feature: MA Experiment 20001560 PARAMETER Experiment Name: At_Drought_Soil_Dry_P Parameter: Age (day) Value: 28
  misc_feature: MA Experiment 20001560 PARAMETER Experiment Name: At_Drought_Soil_Dry_P Parameter: Organism Value: A. thaliana
  misc_feature: MA Experiment 20001560 PARAMETER Experiment Name: At_Drought_Soil_Dry_P Parameter: Plant Line Value: WS
  misc_feature: MA Experiment 20001560 PARAMETER Experiment Name: At_Drought_Soil_Dry_P Parameter: Post Timepoint (hr) Value: None
  misc_feature: MA Experiment 20001560 PARAMETER Experiment Name: At_Drought_Soil_Dry_P Parameter: Post-Treatment Value: None
  misc_feature: MA Experiment 20001560 PARAMETER Experiment Name: At_Drought_Soil_Dry_P Parameter: Timepoint (day) Value: 14
  misc_feature: MA Experiment 20001560 PARAMETER Experiment Name: At_Drought_Soil_Dry_P Parameter: Treatment Value: Drought vs. No Drought
  misc_feature: MA Experiment ID: 20001757 Result: Up-regulated in Transcription
  misc_feature: MA Experiment 20001757 PARAMETER Experiment Name: At_50mM_NH4NO3_L-to-H_P Parameter: Timepoint (hr) Value: 6
  misc_feature: MA Experiment 20001757 PARAMETER Experiment Name: At_50mM_NH4NO3_L-to-H_P Parameter: Tissue Value: Leaf
  misc_feature: MA Experiment 20001757 PARAMETER Experiment Name: At_50mM_NH4NO3_L-to-H_P Parameter: Treatment Value: 50mM NH4NO3 vs 100mM Mannitol
attcatttcaatcaatcttcttcttcttcttcttcttcttcctcagagaaattctgtgttgttgtatacagagagatgttctcatcttctacactcgtttattctctatctctcttcctctctctttctcttctcttcttcctcttcatcctctcaccacacatccttctctcttcctctaccctcatttccaccgccgatgacctagacgacctctctctcttccaccgcgccgtcgtctcttcctccaccaacaacaaccgtcgtctcatctccctctctccaaatccacccccaaagatcgctttcctcttcctaacaaactccgatctaaccttcttacctctctgggaaagcttcttccaaggtcaccaagatctctacaacgtttacatccacgcagatccaacctcctccgtctctcctcttctcgattcttcatcaatcaacgctaagttcatcccggcgagaagaaccgcacgagcttctccgacgttaatctccgccgaacgacgattactagcaaacgcaatcctcgacgatcctaacaatctctatttcgctttaatctcacaacactgtatccctctccattccttctcttacatccacaaccacctcttctccgatcatcatcaacaaagcttcatcgagatcctctccgatgaaccgttccttctgaaacgatacaacgcaagaggagacgacgcgatgcttcctgagatccagtaccaagacttccgtgttggatctcagttcttcgtattagcgaaacgtcatgctctaatggtgatcaaagagagaaagctatggaggaaattcaaattaccatgccttgatgttgaatcttgttaccctgaagaacattattttccgactttgttgtctcttgaggatcctcaaggatgtagtcactttacactcacacgtgttaattggaccggtagtgttggtggtcatcctcacacgtacgatgcctctgagatctcgccgcagctgattcactctctgcggagatctaattcgagtttagactatttcttcgccagaaaattcacgccggagtcattgcaaccgcttatggagattgcagatgctgtgatctttagggattgaattcggtgaaagtaaattaggtttcagatatcatcataaggaaggtttaggaagaagcttgtgttggcgctcgaagaagagtggctaaataaagatgaacttctgtgtgtgtgtgtgaaaattgctgtgttttttaagcttttgtgtgtctctagggaaggtagagatatgggaaaatggatgtaaaaaagaatgtaaatagagagcccccaaaggcaaagtgagagcatcatcattaagataaagccaaatcggcttttcttttgtaattcagctcctttccacgggagagagagggaatggcaaaagtgttgttccctctcttttgtttcgaaaaaagtgtgaatgaaaagatctttgtt

SEQ ID NO: 47064 - protein, 371 aa, Arabidopsis thaliana
  peptide (1)..(371): Ceres Seq. ID no. 13578742
  misc_feature (137)..(254): Pfam Name: Arabidopsis protein of unknown function, DUF266 Pfam Description: Arabidopsis protein of unknown function, DUF266
  misc_feature (32)..(368): Homolog of NCBI NO: 21554566 NR Description: unknown [Arabidopsis thaliana]
  misc_feature (32)..(368): Homolog of NCBI NO: 18402952 NR Description: expressed protein [Arabidopsis thaliana]
  misc_feature (99)..(361): Homolog of NCBI NO: 26452247 NR Description: unknown protein [Arabidopsis thaliana]
  misc_feature (36)..(371): Homolog of NCBI NO: 15239393 NR Description: hypothetical protein [Arabidopsis thaliana]
  misc_feature (346)..(371): Homolog of NCBI NO: 15236739 NR Description: expressed protein [Arabidopsis thaliana]
  misc_feature (89)..(340): Homolog of NCBI NO: 15236739 NR Description: expressed protein [Arabidopsis thaliana]
  misc_feature (28)..(371): Homolog of NCBI NO: 34394888 NR Description: unknown protein [Oryza sativa (japonica
  misc_feature (214)..(371): Homolog of NCBI NO: 30688302 NR Description: expressed protein [Arabidopsis thaliana]
  misc_feature (26)..(208): Homolog of NCBI NO: 30688302 NR Description: expressed protein [Arabidopsis thaliana]
  misc_feature (26)..(371): Homolog of NCBI NO: 15231121 NR Description: expressed protein [Arabidopsis thaliana]
IHFNQSSSSSSSSSSEKFCVVVYREMFSSSTLVYSLSLFLSLSLLFFLFILSPHILLSSSTLISTADDLDDLSLFHRAVVSSSTNNNRRLISLSPNPPPKIAFLFLTNSDLTFLPLWESFFQGHQDLYNVYIHADPTSSVSPLLDSSSINAKFIPARRTARASPTLISAERRLLANAILDDPNNLYFALISQHCIPLHSFSYIHNHLFSDHHQQSFIEILSDEPFLLKRYNARGDDAMLPEIQYQDFRVGSQFFVLAKRHALMVIKERKLWRKFKLPCLDVESCYPEEHYFPTLLSLEDPQGCSHFTLTRVNWTGSVGGHPHTYDASEISPQLIHSLRRSNSSLDYFFARKFTPESLQPLMEIADAVIFRD

SEQ ID NO: 47065 - protein, 346 aa, Arabidopsis thaliana
  peptide (1)..(346): Ceres Seq. ID no. 13578743
  misc_feature (112)..(229): Pfam Name: Arabidopsis protein of unknown function, DUF266 Pfam Description: Arabidopsis protein of unknown function, DUF266
  misc_feature (7)..(343): Homolog of NCBI NO: 21554566 NR Description: unknown [Arabidopsis thaliana]
  misc_feature (7)..(343): Homolog of NCBI NO: 18402952 NR Description: expressed protein [Arabidopsis thaliana]
  misc_feature (74)..(336): Homolog of NCBI NO: 26452247 NR Description: unknown protein [Arabidopsis thaliana]
  misc_feature (11)..(346): Homolog of NCBI NO: 15239393 NR Description: hypothetical protein [Arabidopsis thaliana]
  misc_feature (321)..(346): Homolog of NCBI NO: 15236739 NR Description: expressed protein [Arabidopsis thaliana]
  misc_feature (64)..(315): Homolog of NCBI NO: 15236739 NR Description: expressed protein [Arabidopsis thaliana]
  misc_feature (3)..(346): Homolog of NCBI NO: 34394888 NR Description: unknown protein [Oryza sativa (japonica
  misc_feature (189)..(346): Homolog of NCBI NO: 30688302 NR Description: expressed protein [Arabidopsis thaliana]
  misc_feature (1)..(183): Homolog of NCBI NO: 30688302 NR Description: expressed protein [Arabidopsis thaliana]
  misc_feature (1)..(346): Homolog of NCBI NO: 15231121 NR Description: expressed protein [Arabidopsis thaliana]
MFSSSTLVYSLSLFLSLSLLFFLFILSPHILLSSSTLISTADDLDDLSLFHRAVVSSSTNNNRRLISLSPNPPPKIAFLFLTNSDLTFLPLWESFFQGHQDLYNVYIHADPTSSVSPLLDSSSINAKFIPARRTARASPTLISAERRLLANAILDDPNNLYFALISQHCIPLHSFSYIHNHLFSDHHQQSFIEILSDEPFLLKRYNARGDDAMLPEIQYQDFRVGSQFFVLAKRHALMVIKERKLWRKFKLPCLDVESCYPEEHYFPTLLSLEDPQGCSHFTLTRVNWTGSVGGHPHTYDASEISPQLIHSLRRSNSSLDYFFARKFTPESLQPLMEIADAVIFRD

SEQ ID NO: 47066 - DNA, 2205 bp, Arabidopsis thaliana
  misc_feature (1)..(2205): Ceres Seq. ID no. 15168634
  misc_feature: MA Experiment ID: 20001248 Result: Up-regulated in Transcription
  misc_feature: MA Experiment 20001248 PARAMETER Experiment Name: At_Far-red-induction_P Parameter: Age (day) Value: 7
  misc_feature: MA Experiment 20001248 PARAMETER Experiment Name: At_Far-red-induction_P Parameter: Light Value: Far-red vs. White
  misc_feature: MA Experiment 20001248 PARAMETER Experiment Name: At_Far-red-induction_P Parameter: Organism Value: A. thaliana
  misc_feature: MA Experiment 20001248 PARAMETER Experiment Name: At_Far-red-induction_P Parameter: Plant Line Value: Columbia
  misc_feature: MA Experiment 20001248 PARAMETER Experiment Name: At_Far-red-induction_P Parameter: Timepoint (hr) Value: 4
  misc_feature: MA Experiment 20001248 PARAMETER Experiment Name: At_Far-red-induction_P Parameter: Tissue Value: Whole Plant
ggttatcgaaccaatggagaccccactccctcctttatcgcaactaaccccaaatcctactcccgccgccgccgtctcttccgctattccggcgccagtcaagagcgtagccgttcagcaaccgatcgatggatctccacgcgccgttgctactgataccggaggtattcctgagccacttgcggctgttcccggcgctaagcttcgtcttatgtgcagttttggtggccacatcatgcctcgtccacacgacaaatcgttgacgtactccggcggcgagactcgtattgtggttgttgatcgacgtgcgtcactgtcttcgctccgatctcgtctctctagtatgcttctcaacggccggtcctttactctcaagtaccagctccctagcgaagatctcgattcactcgtcaccatcactaccgatgaagatctggagaacatgatcgaggaatacgatcgcgcggcttcgtcagcgacggcgactgctacgcaacggctccggttgttccttttcgctaacaagctcgagaccgccgctactatgggaactctgcttgacggcacgaaatctgacacatggttcgtcgatgctctgaatcaatctggtttgcttcctcgtggtttatcagattccgccgccgtgaataataccttggtgaatctcgacgaagctagcggcggagagaccgagatccaaaaccttgaaactaatgttggtggcgagaacaataagcgaggggatttggttgctaacggtgtgatttcgcatcaggagatgcatatgagctcgatgcctgattctccaatgatggaagccgctggttcttcgataggatcttcttcttcatctccttccacatccaatttgccaccgattcgcgttagagtcagtgaggaccagaggatagaggaacaattggcacagatgaccttctcaaacatgcaaactcagaggcaatttgatgatggcgttagcttgatggcaaatcggccaatgatgattccacctggtgccatgaacgatactgcgatggcgtataacaacgcacctggtgatggtactgctcccgcaagcaatggccatgtctcacctgaagacgatcgaaccgaattaggtgtatcaactggctacaggaagccacctttgccgatgcaaccagtaacgatcccacctagaactgttggaggctatggcttgacatcccctgattctgttgcaagtgatactagcatttcttctgctacttcattttcaaagccgatgtactaccaagaccaacctccagctctgccaagagctcctccagtggcacagcctgaaaccacctcggcccaaagctctcaagtcttacctcagactgaaaacacttcagcccaaaccacctcccatgtcttatctcagccaggtacgtacacaactatggatcaacaacaacaccaacctctggctcaacaacctttcttacaccaaggcgttcagtatatccctcacccatcacaatacataccaatttactctcatcagcaacaaaactaccctgtttacgtgatgtccgtcccacaatctcagcagtatatcccagcaggaactcccccgctctacccgaactcaaaacccggcacaaactcgagacctgaagctgcccagaacgtttaccgagctgctccccctcaggttattcagcttcagcaacagcatcagtacatgggttacgctggagctcctcaacatagcacaaacgcaaacgccaattacggtactggagctcctcaacatagcacaaacgcaaacgccaactacggtggaccctttgaatacacaaactctccaaacgagacagtgtattaccacacaaagctcctgctgcaaacactgccattccattagcgtctccataccaaagcatgacaccagcagcagccgcagcagctctagccgatatgtccaagcaaatggctcttgacggcggcaaacagcaacagcatatggctgcgtctcagccgctttaaacgctggatctttggtaataaatgcgcaaagtgttaagtatagccgacacggcgcgctctgttctttttgcgtattacatgtaacgtcctgttacatctcgttagatatacataggatttgctatctcgttgttcttatcgtagtttgcttatgtctctctctcttttctgataaataaatatgttttggat

SEQ ID NO: 47067 - protein, 629 aa, Arabidopsis thaliana
  peptide (1)..(629): Ceres Seq. ID no. 15168635
  misc_feature (82)..(174): Pfam Name: PB1 domain Pfam Description: PB1 domain
  misc_feature (67)..(229): Homolog of NCBI NO: 15237703 NR Description: octicosapeptide/Phox/Bem1p (PB1)
  misc_feature (67)..(217): Homolog of NCBI NO: 15242462 NR Description: octicosapeptide/Phox/Bem1p (PB1)
  misc_feature (66)..(292): Homolog of NCBI NO: 15219417 NR Description: protein kinase family [Arabidopsis thaliana]
  misc_feature (58)..(191): Homolog of NCBI NO: 15222547 NR Description: octicosapeptide/Phox/Bem1p (PB1)
  misc_feature (67)..(292): Homolog of NCBI NO: 18412822 NR Description: octicosapeptide/Phox/Bem1p (PB1)
  misc_feature (67)..(292): Homolog of NCBI NO: 25407315 NR Description: hypothetical protein AT4g05150 [imported] -
  misc_feature (71)..(219): Homolog of NCBI NO: 25410886 NR Description: hypothetical protein At2g01190 [imported] -
  misc_feature (21)..(525): Homolog of NCBI NO: 34895646 NR Description: P0480E02.2 [Oryza sativa (japonica
  misc_feature (5)..(514): Homolog of NCBI NO: 21553908 NR Description: unknown [Arabidopsis thaliana]
  misc_feature (5)..(530): Homolog of NCBI NO: 18379168 NR Description: octicosapeptide/Phox/Bem1p (PB1)
VIEPMETPLPPLSQLTPNPTPAAAVSSAIPAPVKSVAVQQPIDGSPRAVATDTGGIPEPLAAVPGAKLRLMCSFGGHIMPRPHDKSLTYSGGETRIVVVDRRASLSSLRSRLSSMLLNGRSFTLKYQLPSEDLDSLVTITTDEDLENMIEEYDRAASSATATATQRLRLFLFANKLETAATMGTLLDGTKSDTWFVDALNQSGLLPRGLSDSAAVNNTLVNLDEASGGETEIQNLETNVGGENNKRGDLVANGVISHQEMHMSSMPDSPMMEAAGSSIGSSSSSPSTSNLPPIRVRVSEDQRIEEQLAQMTFSNMQTQRQFDDGVSLMANRPMMIPPGAMNDTAMAYNNAPGDGTAPASNGHVSPEDDRTELGVSTGYRKPPLPMQPVTIPPRTVGGYGLTSPDSVASDTSISSATSFSKPMYYQDQPPALPRAPPVAQPETTSAQSSQVLPQTENTSAQTTSHVLSQPGTYTTMDQQQHQPLAQQPFLHQGVQYIPHPSQYIPIYSHQQQNYPVYVMSVPQSQQYIPAGTPPLYPNSKPGTNSRPEAAQNVYRAAPPQVIQLQQQHQYMGYAGAPQHSTNANANYGTGAPQHSTNANANYGGPFEYTNSPNETVYYHTKLLLQTLPFH

SEQ ID NO: 47068 - protein, 625 aa, Arabidopsis thaliana
  peptide (1)..(625): Ceres Seq. ID no. 15168636
  misc_feature (78)..(170): Pfam Name: PB1 domain Pfam Description: PB1 domain
  misc_feature (63)..(225): Homolog of NCBI NO: 15237703 NR Description: octicosapeptide/Phox/Bem1p (PB1)
  misc_feature (63)..(213): Homolog of NCBI NO: 15242462 NR Description: octicosapeptide/Phox/Bem1p (PB1)
  misc_feature (62)..(288): Homolog of NCBI NO: 15219417 NR Description: protein kinase family [Arabidopsis thaliana]
  misc_feature (54)..(187): Homolog of NCBI NO: 15222547 NR Description: octicosapeptide/Phox/Bem1p (PB1)
  misc_feature (63)..(288): Homolog of NCBI NO: 18412822 NR Description: octicosapeptide/Phox/Bem1p (PB1)
  misc_feature (63)..(288): Homolog of NCBI NO: 25407315 NR Description: hypothetical protein AT4g05150 [imported] -
  misc_feature (67)..(215): Homolog of NCBI NO: 25410886 NR Description: hypothetical protein At2g01190 [imported] -
  misc_feature (17)..(521): Homolog of NCBI NO: 34895646 NR Description: P0480E02.2 [Oryza sativa (japonica
  misc_feature (1)..(510): Homolog of NCBI NO: 21553908 NR Description: unknown [Arabidopsis thaliana]
  misc_feature (1)..(526): Homolog of NCBI NO: 18379168 NR Description: octicosapeptide/Phox/Bem1p (PB1)
METPLPPLSQLTPNPTPAAAVSSAIPAPVKSVAVQQPIDGSPRAVATDTGGIPEPLAAVPGAKLRLMCSFGGHIMPRPHDKSLTYSGGETRIVVVDRRASLSSLRSRLSSMLLNGRSFTLKYQLPSEDLDSLVTITTDEDLENMIEEYDRAASSATATATQRLRLFLFANKLETAATMGTLLDGTKSDTWFVDALNQSGLLPRGLSDSAAVNNTLVNLDEASGGETEIQNLETNVGGENNKRGDLVANGVISHQEMHMSSMPDSPMMEAAGSSIGSSSSSPSTSNLPPIRVRVSEDQRIEEQLAQMTFSNMQTQRQFDDGVSLMANRPMMIPPGAMNDTAMAYNNAPGDGTAPASNGHVSPEDDRTELGVSTGYRKPPLPMQPVTIPPRTVGGYGLTSPDSVASDTSISSATSFSKPMYYQDQPPALPRAPPVAQPETTSAQSSQVLPQTENTSAQTTSHVLSQPGTYTTMDQQQHQPLAQQPFLHQGVQYIPHPSQYIPIYSHQQQNYPVYVMSVPQSQQYIPAGTPPLYPNSKPGTNSRPEAAQNVYRAAPPQVIQLQQQHQYMGYAGAPQHSTNANANYGTGAPQHSTNANANYGGPFEYTNSPNETVYYHTKLLLQTLPFH

SEQ ID NO: 47069 - protein, 559 aa, Arabidopsis thaliana
  peptide (1)..(559): Ceres Seq. ID no. 15168637
  misc_feature (12)..(104): Pfam Name: PB1 domain Pfam Description: PB1 domain
  misc_feature (1)..(159): Homolog of NCBI NO: 15237703 NR Description: octicosapeptide/Phox/Bem1p (PB1)
  misc_feature (1)..(147): Homolog of NCBI NO: 15242462 NR Description: octicosapeptide/Phox/Bem1p (PB1)
  misc_feature (1)..(222): Homolog of NCBI NO: 15219417 NR Description: protein kinase family [Arabidopsis thaliana]
  misc_feature (1)..(121): Homolog of NCBI NO: 15222547 NR Description: octicosapeptide/Phox/Bem1p (PB1)
  misc_feature (1)..(222): Homolog of NCBI NO: 18412822 NR Description: octicosapeptide/Phox/Bem1p (PB1)
  misc_feature (1)..(222): Homolog of NCBI NO: 25407315 NR Description: hypothetical protein AT4g05150 [imported] -
  misc_feature (1)..(149): Homolog of NCBI NO: 25410886 NR Description: hypothetical protein At2g01190 [imported] -
  misc_feature (1)..(455): Homolog of NCBI NO: 34895646 NR Description: P0480E02.2 [Oryza sativa (japonica
  misc_feature (1)..(444): Homolog of NCBI NO: 21553908 NR Description: unknown [Arabidopsis thaliana]
  misc_feature (1)..(460): Homolog of NCBI NO: 18379168 NR Description: octicosapeptide/Phox/Bem1p (PB1)
MCSFGGHIMPRPHDKSLTYSGGETRIVVVDRRASLSSLRSRLSSMLLNGRSFTLKYQLPSEDLDSLVTITTDEDLENMIEEYDRAASSATATATQRLRLFLFANKLETAATMGTLLDGTKSDTWFVDALNQSGLLPRGLSDSAAVNNTLVNLDEASGGETEIQNLETNVGGENNKRGDLVANGVISHQEMHMSSMPDSPMMEAAGSSIGSSSSSPSTSNLPPIRVRVSEDQRIEEQLAQMTFSNMQTQRQFDDGVSLMANRPMMIPPGAMNDTAMAYNNAPGDGTAPASNGHVSPEDDRTELGVSTGYRKPPLPMQPVTIPPRTVGGYGLTSPDSVASDTSISSATSFSKPMYYQDQPPALPRAPPVAQPETTSAQSSQVLPQTENTSAQTTSHVLSQPGTYTTMDQQQHQPLAQQPFLHQGVQYIPHPSQYIPIYSHQQQNYPVYVMSVPQSQQYIPAGTPPLYPNSKPGTNSRPEAAQNVYRAAPPQVIQLQQQHQYMGYAGAPQHSTNANANYGTGAPQHSTNANANYGGPFEYTNSPNETVYYHTKLLLQTLPFH

SEQ ID NO: 47070 - DNA, 1959 bp, Arabidopsis thaliana
  misc_feature (1)..(1959): Ceres Seq. ID no. 13579047
  misc_feature: MA Experiment ID: 20000171 Result: Down-regulated in Transcription
  misc_feature: MA Experiment 20000171 PARAMETER Experiment Name: At_42deg_Heat_P Parameter: Age (day) Value: 14
  misc_feature: MA Experiment 20000171 PARAMETER Experiment Name: At_42deg_Heat_P Parameter: Organism Value: A. thaliana
  misc_feature: MA Experiment 20000171 PARAMETER Experiment Name: At_42deg_Heat_P Parameter: Plant Line Value: WS
  misc_feature: MA Experiment 20000171 PARAMETER Experiment Name: At_42deg_Heat_P Parameter: Temperature (deg C) Value: 42 vs. 22
  misc_feature: MA Experiment 20000171 PARAMETER Experiment Name: At_42deg_Heat_P Parameter: Timepoint (hr) Value: 1
  misc_feature: MA Experiment 20000171 PARAMETER Experiment Name: At_42deg_Heat_P Parameter: Tissue Value: Aerial
  misc_feature: MA Experiment ID: 20000173 Result: Down-regulated in Transcription
  misc_feature: MA Experiment 20000173 PARAMETER Experiment Name: At_42deg_Heat_P Parameter: Age (day) Value: 14
  misc_feature: MA Experiment 20000173 PARAMETER Experiment Name: At_42deg_Heat_P Parameter: Organism Value: A. thaliana
  misc_feature: MA Experiment 20000173 PARAMETER Experiment Name: At_42deg_Heat_P Parameter: Plant Line Value: WS
  misc_feature: MA Experiment 20000173 PARAMETER Experiment Name: At_42deg_Heat_P Parameter: Temperature (deg C) Value: 42 vs. 22
  misc_feature: MA Experiment 20000173 PARAMETER Experiment Name: At_42deg_Heat_P Parameter: Timepoint (hr) Value: 6
  misc_feature: MA Experiment 20000173 PARAMETER Experiment Name: At_42deg_Heat_P Parameter: Tissue Value: Aerial
  misc_feature: MA Experiment ID: 20000184 Result: Down-regulated in Transcription
  misc_feature: MA Experiment 20000184 PARAMETER Experiment Name: At_Shoots__P Parameter: Age (day) Value: 7
  misc_feature: MA Experiment 20000184 PARAMETER Experiment Name: At_Shoots__P Parameter: Tissue Value: Shoots vs. Whole Plant
  misc_feature: MA Experiment ID: 20000495 Result: Up-regulated in Transcription
  misc_feature: MA Experiment 20000495 PARAMETER Experiment Name: At_Guard_Cells_P Parameter: Harvest Date Value: 8/2/2002
  misc_feature: MA Experiment 20000495 PARAMETER Experiment Name: At_Guard_Cells_P Parameter: Organism Value: A. thaliana
  misc_feature: MA Experiment 20000495 PARAMETER Experiment Name: At_Guard_Cells_P Parameter: Tissue Value: Guard Cells vs. Leaves
  misc_feature: MA Experiment ID: 20000794 Result: Up-regulated in Transcription
  misc_feature: MA Experiment 20000794 PARAMETER Experiment Name: At_Petals_P Parameter: Age (day) Value: 23-25 days
  misc_feature: MA Experiment 20000794 PARAMETER Experiment Name: At_Petals_P Parameter: Plant Line Value: WS
  misc_feature: MA Experiment 20000794 PARAMETER Experiment Name: At_Petals_P Parameter: Tissue Value: Petals vs. Whole plant
  misc_feature: MA Experiment ID: 20001451 Result: Up-regulated in Transcription
  misc_feature: MA Experiment 20001451 PARAMETER Experiment Name: At_Far-red-induction_P Parameter: Age (day) Value: 7
  misc_feature: MA Experiment 20001451 PARAMETER Experiment Name: At_Far-red-induction_P Parameter: Light Value: Far-red vs. White
  misc_feature: MA Experiment 20001451 PARAMETER Experiment Name: At_Far-red-induction_P Parameter: Organism Value: A. thaliana
  misc_feature: MA Experiment 20001451 PARAMETER Experiment Name: At_Far-red-induction_P Parameter: Plant Line Value: Columbia
  misc_feature: MA Experiment 20001451 PARAMETER Experiment Name: At_Far-red-induction_P Parameter: Timepoint (hr) Value: 24
  misc_feature: MA Experiment 20001451 PARAMETER Experiment Name: At_Far-red-induction_P Parameter: Tissue Value: Whole Plant
gtgttctgaaaactttttccgatacacaaaatcggaggaagaagaagatgaagctcaaagtgtatgcggataggatgtcacagccatctcgtgctgtcctcatattctgcaaggttaacgaaatccaattcgacgagattttgatttccttggggaaacgtcaacagttatcccctgaattcaaagaaattaacccaatggggaaagttccagctattgttgatggcagacttaagctatttgagagtcacgctatattgatatatctttcctcagcatacgcaagtgtagttgatcattggtacccgaatgatctttccaaaagagccaagattcactccgttttggattggcatcacaccaatttacgccctggtgcatctggatatgttctgaatagcgttctagctccagctcttggtcttccactgaatccgaaagcagctgctgaagctgagaacatactaacaaactctctgtccactctagagactttttggcttaagggcagtgccaagtttttactcgggggcaagcaaccatctatagctgatctcagccttgtatgtgaacttatgcagctgcaggttttggatgacaaagatcgtcttagattgcttagccctcataagaaagttgaacaatggattgagagtacgagaaaagcgacaatgcctcactctgatgaggtccatgaggtccttttcagagccaaagatagatttcagaagcagcgagagatggcaaccgcatctaaaccgggtcctcaatctaagattatccaatttagtagtattggtgggacgagtgatggtccaaacctcgttcaagacacaaccgatcgtaaagctcgaagacgcaaatggagtccacctgacgatgtcattctcattagtgcttggttaaatactagtaaggatcgtaaagttgtcgtttatgatgaacaacaagcacatactttttggaagagaattggtgcacatgtttcaaatagcgcttcacttgcaaatctaccaaagcgagagtggaatcactgcaggcaaagatggaggaaaattaacgactacgtctgcaaatttgttggatgttatgatcaagctttgaatcaaagagctagtggtcaatctgaagatgatgttttccaagttgcataccaattgtactacaacaattacatgagtaatttcaaacttgagcatgcatggcgggagctccgacacaataaaaaatggtgtagtacatacacctctgaaaattctaaggggggtggaagctcaaagagaacaaagttgaatggaggtggtgtatattcttcaagctgtaatccggagagtgtgcctatagctctagatggagaggagcaagttatggatcgccctcttggtgtgaagtcgtcaaagcaaaaagagaagaaagttgctactaaaacaatgcttgaagaaagggaggccgattctagatcaagacttgagaacttgtgggtactagatgaagaggagcaagttatggatcttcctcttggtgtgaagtcatcgaagcagaaagagaggaaagttgctactaaaacaatgattgaagaaagggaggcagccaattttcgatcaagacttgggaacttgtggctactaaaggagaaagaagaaagggaggcagattcccgatcaagacttgagaacttgtgggcactgaaggagaaagacatagaagagcaaaagaaactaacaaggatggaagtccttaaaagtcttcttggaagaagaacaggtgaaacttctgaaaaggaagaaactttgaagaacaagctcattgatgagatgctctaatctctatgttctcgttgtatttatctctttattttctctatgtttatctcactatcaacttagtgacaggctatagacggcttttctagaaatagatactaactgaatcttccttaactatgttcaacgtttgttt

SEQ ID NO: 47071 - protein, 606 aa, Arabidopsis thaliana
  peptide (1)..(606): Ceres Seq. ID no. 13579048
  misc_feature (392)..(587): Homolog of NCBI NO: 10177767 NR Description: gb|AAF19708.1~gene_id:K1O13.2~similar to unknown
  misc_feature (16)..(259): Homolog of NCBI NO: 15237583 NR Description: glutathione transferase, putative [Arabidopsis
  misc_feature (16)..(259): Homolog of NCBI NO: 10177768 NR Description: glutathione transferase [Arabidopsis thaliana]
  misc_feature (16)..(259): Homolog of NCBI NO: 25453559 NR Description: glutathione transferase (EC 2.5.1.18) GST 10b
  misc_feature (16)..(606): Homolog of NCBI NO: 15237595 NR Description: glutathione transferase, putative [Arabidopsis
VLKTFSDTQNRRKKKMKLKVYADRMSQPSRAVLIFCKVNEIQFDEILISLGKRQQLSPEFKEINPMGKVPAIVDGRLKLFESHAILIYLSSAYASVVDHWYPNDLSKRAKIHSVLDWHHTNLRPGASGYVLNSVLAPALGLPLNPKAAAEAENILTNSLSTLETFWLKGSAKFLLGGKQPSIADLSLVCELMQLQVLDDKDRLRLLSPHKKVEQWIESTRKATMPHSDEVHEVLFRAKDRFQKQREMATASKPGPQSKIIQFSSIGGTSDGPNLVQDTTDRKARRRKWSPPDDVILISAWLNTSKDRKVVVYDEQQAHTFWKRIGAHVSNSASLANLPKREWNHCRQRWRKINDYVCKFVGCYDQALNQRASGQSEDDVFQVAYQLYYNNYMSNFKLEHAWRELRHNKKWCSTYTSENSKGGGSSKRTKLNGGGVYSSSCNPESVPIALDGEEQVMDRPLGVKSSKQKEKKVATKTMLEEREADSRSRLENLWVLDEEEQVMDLPLGVKSSKQKERKVATKTMIEEREAANFRSRLGNLWLLKEKEEREADSRSRLENLWALKEKDIEEQKKLTRMEVLKSLLGRRTGETSEKEETLKNKLIDEML

SEQ ID NO: 47072 - protein, 591 aa, Arabidopsis thaliana
  peptide (1)..(591): Ceres Seq. ID no. 13579049
  misc_feature (377)..(572): Homolog of NCBI NO: 10177767 NR Description: gb|AAF19708.1~gene_id:K1O13.2~similar to unknown
  misc_feature (1)..(244): Homolog of NCBI NO: 15237583 NR Description: glutathione transferase, putative [Arabidopsis
  misc_feature (1)..(244): Homolog of NCBI NO: 10177768 NR Description: glutathione transferase [Arabidopsis thaliana]
  misc_feature (1)..(244): Homolog of NCBI NO: 25453559 NR Description: glutathione transferase (EC 2.5.1.18) GST 10b
  misc_feature (1)..(591): Homolog of NCBI NO: 15237595 NR Description: glutathione transferase, putative [Arabidopsis
MKLKVYADRMSQPSRAVLIFCKVNEIQFDEILISLGKRQQLSPEFKEINPMGKVPAIVDGRLKLFESHAILIYLSSAYASVVDHWYPNDLSKRAKIHSVLDWHHTNLRPGASGYVLNSVLAPALGLPLNPKAAAEAENILTNSLSTLETFWLKGSAKFLLGGKQPSIADLSLVCELMQLQVLDDKDRLRLLSPHKKVEQWIESTRKATMPHSDEVHEVLFRAKDRFQKQREMATASKPGPQSKIIQFSSIGGTSDGPNLVQDTTDRKARRRKWSPPDDVILISAWLNTSKDRKVVVYDEQQAHTFWKRIGAHVSNSASLANLPKREWNHCRQRWRKINDYVCKFVGCYDQALNQRASGQSEDDVFQVAYQLYYNNYMSNFKLEHAWRELRHNKKWCSTYTSENSKGGGSSKRTKLNGGGVYSSSCNPESVPIALDGEEQVMDRPLGVKSSKQKEKKVATKTMLEEREADSRSRLENLWVLDEEEQVMDLPLGVKSSKQKERKVATKTMIEEREAANFRSRLGNLWLLKEKEEREADSRSRLENLWALKEKDIEEQKKLTRMEVLKSLLGRRTGETSEKEETLKNKLIDEML

SEQ ID NO: 47073 - protein, 582 aa, Arabidopsis thaliana
  peptide (1)..(582): Ceres Seq. ID no. 13579050
  misc_feature (368)..(563): Homolog of NCBI NO: 10177767 NR Description: gb|AAF19708.1~gene_id:K1O13.2~similar to unknown
  misc_feature (1)..(235): Homolog of NCBI NO: 15237583 NR Description: glutathione transferase, putative [Arabidopsis
  misc_feature (1)..(235): Homolog of NCBI NO: 10177768 NR Description: glutathione transferase [Arabidopsis thaliana]
  misc_feature (1)..(235): Homolog of NCBI NO: 25453559 NR Description: glutathione transferase (EC 2.5.1.18) GST 10b
  misc_feature (1)..(582): Homolog of NCBI NO: 15237595 NR Description: glutathione transferase, putative [Arabidopsis
MSQPSRAVLIFCKVNEIQFDEILISLGKRQQLSPEFKEINPMGKVPAIVDGRLKLFESHAILIYLSSAYASVVDHWYPNDLSKRAKIHSVLDWHHTNLRPGASGYVLNSVLAPALGLPLNPKAAAEAENILTNSLSTLETFWLKGSAKFLLGGKQPSIADLSLVCELMQLQVLDDKDRLRLLSPHKKVEQWIESTRKATMPHSDEVHEVLFRAKDRFQKQREMATASKPGPQSKIIQFSSIGGTSDGPNLVQDTTDRKARRRKWSPPDDVILISAWLNTSKDRKVVVYDEQQAHTFWKRIGAHVSNSASLANLPKREWNHCRQRWRKINDYVCKFVGCYDQALNQRASGQSEDDVFQVAYQLYYNNYMSNFKLEHAWRELRHNKKWCSTYTSENSKGGGSSKRTKLNGGGVYSSSCNPESVPIALDGEEQVMDRPLGVKSSKQKEKKVATKTMLEEREADSRSRLENLWVLDEEEQVMDLPLGVKSSKQKERKVATKTMIEEREAANFRSRLGNLWLLKEKEEREADSRSRLENLWALKEKDIEEQKKLTRMEVLKSLLGRRTGETSEKEETLKNKLIDEML

SEQ ID NO: 47074 - DNA, 1969 bp, Arabidopsis thaliana; identical to SEQ ID NO: 44264
  misc_feature (1)..(1969): Ceres Seq. ID no. 12603622
  misc_feature: MA Experiment ID: 20000179 Result: Up-regulated in Transcription
  misc_feature: MA Experiment 20000179 PARAMETER Experiment Name: At_Germinating_Seeds_P Parameter: Age (hr) Value: 6 vs. 0
  misc_feature: MA Experiment 20000179 PARAMETER Experiment Name: At_Germinating_Seeds_P Parameter: Tissue Value: Germinating Seeds
  misc_feature: MA Experiment ID: 20000180 Result: Up-regulated in Transcription
  misc_feature: MA Experiment 20000180 PARAMETER Experiment Name: At_Germinating_Seeds_P Parameter: Age (hr) Value: 24 vs. 0
  misc_feature: MA Experiment 20000180 PARAMETER Experiment Name: At_Germinating_Seeds_P Parameter: Tissue Value: Germinating Seeds
  misc_feature: MA Experiment ID: 20000437 Result: Down-regulated in Transcription
  misc_feature: MA Experiment 20000437 PARAMETER Experiment Name: At_Drought_P Parameter: Age (day) Value: 8
  misc_feature: MA Experiment 20000437 PARAMETER Experiment Name: At_Drought_P Parameter: Organism Value: A. thaliana
  misc_feature: MA Experiment 20000437 PARAMETER Experiment Name: At_Drought_P Parameter: Plant Line Value: WS
  misc_feature: MA Experiment 20000437 PARAMETER Experiment Name: At_Drought_P Parameter: Timepoint (hr) Value: 24
  misc_feature: MA Experiment 20000437 PARAMETER Experiment Name: At_Drought_P Parameter: Tissue Value: Whole Plant
  misc_feature: MA Experiment 20000437 PARAMETER Experiment Name: At_Drought_P Parameter: Treatment Value: Drought vs. No Drought
  misc_feature: MA Experiment ID: 20000438 Result: Up-regulated in Transcription
  misc_feature: MA Experiment 20000438 PARAMETER Experiment Name: At_Shoots__P Parameter: Age (day) Value: 14
  misc_feature: MA Experiment 20000438 PARAMETER Experiment Name: At_Shoots__P Parameter: Tissue Value: Shoots vs. Whole Plant
  misc_feature: MA Experiment ID: 20000441 Result: Up-regulated in Transcription
  misc_feature: MA Experiment 20000441 PARAMETER Experiment Name: At_1uM_BR-BRZ__P Parameter: Tissue Value: Shoot Apices
  misc_feature: MA Experiment 20000441 PARAMETER Experiment Name: At_1uM_BR-BRZ__P Parameter: Treatment Value: 1uM BR vs. No Treatment
  misc_feature: MA Experiment ID: 20000573 Result: Down-regulated in Transcription
  misc_feature: MA Experiment 20000573 PARAMETER Experiment Name: At_100uM_ABA_Mutants__P Parameter: Organism Value: A. thaliana
  misc_feature: MA Experiment 20000573 PARAMETER Experiment Name: At_100uM_ABA_Mutants__P Parameter: Plant Line Value: CS22 vs. Ler wt
  misc_feature: MA Experiment 20000573 PARAMETER Experiment Name: At_100uM_ABA_Mutants__P Parameter: Timepoint (hr) Value: N/A
  misc_feature: MA Experiment 20000573 PARAMETER Experiment Name: At_100uM_ABA_Mutants__P Parameter: Tissue Value: Whole Plant
  misc_feature: MA Experiment 20000573 PARAMETER Experiment Name: At_100uM_ABA_Mutants__P Parameter: Treatment Value: None
  misc_feature: MA Experiment ID: 20000574 Result: Down-regulated in Transcription
  misc_feature: MA Experiment 20000574 PARAMETER Experiment Name: At_100uM_ABA_Mutants__P Parameter: Organism Value: A. thaliana
  misc_feature: MA Experiment 20000574 PARAMETER Experiment Name: At_100uM_ABA_Mutants__P Parameter: Plant Line Value: CS23 vs. Ler wt
  misc_feature: MA Experiment 20000574 PARAMETER Experiment Name: At_100uM_ABA_Mutants__P Parameter: Timepoint (hr) Value: N/A
  misc_feature: MA Experiment 20000574 PARAMETER Experiment Name: At_100uM_ABA_Mutants__P Parameter: Tissue Value: Whole Plant
  misc_feature: MA Experiment 20000574 PARAMETER Experiment Name: At_100uM_ABA_Mutants__P Parameter: Treatment Value: None
  misc_feature: MA Experiment ID: 20000794 Result: Up-regulated in Transcription
  misc_feature: MA Experiment 20000794 PARAMETER Experiment Name: At_Petals_P Parameter: Age (day) Value: 23-25 days
  misc_feature: MA Experiment 20000794 PARAMETER Experiment Name: At_Petals_P Parameter: Plant Line Value: WS
  misc_feature: MA Experiment 20000794 PARAMETER Experiment Name: At_Petals_P Parameter: Tissue Value: Petals vs. Whole plant
  misc_feature: MA Experiment ID: 20001248 Result: Down-regulated in Transcription
  misc_feature: MA Experiment 20001248 PARAMETER Experiment Name: At_Far-red-induction_P Parameter: Age (day) Value: 7
  misc_feature: MA Experiment 20001248 PARAMETER Experiment Name: At_Far-red-induction_P Parameter: Light Value: Far-red vs. White
  misc_feature: MA Experiment 20001248 PARAMETER Experiment Name: At_Far-red-induction_P Parameter: Organism Value: A. thaliana
  misc_feature: MA Experiment 20001248 PARAMETER Experiment Name: At_Far-red-induction_P Parameter: Plant Line Value: Columbia
  misc_feature: MA Experiment 20001248 PARAMETER Experiment Name: At_Far-red-induction_P Parameter: Timepoint (hr) Value: 4
  misc_feature: MA Experiment 20001248 PARAMETER Experiment Name: At_Far-red-induction_P Parameter: Tissue Value: Whole Plant
  misc_feature: MA Experiment ID: 20001451 Result: Up-regulated in Transcription
  misc_feature: MA Experiment 20001451 PARAMETER Experiment Name: At_Far-red-induction_P Parameter: Age (day) Value: 7
  misc_feature: MA Experiment 20001451 PARAMETER Experiment Name: At_Far-red-induction_P Parameter: Light Value: Far-red vs. White
  misc_feature: MA Experiment 20001451 PARAMETER Experiment Name: At_Far-red-induction_P Parameter: Organism Value: A. thaliana
  misc_feature: MA Experiment 20001451 PARAMETER Experiment Name: At_Far-red-induction_P Parameter: Plant Line Value: Columbia
  misc_feature: MA Experiment 20001451 PARAMETER Experiment Name: At_Far-red-induction_P Parameter: Timepoint (hr) Value: 24
  misc_feature: MA Experiment 20001451 PARAMETER Experiment Name: At_Far-red-induction_P Parameter: Tissue Value: Whole Plant
  misc_feature: MA Experiment ID: 20001555 Result: Down-regulated in Transcription
  misc_feature: MA Experiment 20001555 PARAMETER Experiment Name: At_Drought_Soil_Dry_P Parameter: Age (day) Value: 24
  misc_feature: MA Experiment 20001555 PARAMETER Experiment Name: At_Drought_Soil_Dry_P Parameter: Organism Value: A. thaliana
  misc_feature: MA Experiment 20001555 PARAMETER Experiment Name: At_Drought_Soil_Dry_P Parameter: Plant Line Value: WS
  misc_feature: MA Experiment 20001555 PARAMETER Experiment Name: At_Drought_Soil_Dry_P Parameter: Post Timepoint (hr) Value: None
  misc_feature: MA Experiment 20001555 PARAMETER Experiment Name: At_Drought_Soil_Dry_P Parameter: Post-Treatment Value: None
  misc_feature: MA Experiment 20001555 PARAMETER Experiment Name: At_Drought_Soil_Dry_P Parameter: Timepoint (day) Value: 10
  misc_feature: MA Experiment 20001555 PARAMETER Experiment Name: At_Drought_Soil_Dry_P Parameter: Treatment Value: Drought vs. No Drought
  misc_feature: MA Experiment ID: 20001556 Result: Down-regulated in Transcription
  misc_feature: MA Experiment 20001556 PARAMETER Experiment Name: At_Drought_Soil_Dry_P Parameter: Age (day) Value: 26
  misc_feature: MA Experiment 20001556 PARAMETER Experiment Name: At_Drought_Soil_Dry_P Parameter: Organism Value: A. thaliana
  misc_feature: MA Experiment 20001556 PARAMETER Experiment Name: At_Drought_Soil_Dry_P Parameter: Plant Line Value: WS
  misc_feature: MA Experiment 20001556 PARAMETER Experiment Name: At_Drought_Soil_Dry_P Parameter: Post Timepoint (hr) Value: None
  misc_feature: MA Experiment 20001556 PARAMETER Experiment Name: At_Drought_Soil_Dry_P Parameter: Post-Treatment Value: None
  misc_feature: MA Experiment 20001556 PARAMETER Experiment Name: At_Drought_Soil_Dry_P Parameter: Timepoint (day) Value: 12
  misc_feature: MA Experiment 20001556 PARAMETER Experiment Name: At_Drought_Soil_Dry_P Parameter: Treatment Value: Drought vs. No Drought
  misc_feature: MA Experiment ID: 20001906 Result: Down-regulated in Transcription
  misc_feature: MA Experiment 20001906 PARAMETER Experiment Name: At_Drought_Reproduction_P Parameter: Age (day) Value: 35
  misc_feature: MA Experiment 20001906 PARAMETER Experiment Name: At_Drought_Reproduction_P Parameter: Organism Value: A. thaliana
  misc_feature: MA Experiment 20001906 PARAMETER Experiment Name: At_Drought_Reproduction_P Parameter: Plant Line Value: WS
  misc_feature: MA Experiment 20001906 PARAMETER Experiment Name: At_Drought_Reproduction_P Parameter: Timepoint (day) Value: 5
  misc_feature: MA Experiment 20001906 PARAMETER Experiment Name: At_Drought_Reproduction_P Parameter: Tissue Value: Siliques
  misc_feature: MA Experiment 20001906 PARAMETER Experiment Name: At_Drought_Reproduction_P Parameter: Treatment Value: Drought vs. No Drought
  misc_feature: MA Experiment ID: 20001911 Result: Down-regulated in Transcription
  misc_feature: MA Experiment 20001911 PARAMETER Experiment Name: At_Drought_Reproduction_P Parameter: Age (day) Value: 40
  misc_feature: MA Experiment 20001911 PARAMETER Experiment Name: At_Drought_Reproduction_P Parameter: Organism Value: A. thaliana
  misc_feature: MA Experiment 20001911 PARAMETER Experiment Name: At_Drought_Reproduction_P Parameter: Plant Line Value: WS
  misc_feature: MA Experiment 20001911 PARAMETER Experiment Name: At_Drought_Reproduction_P Parameter: Timepoint (day) Value: 10
  misc_feature: MA Experiment 20001911 PARAMETER Experiment Name: At_Drought_Reproduction_P Parameter: Tissue Value: Flowers
  misc_feature: MA Experiment 20001911 PARAMETER Experiment Name: At_Drought_Reproduction_P Parameter: Treatment Value: Drought vs. No Drought

SEQ ID NO: 47075 - protein, 600 aa, Arabidopsis thaliana; identical to SEQ ID NO: 44265
  peptide (1)..(600): Ceres Seq. ID no. 12603623
  misc_feature (193)..(452): Pfam Name: NPH3 family Pfam Description: NPH3 family
  misc_feature (193)..(452): Pfam Name: NPH3 family Pfam Description: NPH3 family
  misc_feature (190)..(600): Homolog of NCBI NO: 26006487 NR Description: Hypothetical protein [Oryza sativa (japonica
  misc_feature (194)..(241): Homolog of NCBI NO: 22328160 NR Description: similar to non-phototropic hypocotyl-like protein
  misc_feature (21)..(202): Homolog of NCBI NO: 22328160 NR Description: similar to non-phototropic hypocotyl-like protein
  misc_feature (246)..(570): Homolog of NCBI NO: 22328160 NR Description: similar to non-phototropic hypocotyl-like protein
  misc_feature (194)..(237): Homolog of NCBI NO: 15239705 NR Description: non-phototropic hypocotyl-like protein; protein
  misc_feature (190)..(600): Homolog of NCBI NO: 26006487 NR Description: Hypothetical protein [Oryza sativa (japonica
  misc_feature (21)..(202): Homolog of NCBI NO: 22328160 NR Description: similar to non-phototropic hypocotyl-like protein
  misc_feature (194)..(237): Homolog of NCBI NO: 15239705 NR Description: non-phototropic hypocotyl-like protein; protein
  misc_feature (8)..(600): Homolog of NCBI NO: 30684610 NR Description: expressed protein [Arabidopsis thaliana]
  misc_feature (8)..(600): Homolog of NCBI NO: 6959488 NR Description: RPT2 [Arabidopsis thaliana]
  misc_feature (186)..(600): Homolog of NCBI NO: 25408081 NR Description: hypothetical protein At2g30510 [imported] -
  misc_feature (256)..(574): Homolog of NCBI NO: 15239705 NR Description: non-phototropic hypocotyl-like protein; protein
  misc_feature (23)..(184): Homolog of NCBI NO: 15239705 NR Description: non-phototropic hypocotyl-like protein; protein
  misc_feature (246)..(570): Homolog of NCBI NO: 22328160 NR Description: similar to non-phototropic hypocotyl-like protein
  misc_feature (194)..(241): Homolog of NCBI NO: 22328160 NR Description: similar to non-phototropic hypocotyl-like protein
  misc_feature (23)..(184): Homolog of NCBI NO: 15239705 NR Description: non-phototropic hypocotyl-like protein; protein
  misc_feature (256)..(574): Homolog of NCBI NO: 15239705 NR Description: non-phototropic hypocotyl-like protein; protein
  misc_feature (186)..(600): Homolog of NCBI NO: 25408081 NR Description: hypothetical protein At2g30510 [imported] -
  misc_feature (8)..(600): Homolog of NCBI NO: 6959488 NR Description: RPT2 [Arabidopsis thaliana]
  misc_feature (8)..(600): Homolog of NCBI NO: 30684610 NR Description: expressed protein [Arabidopsis thaliana]

SEQ ID NO: 47076 - protein, 593 aa, Arabidopsis thaliana; identical to SEQ ID NO: 44266
  peptide (1)..(593): Ceres Seq. ID no. 12603624
  misc_feature (186)..(445): Pfam Name: NPH3 family Pfam Description: NPH3 family
  misc_feature (186)..(445): Pfam Name: NPH3 family Pfam Description: NPH3 family
  misc_feature (183)..(593): Homolog of NCBI NO: 26006487 NR Description: Hypothetical protein [Oryza sativa (japonica
  misc_feature (187)..(234): Homolog of NCBI NO: 22328160 NR Description: similar to non-phototropic hypocotyl-like protein
  misc_feature (14)..(195): Homolog of NCBI NO: 22328160 NR Description: similar to non-phototropic hypocotyl-like protein
  misc_feature (239)..(563): Homolog of NCBI NO: 22328160 NR Description: similar to non-phototropic hypocotyl-like protein
  misc_feature (187)..(230): Homolog of NCBI NO: 15239705 NR Description: non-phototropic hypocotyl-like protein; protein
  misc_feature (183)..(593): Homolog of NCBI NO: 26006487 NR Description: Hypothetical protein [Oryza sativa (japonica
  misc_feature (14)..(195): Homolog of NCBI NO: 22328160 NR Description: similar to non-phototropic hypocotyl-like protein
  misc_feature (187)..(230): Homolog of NCBI NO: 15239705 NR Description: non-phototropic hypocotyl-like protein; protein
  misc_feature (1)..(593): Homolog of NCBI NO: 30684610 NR Description: expressed protein [Arabidopsis thaliana]
  misc_feature (1)..(593): Homolog of NCBI NO: 6959488 NR Description: RPT2 [Arabidopsis thaliana]
  misc_feature (179)..(593): Homolog of NCBI NO: 25408081 NR Description: hypothetical protein At2g30510 [imported] -
  misc_feature (249)..(567): Homolog of NCBI NO: 15239705 NR Description: non-phototropic hypocotyl-like protein; protein
  misc_feature (16)..(177): Homolog of NCBI NO: 15239705 NR Description: non-phototropic hypocotyl-like protein; protein
  misc_feature (239)..(563): Homolog of NCBI NO: 22328160 NR Description: similar to non-phototropic hypocotyl-like protein
  misc_feature (187)..(234): Homolog of NCBI NO: 22328160 NR Description: similar to non-phototropic hypocotyl-like protein
  misc_feature (16)..(177): Homolog of NCBI NO: 15239705 NR Description: non-phototropic hypocotyl-like protein; protein
  misc_feature (249)..(567): Homolog of NCBI NO: 15239705 NR Description: non-phototropic hypocotyl-like protein; protein
  misc_feature (179)..(593): Homolog of NCBI NO: 25408081 NR Description: hypothetical protein At2g30510 [imported] -
  misc_feature (1)..(593): Homolog of NCBI NO: 6959488 NR Description: RPT2 [Arabidopsis thaliana]
  misc_feature (1)..(593): Homolog of NCBI NO: 30684610 NR Description: expressed protein [Arabidopsis thaliana]

SEQ ID NO: 47077 - protein, 583 aa, Arabidopsis thaliana; identical to SEQ ID NO: 44267
  peptide (1)..(583): Ceres Seq. ID no. 12603625
  misc_feature (176)..(435): Pfam Name: NPH3 family Pfam Description: NPH3 family
  misc_feature (176)..(435): Pfam Name: NPH3 family Pfam Description: NPH3 family
  misc_feature (173)..(583): Homolog of NCBI NO: 26006487 NR Description: Hypothetical protein [Oryza sativa (japonica
  misc_feature (177)..(224): Homolog of NCBI NO: 22328160 NR Description: similar to non-phototropic hypocotyl-like protein
  misc_feature (4)..(185): Homolog of NCBI NO: 22328160 NR Description: similar to non-phototropic hypocotyl-like protein
  misc_feature (229)..(553): Homolog of NCBI NO: 22328160 NR Description: similar to non-phototropic hypocotyl-like protein
  misc_feature (177)..(220): Homolog of NCBI NO: 15239705 NR Description: non-phototropic hypocotyl-like protein; protein
  misc_feature (173)..(583): Homolog of NCBI NO: 26006487 NR Description: Hypothetical protein [Oryza sativa (japonica
  misc_feature (4)..(185): Homolog of NCBI NO: 22328160 NR Description: similar to non-phototropic hypocotyl-like protein
  misc_feature (177)..(220): Homolog of NCBI NO: 15239705 NR Description: non-phototropic hypocotyl-like protein; protein
  misc_feature (1)..(583): Homolog of NCBI NO: 30684610 NR Description: expressed protein [Arabidopsis thaliana]
  misc_feature (1)..(583): Homolog of NCBI NO: 6959488 NR Description: RPT2 [Arabidopsis thaliana]
  misc_feature (169)..(583): Homolog of NCBI NO: 25408081 NR Description: hypothetical protein At2g30510 [imported] -
  misc_feature (239)..(557): Homolog of NCBI NO: 15239705 NR Description: non-phototropic hypocotyl-like protein; protein
  misc_feature (6)..(167): Homolog of NCBI NO: 15239705 NR Description: non-phototropic hypocotyl-like protein; protein
  misc_feature (229)..(553): Homolog of NCBI NO: 22328160 NR Description: similar to non-phototropic hypocotyl-like protein
  misc_feature (177)..(224): Homolog of NCBI NO: 22328160 NR Description: similar to non-phototropic hypocotyl-like protein
  misc_feature (6)..(167): Homolog of NCBI NO: 15239705 NR Description: non-phototropic hypocotyl-like protein; protein
  misc_feature (239)..(557): Homolog of NCBI NO: 15239705 NR Description: non-phototropic hypocotyl-like protein; protein
  misc_feature (169)..(583): Homolog of NCBI NO: 25408081 NR Description: hypothetical protein At2g30510 [imported] -
  misc_feature (1)..(583): Homolog of NCBI NO: 6959488 NR Description: RPT2 [Arabidopsis thaliana]
  misc_feature (1)..(583): Homolog of NCBI NO: 30684610 NR Description: expressed protein [Arabidopsis thaliana]

SEQ ID NO: 47078 - DNA, 2405 bp, Arabidopsis thaliana
  misc_feature (1)..(2405): Ceres Seq. ID no. 12601354
  misc_feature: MA Experiment ID: 20000171 Result: Down-regulated in Transcription
  misc_feature: MA Experiment 20000171 PARAMETER Experiment Name: At_42deg_Heat_P Parameter: Age (day) Value: 14
  misc_feature: MA Experiment 20000171 PARAMETER Experiment Name: At_42deg_Heat_P Parameter: Organism Value: A. thaliana
  misc_feature: MA Experiment 20000171 PARAMETER Experiment Name: At_42deg_Heat_P Parameter: Plant Line Value: WS
  misc_feature: MA Experiment 20000171 PARAMETER Experiment Name: At_42deg_Heat_P Parameter: Temperature (deg C) Value: 42 vs. 22
  misc_feature: MA Experiment 20000171 PARAMETER Experiment Name: At_42deg_Heat_P Parameter: Timepoint (hr) Value: 1
  misc_feature: MA Experiment 20000171 PARAMETER Experiment Name: At_42deg_Heat_P Parameter: Tissue Value: Aerial
  misc_feature: MA Experiment ID: 20000173 Result: Down-regulated in Transcription
  misc_feature: MA Experiment 20000173 PARAMETER Experiment Name: At_42deg_Heat_P Parameter: Age (day) Value: 14
  misc_feature: MA Experiment 20000173 PARAMETER Experiment Name: At_42deg_Heat_P Parameter: Organism Value: A. thaliana
  misc_feature: MA Experiment 20000173 PARAMETER Experiment Name: At_42deg_Heat_P Parameter: Plant Line Value: WS
  misc_feature: MA Experiment 20000173 PARAMETER Experiment Name: At_42deg_Heat_P Parameter: Temperature (deg C) Value: 42 vs. 22
  misc_feature: MA Experiment 20000173 PARAMETER Experiment Name: At_42deg_Heat_P Parameter: Timepoint (hr) Value: 6
  misc_feature: MA Experiment 20000173 PARAMETER Experiment Name: At_42deg_Heat_P Parameter: Tissue Value: Aerial
  misc_feature: MA Experiment ID: 20000227 Result: Up-regulated in Transcription
  misc_feature: MA Experiment 20000227 PARAMETER Experiment Name: At_Root-Tips-vs-Tops_P Parameter: Tissue Value: Root Tips vs. Root Tops
  misc_feature: MA Experiment ID: 20000235 Result: Up-regulated in Transcription
  misc_feature: MA Experiment 20000235 PARAMETER Experiment Name: At_Siliques_P Parameter: Age (day) Value: 21
  misc_feature: MA Experiment 20000235 PARAMETER Experiment Name: At_Siliques_P Parameter: Organism Value: A. thaliana
  misc_feature: MA Experiment 20000235 PARAMETER Experiment Name: At_Siliques_P Parameter: Plant Line Value: WS
  misc_feature: MA Experiment 20000235 PARAMETER Experiment Name: At_Siliques_P Parameter: Tissue Value: 5-10mm Siliques vs. Whole Plant
  misc_feature: MA Experiment ID: 20000438 Result: Up-regulated in Transcription
  misc_feature: MA Experiment 20000438 PARAMETER Experiment Name: At_Shoots__P Parameter: Age (day) Value: 14
  misc_feature: MA Experiment 20000438 PARAMETER Experiment Name: At_Shoots__P Parameter: Tissue Value: Shoots vs. Whole Plant
  misc_feature: MA Experiment ID: 20001905 Result: Down-regulated in Transcription
  misc_feature: MA Experiment 20001905 PARAMETER Experiment Name: At_Drought_Reproduction_P Parameter: Age (day) Value: 40
  misc_feature: MA Experiment 20001905 PARAMETER Experiment Name: At_Drought_Reproduction_P Parameter: Organism Value: A. thaliana
  misc_feature: MA Experiment 20001905 PARAMETER Experiment Name: At_Drought_Reproduction_P Parameter: Plant Line Value: WS
  misc_feature: MA Experiment 20001905 PARAMETER Experiment Name: At_Drought_Reproduction_P Parameter: Timepoint (day) Value: 10
  misc_feature: MA Experiment 20001905 PARAMETER Experiment Name: At_Drought_Reproduction_P Parameter: Tissue Value: Rosettes
  misc_feature: MA Experiment 20001905 PARAMETER Experiment Name: At_Drought_Reproduction_P Parameter: Treatment Value: Drought vs. No Drought
  misc_feature: MA Experiment ID: 20001906 Result: Down-regulated in Transcription
  misc_feature: MA Experiment 20001906 PARAMETER Experiment Name: At_Drought_Reproduction_P Parameter: Age (day) Value: 35
  misc_feature: MA Experiment 20001906 PARAMETER Experiment Name: At_Drought_Reproduction_P Parameter: Organism Value: A. thaliana
  misc_feature: MA Experiment 20001906 PARAMETER Experiment Name: At_Drought_Reproduction_P Parameter: Plant Line Value: WS
  misc_feature: MA Experiment 20001906 PARAMETER Experiment Name: At_Drought_Reproduction_P Parameter: Timepoint (day) Value: 5
  misc_feature: MA Experiment 20001906 PARAMETER Experiment Name: At_Drought_Reproduction_P Parameter: Tissue Value: Siliques
  misc_feature: MA Experiment 20001906 PARAMETER Experiment Name: At_Drought_Reproduction_P Parameter: Treatment Value: Drought vs. No Drought
  misc_feature: MA Experiment ID: 20001911 Result: Down-regulated in Transcription
  misc_feature: MA Experiment 20001911 PARAMETER Experiment Name: At_Drought_Reproduction_P Parameter: Age (day) Value: 40
  misc_feature: MA Experiment 20001911 PARAMETER Experiment Name: At_Drought_Reproduction_P Parameter: Organism Value: A. thaliana
  misc_feature: MA Experiment 20001911 PARAMETER Experiment Name: At_Drought_Reproduction_P Parameter: Plant Line Value: WS
  misc_feature: MA Experiment 20001911 PARAMETER Experiment Name: At_Drought_Reproduction_P Parameter: Timepoint (day) Value: 10
  misc_feature: MA Experiment 20001911 PARAMETER Experiment Name: At_Drought_Reproduction_P Parameter: Tissue Value: Flowers
  misc_feature: MA Experiment 20001911 PARAMETER Experiment Name: At_Drought_Reproduction_P Parameter: Treatment Value: Drought vs. No Drought
accgattctctctctctctctctctctctttcacttgcagtgtgtcgctttgctgccttcattctcatttcacacgaagattaaaaaaagttggtctctttcctaatttagaagagtgataaaccaatcccagatccgagtctctctccccatctccttctttctctcttttgaataacacactgcggttttttgcctttgagatctgtcattgtctcttccaaatctagaacctttacttgggttgtattcaaatatctgtaactagtgagaaatcatcaatttttaaagctgaagtcttcacttagtagtctgcatcctttaactcggaacgttgggtctccgtttggctttatctcaaataagaaggcaatgaaaggaagatcagatggagggcaaaagaagcgggtgattgctttggtttgcgttgcagcggtagttcttgttttcgtatatctgttctacggctcttctgatcatagagcatcggctatcgaatacgggagaaaactcgggttaggtggggatgatgatgatactaaacaggatgacacttctagctcatttggtgttgatgatggtttcactccgagaagttttcctgtgtgtgatgatcgacattcggagcttattccttgcttagataggaatcttatataccaaatgagattgaagctggatttgtctttgatggagcattatgaacgtcattgtcctcctcctgagagacgattcaattgcttgattccgcctcctaatggatataaggttccgattaaatggccaaaaagcagagatgaagtgtggaaagtgaacatacctcatactcatcttgcacatgagaagtctgaccaaaactggatggttgtcaaaggagataagattaatttccctggtggaggcacacattttcattatggtgctgataagtatattgcatcgatggcaaatatgcttaactatcctaacaacgtgctgaacaacggtggaaggctaaggacggttttcgatgttggttgtggtgttgcgagttttggaggttatcttttatcatcggatattctcacaatgtccttggctccaaatgatgtgcatcagaaccaaatccaatttgctcttgagagagggattcctgcctccctcggtgttttagggacaaagaggctcccatacccaagcagatcttttgaactttctcactgttcacgttgcagaatcgattggctacaaagagacgggattcttcttctcgagctagacagagtacttagacctggtggttattttgcatattcatctccagaggcatatgcacaagatgaagaggatcttagaatctggagagaaatgagtgctcttgtggagcgcatgtgttggaagatcgcggcaaaaaggaatcaaactgttatttggcagaaacctttgacaaatgattgttatctagaaagagaacctggaactcagcctcctctttgccgttctgataatgaccctgatgctgtgtggggcgtaaacatggaagcttgcattacttcttacagtgaccatgaccacaaaaccaagggaagtggattagctccatggccagctcggttaacctctcctcctcccagacttgctgattttggatattcaacgggcatgtttgagaaggacacggaactttggaggcagagagtagatacttattgggatctcttgagtccaagaatcgaatcagatacagtgaggaacataatggacatgaaagcaagcatgggctcttttgctgctgctctgaaagaaaaagatgtctgggtaatgaatgttgttcctgaggacggacctaacacgcttaaactgatatatgacagaggtttaatgggcgcggttcatagctggtgtgaagcattctcgacatatccaaggacatatgatctcctccatgcttgggatattatatcggatatcaagaaaaaaggatgtagtgaagtggatttgttactggagatggatcgaatactgcgcccgagcgggtttataatcataagggataaacaaagagtggtggattttgtgaagaagtatctaaaggcattgcattgggaagaagtaggtaccaagacagactcagattcagatcaagattcagacaatgttgtattcattgtccagaagaagctgtggttgactagtgaaagccttagagatatggagtgatgagtaagccacacgatacacaaaaattacgaccaatgatcatacaaccaacaaatttcattattgtagtagcaacattatttattaacgttgtttttaatttttttaattattgtatctttcttacattcttataagtgatgttgtttgtatgattttggtagagaagagaagacacgtataagtaaagaacgatagattctttt

SEQ ID NO: 47079 - protein, 608 aa, Arabidopsis thaliana
  peptide (1)..(608): Ceres Seq. ID no. 12601355
  misc_feature (85)..(595): Pfam Name: Putative methyltransferase Pfam Description: Putative methyltransferase
  misc_feature (1)..(133): Homolog of NCBI NO: 25406781 NR Description: hypothetical protein [imported] - Arabidopsis
  misc_feature (78)..(598): Homolog of NCBI NO: 11357548 NR Description: hypothetical protein F18O22.220 - Arabidopsis
  misc_feature (73)..(598): Homolog of NCBI NO: 22326809 NR Description: putative protein
  misc_feature (393)..(608): Homolog of NCBI NO: 25406781 NR Description: hypothetical protein [imported] - Arabidopsis
  misc_feature (78)..(390): Homolog of NCBI NO: 25406781 NR Description: hypothetical protein [imported] - Arabidopsis
  misc_feature (1)..(598): Homolog of NCBI NO: 37535372 NR Description: hypothetical protein [Oryza sativa (japonica
  misc_feature (1)..(608): Homolog of NCBI NO: 14423548 NR Description: Unknown protein [Arabidopsis thaliana]
  misc_feature (1)..(608): Homolog of NCBI NO: 21536697 NR Description: ankyrin-like protein [Arabidopsis thaliana]
  misc_feature (1)..(608): Homolog of NCBI NO: 18390392 NR Description: ankyrin-like protein
  misc_feature (1)..(608): Homolog of NCBI NO: 22331280 NR Description: expressed protein; protein id: At3g23300.1
MKGRSDGGQKKRVIALVCVAAVVLVFVYLFYGSSDHRASAIEYGRKLGLGGDDDDTKQDDTSSSFGVDDGFTPRSFPVCDDRHSELIPCLDRNLIYQMRLKLDLSLMEHYERHCPPPERRFNCLIPPPNGYKVPIKWPKSRDEVWKVNIPHTHLAHEKSDQNWMVVKGDKINFPGGGTHFHYGADKYIASMANMLNYPNNVLNNGGRLRTVFDVGCGVASFGGYLLSSDILTMSLAPNDVHQNQIQFALERGIPASLGVLGTKRLPYPSRSFELSHCSRCRIDWLQRDGILLLELDRVLRPGGYFAYSSPEAYAQDEEDLRIWREMSALVERMCWKIAAKRNQTVIWQKPLTNDCYLEREPGTQPPLCRSDNDPDAVWGVNMEACITSYSDHDHKTKGSGLAPWPARLTSPPPRLADFGYSTGMFEKDTELWRQRVDTYWDLLSPRIESDTVRNIMDMKASMGSFAAALKEKDVWVMNVVPEDGPNTLKLIYDRGLMGAVHSWCEAFSTYPRTYDLLHAWDIISDIKKKGCSEVDLLLEMDRILRPSGFIIIRDKQRVVDFVKKYLKALHWEEVGTKTDSDSDQDSDNVVFIVQKKLWLTSESLRDME

SEQ ID NO: 47080 - protein, 511 aa, Arabidopsis thaliana
  peptide (1)..(511): Ceres Seq. ID no. 12601356
  misc_feature (1)..(498): Pfam Name: Putative methyltransferase Pfam Description: Putative methyltransferase
  misc_feature (1)..(36): Homolog of NCBI NO: 25406781 NR Description: hypothetical protein [imported] - Arabidopsis
  misc_feature (1)..(501): Homolog of NCBI NO: 11357548 NR Description: hypothetical protein F18O22.220 - Arabidopsis
  misc_feature (1)..(501): Homolog of NCBI NO: 22326809 NR Description: putative protein
  misc_feature (296)..(511): Homolog of NCBI NO: 25406781 NR Description: hypothetical protein [imported] - Arabidopsis
  misc_feature (1)..(293): Homolog of NCBI NO: 25406781 NR Description: hypothetical protein [imported] - Arabidopsis
  misc_feature (1)..(501): Homolog of NCBI NO: 37535372 NR Description: hypothetical protein [Oryza sativa (japonica
  misc_feature (1)..(511): Homolog of NCBI NO: 14423548 NR Description: Unknown protein [Arabidopsis thaliana]
  misc_feature (1)..(511): Homolog of NCBI NO: 21536697 NR Description: ankyrin-like protein [Arabidopsis thaliana]
  misc_feature (1)..(511): Homolog of NCBI NO: 18390392 NR Description: ankyrin-like protein
  misc_feature (1)..(511): Homolog of NCBI NO: 22331280 NR Description: expressed protein; protein id: At3g23300.1
MRLKLDLSLMEHYERHCPPPERRFNCLIPPPNGYKVPIKWPKSRDEVWKVNIPHTHLAHEKSDQNWMVVKGDKINFPGGGTHFHYGADKYIASMANMLNYPNNVLNNGGRLRTVFDVGCGVASFGGYLLSSDILTMSLAPNDVHQNQIQFALERGIPASLGVLGTKRLPYPSRSFELSHCSRCRIDWLQRDGILLLELDRVLRPGGYFAYSSPEAYAQDEEDLRIWREMSALVERMCWKIAAKRNQTVIWQKPLTNDCYLEREPGTQPPLCRSDNDPDAVWGVNMEACITSYSDHDHKTKGSGLAPWPARLTSPPPRLADFGYSTGMFEKDTELWRQRVDTYWDLLSPRIESDTVRNIMDMKASMGSFAAALKEKDVWVMNVVPEDGPNTLKLIYDRGLMGAVHSWCEAFSTYPRTYDLLHAWDIISDIKKKGCSEVDLLLEMDRILRPSGFIIIRDKQRVVDFVKKYLKALHWEEVGTKTDSDSDQDSDNVVFIVQKKLWLTSESLRDME

SEQ ID NO: 47081 - protein, 502 aa, Arabidopsis thaliana
  peptide (1)..(502): Ceres Seq. ID no. 12601357
  misc_feature (1)..(489): Pfam Name: Putative methyltransferase Pfam Description: Putative methyltransferase
  misc_feature (1)..(27): Homolog of NCBI NO: 25406781 NR Description: hypothetical protein [imported] - Arabidopsis
  misc_feature (1)..(492): Homolog of NCBI NO: 11357548 NR Description: hypothetical protein F18O22.220 - Arabidopsis
  misc_feature (1)..(492): Homolog of NCBI NO: 22326809 NR Description: putative protein
  misc_feature (287)..(502): Homolog of NCBI NO: 25406781 NR Description: hypothetical protein [imported] - Arabidopsis
  misc_feature (1)..(284): Homolog of NCBI NO: 25406781 NR Description: hypothetical protein [imported] - Arabidopsis
  misc_feature (1)..(492): Homolog of NCBI NO: 37535372 NR Description: hypothetical protein [Oryza sativa (japonica
  misc_feature (1)..(502): Homolog of NCBI NO: 14423548 NR Description: Unknown protein [Arabidopsis thaliana]
  misc_feature (1)..(502): Homolog of NCBI NO: 21536697 NR Description: ankyrin-like protein [Arabidopsis thaliana]
  misc_feature (1)..(502): Homolog of NCBI NO: 18390392 NR Description: ankyrin-like protein
  misc_feature (1)..(502): Homolog of NCBI NO: 22331280 NR Description: expressed protein; protein id: At3g23300.1
MEHYERHCPPPERRFNCLIPPPNGYKVPIKWPKSRDEVWKVNIPHTHLAHEKSDQNWMVVKGDKINFPGGGTHFHYGADKYIASMANMLNYPNNVLNNGGRLRTVFDVGCGVASFGGYLLSSDILTMSLAPNDVHQNQIQFALERGIPASLGVLGTKRLPYPSRSFELSHCSRCRIDWLQRDGILLLELDRVLRPGGYFAYSSPEAYAQDEEDLRIWREMSALVERMCWKIAAKRNQTVIWQKPLTNDCYLEREPGTQPPLCRSDNDPDAVWGVNMEACITSYSDHDHKTKGSGLAPWPARLTSPPPRLADFGYSTGMFEKDTELWRQRVDTYWDLLSPRIESDTVRNIMDMKASMGSFAAALKEKDVWVMNVVPEDGPNTLKLIYDRGLMGAVHSWCEAFSTYPRTYDLLHAWDIISDIKKKGCSEVDLLLEMDRILRPSGFIIIRDKQRVVDFVKKYLKALHWEEVGTKTDSDSDQDSDNVVFIVQKKLWLTSESLRDME

SEQ ID NO: 47082 - DNA, 1441 bp, Arabidopsis thaliana
  misc_feature (1)..(1441): Ceres Seq. ID no. 14310224
  misc_feature: MA Experiment ID: 20000440 Result: Up-regulated in Transcription
  misc_feature: MA Experiment 20000440 PARAMETER Experiment Name: At_Closed-Flower__Sub_P Parameter: Tissue Value: Closed Flower vs. Whole Plant
aagttcggttcccttcttctctcctcctccaccttctctccattttcttacctctcaacaagtttacacaaacaaaaaaacaaaaaaaaaacaaaaaaatgacaagttgttttttttaaaattcttttcttagacaaagacagagacagagagaggggaagattttgggtttggtgtttttctccttttcttcattgaaagttgtcttcttttttaatcttctttgattaaaatgggtaatgtgacgtcaaatgtggcggccaagttcgcattcttcccgccggagccagcaacatacggcgtaacgaaggatgacgagaccgggaagctggtcttcgccggagtgtcggctgacaagaacgtggaagtccaccaactcaccacaaagtccggcaacaaagttgttgccacgttttggagacacccttttgcgagattcacgcttctctattcccatggcaatgccgctgatcttggccaaatggtcgagctattcatcgaactccgtgctcatctccgcgtcaacatcatgagttatgattattcaggatatggagcttcaacaggaaagccgtctgaattcaacacgtattatgacatagaggcagtgtacaattgcttgcggagcgattatgggatcaagcaagaggagattattctgtacggacagtctgtaggaagcggtccaacgttgcacatggcttctcggttgaagaggcttagaggagttgttcttcacagcgccattctctctggaatcagagtcttgtatcctgtcaaaatgactctctggttcgatatattcaaaaacatagacaagattcgccatgtcaactcacaagtccttgtcatacatggcacaaatgacgagattgttgatttgtctcacgggaaacgactgtgggagctggcgaaggagaagtatgatccgttatgggtgaagggaggagggcattgcaacctcgagacttaccctgagtacatcaagcacctcaaaaagttcgtaaatgcaatggagaaactctctctaaccaatccaccacccaaacaactaactaatgagcccagtatcaccgagactaagcacaatcggtgcttgaaattcgggaaacggtagtagcagaatcacaagacaattggtttggtagatttcttccttggcatcgcatgtgcagagttatttcctcaatgtgatcaaaaccaatgctaaacacagggtcacagacaacggcgtaacagagatcatctagtgaggtatttcactgtagaatgttgccctgcttttgggtatttgatcgatgttcaatctcctgtaaaaatgtagcttcaagtttgggggtttctgtaacacatcattacttgtaggagaagcaacacagaaaagatgtaatcagcatttccttcgaactatctagtgctccttagcgagacaattaagtac

SEQ ID NO: 47083 - protein, 294 aa, Arabidopsis thaliana
  peptide (1)..(294): Ceres Seq. ID no. 14310225
  misc_feature (99)..(170): Pfam Name: alpha/beta hydrolase fold Pfam Description: alpha/beta hydrolase fold
  misc_feature (2)..(265): Homolog of NCBI NO: 34905260 NR Description: P0577B11.1 [Oryza sativa (japonica
  misc_feature (1)..(277): Homolog of NCBI NO: 15230760 NR Description: hypothetical protein [Arabidopsis thaliana]
  misc_feature (1)..(264): Homolog of NCBI NO: 15232168 NR Description: expressed protein [Arabidopsis thaliana]
  misc_feature (1)..(282): Homolog of NCBI NO: 15241394 NR Description: expressed protein [Arabidopsis thaliana]
  misc_feature (1)..(294): Homolog of NCBI NO: 25352163 NR Description: hypothetical protein AT4g31020 [imported] -
  misc_feature (190)..(294): Homolog of NCBI NO: 15224121 NR Description: hypothetical protein [Arabidopsis thaliana]
  misc_feature (1)..(192): Homolog of NCBI NO: 15224121 NR Description: hypothetical protein [Arabidopsis thaliana]
  misc_feature (190)..(294): Homolog of NCBI NO: 30688887 NR Description: expressed protein [Arabidopsis thaliana]
  misc_feature (1)..(208): Homolog of NCBI NO: 30688887 NR Description: expressed protein [Arabidopsis thaliana]
  misc_feature (1)..(294): Homolog of NCBI NO: 28393521 NR Description: unknown protein [Arabidopsis thaliana]
MGNVTSNVAAKFAFFPPEPATYGVTKDDETGKLVFAGVSADKNVEVHQLTTKSGNKVVATFWRHPFARFTLLYSHGNAADLGQMVELFIELRAHLRVNIMSYDYSGYGASTGKPSEFNTYYDIEAVYNCLRSDYGIKQEEIILYGQSVGSGPTLHMASRLKRLRGVVLHSAILSGIRVLYPVKMTLWFDIFKNIDKIRHVNSQVLVIHGTNDEIVDLSHGKRLWELAKEKYDPLWVKGGGHCNLETYPEYIKHLKKFVNAMEKLSLTNPPPKQLTNEPSITETKHNRCLKFGKR

SEQ ID NO: 47084 - protein, 211 aa, Arabidopsis thaliana
  peptide (1)..(211): Ceres Seq. ID no. 14310226
  misc_feature (16)..(87): Pfam Name: alpha/beta hydrolase fold Pfam Description: alpha/beta hydrolase fold
  misc_feature (1)..(182): Homolog of NCBI NO: 34905260 NR Description: P0577B11.1 [Oryza sativa (japonica
  misc_feature (1)..(194): Homolog of NCBI NO: 15230760 NR Description: hypothetical protein [Arabidopsis thaliana]
  misc_feature (1)..(181): Homolog of NCBI NO: 15232168 NR Description: expressed protein [Arabidopsis thaliana]
  misc_feature (1)..(199): Homolog of NCBI NO: 15241394 NR Description: expressed protein [Arabidopsis thaliana]
  misc_feature (1)..(211): Homolog of NCBI NO: 25352163 NR Description: hypothetical protein AT4g31020 [imported] -
  misc_feature (107)..(211): Homolog of NCBI NO: 15224121 NR Description: hypothetical protein [Arabidopsis thaliana]
  misc_feature (1)..(109): Homolog of NCBI NO: 15224121 NR Description: hypothetical protein [Arabidopsis thaliana]
  misc_feature (107)..(211): Homolog of NCBI NO: 30688887 NR Description: expressed protein [Arabidopsis thaliana]
  misc_feature (1)..(125): Homolog of NCBI NO: 30688887 NR Description: expressed protein [Arabidopsis thaliana]
  misc_feature (1)..(211): Homolog of NCBI NO: 28393521 NR Description: unknown protein [Arabidopsis thaliana]
MVELFIELRAHLRVNIMSYDYSGYGASTGKPSEFNTYYDIEAVYNCLRSDYGIKQEEIILYGQSVGSGPTLHMASRLKRLRGVVLHSAILSGIRVLYPVKMTLWFDIFKNIDKIRHVNSQVLVIHGTNDEIVDLSHGKRLWELAKEKYDPLWVKGGGHCNLETYPEYIKHLKKFVNAMEKLSLTNPPPKQLTNEPSITETKHNRCLKFGKR

SEQ ID NO: 47085 - protein, 195 aa, Arabidopsis thaliana
  peptide (1)..(195): Ceres Seq. ID no. 14310227
  misc_feature (1)..(71): Pfam Name: alpha/beta hydrolase fold Pfam Description: alpha/beta hydrolase fold
  misc_feature (1)..(166): Homolog of NCBI NO: 34905260 NR Description: P0577B11.1 [Oryza sativa (japonica
  misc_feature (1)..(178): Homolog of NCBI NO: 15230760 NR Description: hypothetical protein [Arabidopsis thaliana]
  misc_feature (1)..(165): Homolog of NCBI NO: 15232168 NR Description: expressed protein [Arabidopsis thaliana]
  misc_feature (1)..(183): Homolog of NCBI NO: 15241394 NR Description: expressed protein [Arabidopsis thaliana]
  misc_feature (1)..(195): Homolog of NCBI NO: 25352163 NR Description: hypothetical protein AT4g31020 [imported] -
  misc_feature (91)..(195): Homolog of NCBI NO: 15224121 NR Description: hypothetical protein [Arabidopsis thaliana]
  misc_feature (1)..(93): Homolog of NCBI NO: 15224121 NR Description: hypothetical protein [Arabidopsis thaliana]
  misc_feature (91)..(195): Homolog of NCBI NO: 30688887 NR Description: expressed protein [Arabidopsis thaliana]
  misc_feature (1)..(109): Homolog of NCBI NO: 30688887 NR Description: expressed protein [Arabidopsis thaliana]
  misc_feature (1)..(195): Homolog of NCBI NO: 28393521 NR Description: unknown protein [Arabidopsis thaliana]
MSYDYSGYGASTGKPSEFNTYYDIEAVYNCLRSDYGIKQEEIILYGQSVGSGPTLHMASRLKRLRGVVLHSAILSGIRVLYPVKMTLWFDIFKNIDKIRHVNSQVLVIHGTNDEIVDLSHGKRLWELAKEKYDPLWVKGGGHCNLETYPEYIKHLKKFVNAMEKLSLTNPPPKQLTNEPSITETKHNRCLKFGKR

SEQ ID NO: 47086 - DNA, 880 bp, Arabidopsis thaliana
  misc_feature (1)..(880): Ceres Seq. ID no. 12601358
  misc_feature: MA Experiment ID: 20000306 Result: Down-regulated in Transcription
  misc_feature: MA Experiment 20000306 PARAMETER Experiment Name: At_Germinating_Seeds_Sub_P Parameter: Age (hr) Value: 6 vs. 0
  misc_feature: MA Experiment 20000306 PARAMETER Experiment Name: At_Germinating_Seeds_Sub_P Parameter: Organism Value: A. thaliana
  misc_feature: MA Experiment 20000306 PARAMETER Experiment Name: At_Germinating_Seeds_Sub_P Parameter: Plant Line Value: WS
  misc_feature: MA Experiment 20000306 PARAMETER Experiment Name: At_Germinating_Seeds_Sub_P Parameter: Tissue Value: Germinating Seeds
  misc_feature: MA Experiment ID: 20000307 Result: Down-regulated in Transcription
  misc_feature: MA Experiment 20000307 PARAMETER Experiment Name: At_Germinating_Seeds_Sub_P Parameter: Age (hr) Value: 24 vs. 0
  misc_feature: MA Experiment 20000307 PARAMETER Experiment Name: At_Germinating_Seeds_Sub_P Parameter: Organism Value: A. thaliana
  misc_feature: MA Experiment 20000307 PARAMETER Experiment Name: At_Germinating_Seeds_Sub_P Parameter: Plant Line Value: WS
  misc_feature: MA Experiment 20000307 PARAMETER Experiment Name: At_Germinating_Seeds_Sub_P Parameter: Tissue Value: Germinating Seeds
  misc_feature: MA Experiment ID: 20000314 Result: Down-regulated in Transcription
  misc_feature: MA Experiment 20000314 PARAMETER Experiment Name: At_14day_Shoots-Roots_Sub_P Parameter: Age (day) Value: 14
  misc_feature: MA Experiment 20000314 PARAMETER Experiment Name: At_14day_Shoots-Roots_Sub_P Parameter: Organism Value: A. thaliana
  misc_feature: MA Experiment 20000314 PARAMETER Experiment Name: At_14day_Shoots-Roots_Sub_P Parameter: Plant Line Value: WS
  misc_feature: MA Experiment 20000314 PARAMETER Experiment Name: At_14day_Shoots-Roots_Sub_P Parameter: Tissue Value: Roots vs. Whole Plant
  misc_feature: MA Experiment ID: 20000315 Result: Down-regulated in Transcription
  misc_feature: MA Experiment 20000315 PARAMETER Experiment Name: At_14day_Shoots-Roots_Sub_P Parameter: Age (day) Value: 14
  misc_feature: MA Experiment 20000315 PARAMETER Experiment Name: At_14day_Shoots-Roots_Sub_P Parameter: Organism Value: A. thaliana
  misc_feature: MA Experiment 20000315 PARAMETER Experiment Name: At_14day_Shoots-Roots_Sub_P Parameter: Plant Line Value: WS
  misc_feature: MA Experiment 20000315 PARAMETER Experiment Name: At_14day_Shoots-Roots_Sub_P Parameter: Tissue Value: Shoots vs. Whole Plant
  misc_feature: MA Experiment ID: 20000328 Result: Down-regulated in Transcription
  misc_feature: MA Experiment 20000328 PARAMETER Experiment Name: At_42deg_Heat_Sub_P Parameter: Age (day) Value: 14
  misc_feature: MA Experiment 20000328 PARAMETER Experiment Name: At_42deg_Heat_Sub_P Parameter: Organism Value: A. thaliana
  misc_feature: MA Experiment 20000328 PARAMETER Experiment Name: At_42deg_Heat_Sub_P Parameter: Plant Line Value: WS
  misc_feature: MA Experiment 20000328 PARAMETER Experiment Name: At_42deg_Heat_Sub_P Parameter: Temperature (deg C) Value: 42 vs. 22
  misc_feature: MA Experiment 20000328 PARAMETER Experiment Name: At_42deg_Heat_Sub_P Parameter: Timepoint (hr) Value: 6
  misc_feature: MA Experiment 20000328 PARAMETER Experiment Name: At_42deg_Heat_Sub_P Parameter: Tissue Value: Aerial
  misc_feature: MA Experiment ID: 20000329 Result: Up-regulated in Transcription
  misc_feature: MA Experiment 20000329 PARAMETER Experiment Name: At_4deg_Cold_Sub_P Parameter: Age (day) Value: 14
  misc_feature: MA Experiment 20000329 PARAMETER Experiment Name: At_4deg_Cold_Sub_P Parameter: Organism Value: A. thaliana
  misc_feature: MA Experiment 20000329 PARAMETER Experiment Name: At_4deg_Cold_Sub_P Parameter: Plant Line Value: WS
  misc_feature: MA Experiment 20000329 PARAMETER Experiment Name: At_4deg_Cold_Sub_P Parameter: Temperature (deg C) Value: 4 vs. 22
  misc_feature: MA Experiment 20000329 PARAMETER Experiment Name: At_4deg_Cold_Sub_P Parameter: Timepoint (hr) Value: 6
  misc_feature: MA Experiment 20000329 PARAMETER Experiment Name: At_4deg_Cold_Sub_P Parameter: Tissue Value: Aerial
  misc_feature: MA Experiment ID: 20000347 Result: Up-regulated in Transcription
  misc_feature: MA Experiment 20000347 PARAMETER Experiment Name: At_2mM_SA_Sub_P Parameter: Age (day) Value: 14
  misc_feature: MA Experiment 20000347 PARAMETER Experiment Name: At_2mM_SA_Sub_P Parameter: Organism Value: A. thaliana
  misc_feature: MA Experiment 20000347 PARAMETER Experiment Name: At_2mM_SA_Sub_P Parameter: Plant Line Value: WS
  misc_feature: MA Experiment 20000347 PARAMETER Experiment Name: At_2mM_SA_Sub_P Parameter: Timepoint (hr) Value: 6
  misc_feature: MA Experiment 20000347 PARAMETER Experiment Name: At_2mM_SA_Sub_P Parameter: Tissue Value: Aerial
  misc_feature: MA Experiment 20000347 PARAMETER Experiment Name: At_2mM_SA_Sub_P Parameter: Treatment Value: 2mM SA vs. No Treatment
  misc_feature: MA Experiment ID: 20000352 Result: Up-regulated in Transcription
  misc_feature: MA Experiment 20000352 PARAMETER Experiment Name: At_Drought_Sub_P Parameter: Age (day) Value: 7
  misc_feature: MA Experiment 20000352 PARAMETER Experiment Name: At_Drought_Sub_P Parameter: Organism Value: A. thaliana
  misc_feature: MA Experiment 20000352 PARAMETER Experiment Name: At_Drought_Sub_P Parameter: Plant Line Value: WS
  misc_feature: MA Experiment 20000352 PARAMETER Experiment Name: At_Drought_Sub_P Parameter: Timepoint (hr) Value: 6
  misc_feature: MA Experiment 20000352 PARAMETER Experiment Name: At_Drought_Sub_P Parameter: Tissue Value: Whole Plant
  misc_feature: MA Experiment 20000352 PARAMETER Experiment Name: At_Drought_Sub_P Parameter: Treatment Value: Drought vs. No Drought
  misc_feature: MA Experiment ID: 20000440 Result: Down-regulated in Transcription
  misc_feature: MA Experiment 20000440 PARAMETER Experiment Name: At_Closed-Flower__Sub_P Parameter: Tissue Value: Closed Flower vs. Whole Plant
atcaatcacaaagatctctctacttcaataaatctccaccttactttaagaacaagaaaaacacagtattaacaaatggcaggaatcaaagttttcggtcacccagcttccacagccactagaagagttctcatcgctcttcacgagaagaatgtcgactttgaattcgttcatgtcgagctcaaagatggtgaacacaagaaagagcctttcatccttcgcaacccctttggtaaagttccagcctttgaagatggagacttcaagattttcgaatcaagagcaattactcaatacatagctcatgaattctcagacaaaggaaacaaccttctctcaactggcaaggacatggcgatcatagccatgggcattgaaattgagtcgcatgagtttgacccagttggttcaaagcttgtttgggagcaagtcttaaagcctttgtatggtatgaccacagacaaaaccgttgttgaagaagaagaggctaagctagccaaagtcctcgatgtttacgaacacaggcttggtgagtccaagtatttggcttctgaccacttcactttggtcgatcttcacactatccctgtgattcaatacttacttggaactccaactaagaaactcttcgacgagcgtccacatgtgagtgcttgggttgctgacatcacttcaaggccttctgctcagaaggttctttaagtgaatctcaaactatttatcgatcagaagatgtaataaaagtggcgatgacctaattgcccaattctcataaactctgtttttctttttgtgtttactctgtttttctgctgccgagtgtttgatttgaatgtaatcttcgataatgagtcttgatataataaaatatttcttatct

SEQ ID NO: 47087 - protein, 208 aa, Arabidopsis thaliana
  peptide (1)..(208): Ceres Seq. ID no. 12601359
  misc_feature (1)..(208): Homolog of NCBI NO: 7649155 NR Description: glutathione S-transferase [Euphorbia esula]
  misc_feature (3)..(208): Homolog of NCBI NO: 1170094 NR Description: Glutathione S-transferase (GST class-PHI) (25 kDa
  misc_feature (1)..(207): Homolog of NCBI NO: 21555418 NR Description: Atpm24.1 glutathione S transferase [Arabidopsis
  misc_feature (2)..(207): Homolog of NCBI NO: 2554769 NR Description: Chain A, Structure Of Glutathione S-Transferase
  misc_feature (1)..(207): Homolog of NCBI NO: 15235401 NR Description: glutathione transferase, putative
  misc_feature (1)..(208): Homolog of NCBI NO: 15227063 NR Description: glutathione transferase, putative
  misc_feature (1)..(208): Homolog of NCBI NO: 17377644 NR Description: Glutathione S-transferase 11 (GST class-phi)
  misc_feature (1)..(208): Homolog of NCBI NO: 15218639 NR Description: glutathione transferase, putative
  misc_feature (1)..(208): Homolog of NCBI NO: 481821 NR Description: probable glutathione transferase (EC 2.5.1.18)
  misc_feature (1)..(208): Homolog of NCBI NO: 15218640 NR Description: glutathione transferase, putative
MAGIKVFGHPASTATRRVLIALHEKNVDFEFVHVELKDGEHKKEPFILRNPFGKVPAFEDGDFKIFESRAITQYIAHEFSDKGNNLLSTGKDMAIIAMGIEIESHEFDPVGSKLVWEQVLKPLYGMTTDKTVVEEEEAKLAKVLDVYEHRLGESKYLASDHFTLVDLHTIPVIQYLLGTPTKKLFDERPHVSAWVADITSRPSAQKVL

SEQ ID NO: 47088 - protein, 116 aa, Arabidopsis thaliana
  peptide (1)..(116): Ceres Seq. ID no. 12601360
  misc_feature (1)..(116): Homolog of NCBI NO: 7649155 NR Description: glutathione S-transferase [Euphorbia esula]
  misc_feature (1)..(116): Homolog of NCBI NO: 1170094 NR Description: Glutathione S-transferase (GST class-PHI) (25 kDa
  misc_feature (1)..(115): Homolog of NCBI NO: 21555418 NR Description: Atpm24.1 glutathione S transferase [Arabidopsis
  misc_feature (1)..(115): Homolog of NCBI NO: 2554769 NR Description: Chain A, Structure Of Glutathione S-Transferase
  misc_feature (1)..(115): Homolog of NCBI NO: 15235401 NR Description: glutathione transferase, putative
  misc_feature (1)..(116): Homolog of NCBI NO: 15227063 NR Description: glutathione transferase, putative
  misc_feature (1)..(116): Homolog of NCBI NO: 17377644 NR Description: Glutathione S-transferase 11 (GST class-phi)
  misc_feature (1)..(116): Homolog of NCBI NO: 15218639 NR Description: glutathione transferase, putative
  misc_feature (1)..(116): Homolog of NCBI NO: 481821 NR Description: probable glutathione transferase (EC 2.5.1.18)
  misc_feature (1)..(116): Homolog of NCBI NO: 15218640 NR Description: glutathione transferase, putative
MAIIAMGIEIESHEFDPVGSKLVWEQVLKPLYGMTTDKTVVEEEEAKLAKVLDVYEHRLGESKYLASDHFTLVDLHTIPVIQYLLGTPTKKLFDERPHVSAWVADITSRPSAQKVL

SEQ ID NO: 47089 - protein, 111 aa, Arabidopsis thaliana
  peptide (1)..(111): Ceres Seq. ID no. 12601361
  misc_feature (1)..(111): Homolog of NCBI NO: 7649155 NR Description: glutathione S-transferase [Euphorbia esula]
  misc_feature (1)..(111): Homolog of NCBI NO: 1170094 NR Description: Glutathione S-transferase (GST class-PHI) (25 kDa
  misc_feature (1)..(110): Homolog of NCBI NO: 21555418 NR Description: Atpm24.1 glutathione S transferase [Arabidopsis
  misc_feature (1)..(110): Homolog of NCBI NO: 2554769 NR Description: Chain A, Structure Of Glutathione S-Transferase
  misc_feature (1)..(110): Homolog of NCBI NO: 15235401 NR Description: glutathione transferase, putative
  misc_feature (1)..(111): Homolog of NCBI NO: 15227063 NR Description: glutathione transferase, putative
  misc_feature (1)..(111): Homolog of NCBI NO: 17377644 NR Description: Glutathione S-transferase 11 (GST class-phi)
  misc_feature (1)..(111): Homolog of NCBI NO: 15218639 NR Description: glutathione transferase, putative
  misc_feature (1)..(111): Homolog of NCBI NO: 481821 NR Description: probable glutathione transferase (EC 2.5.1.18)
  misc_feature (1)..(111): Homolog of NCBI NO: 15218640 NR Description: glutathione transferase, putative
MGIEIESHEFDPVGSKLVWEQVLKPLYGMTTDKTVVEEEEAKLAKVLDVYEHRLGESKYLASDHFTLVDLHTIPVIQYLLGTPTKKLFDERPHVSAWVADITSRPSAQKVL

SEQ ID NO: 47090 - DNA, 1265 bp, Arabidopsis thaliana
  misc_feature (1)..(1265): Ceres Seq. ID no. 14316565
  misc_feature: MA Experiment ID: 20000179 Result: Up-regulated in Transcription
  misc_feature: MA Experiment 20000179 PARAMETER Experiment Name: At_Germinating_Seeds_P Parameter: Age (hr) Value: 6 vs. 0
  misc_feature: MA Experiment 20000179 PARAMETER Experiment Name: At_Germinating_Seeds_P Parameter: Tissue Value: Germinating Seeds
  misc_feature: MA Experiment ID: 20000180 Result: Up-regulated in Transcription
  misc_feature: MA Experiment 20000180 PARAMETER Experiment Name: At_Germinating_Seeds_P Parameter: Age (hr) Value: 24 vs. 0
  misc_feature: MA Experiment 20000180 PARAMETER Experiment Name: At_Germinating_Seeds_P Parameter: Tissue Value: Germinating Seeds
  misc_feature: MA Experiment ID: 20000227 Result: Up-regulated in Transcription
  misc_feature: MA Experiment 20000227 PARAMETER Experiment Name: At_Root-Tips-vs-Tops_P Parameter: Tissue Value: Root Tips vs. Root Tops
  misc_feature: MA Experiment ID: 20000265 Result: Up-regulated in Transcription
  misc_feature: MA Experiment 20000265 PARAMETER Experiment Name: At_Open_Flower_P Parameter: Age (day) Value: 21
  misc_feature: MA Experiment 20000265 PARAMETER Experiment Name: At_Open_Flower_P Parameter: Plant Line Value: WS
  misc_feature: MA Experiment 20000265 PARAMETER Experiment Name: At_Open_Flower_P Parameter: Tissue Value: Closed Flower vs. Whole Plant
  misc_feature: MA Experiment ID: 20000794 Result: Down-regulated in Transcription
  misc_feature: MA Experiment 20000794 PARAMETER Experiment Name: At_Petals_P Parameter: Age (day) Value: 23-25 days
  misc_feature: MA Experiment 20000794 PARAMETER Experiment Name: At_Petals_P Parameter: Plant Line Value: WS
  misc_feature: MA Experiment 20000794 PARAMETER Experiment Name: At_Petals_P Parameter: Tissue Value: Petals vs. Whole plant
  misc_feature: MA Experiment ID: 20001911 Result: Down-regulated in Transcription
  misc_feature: MA Experiment 20001911 PARAMETER Experiment Name: At_Drought_Reproduction_P Parameter: Age (day) Value: 40
  misc_feature: MA Experiment 20001911 PARAMETER Experiment Name: At_Drought_Reproduction_P Parameter: Organism Value: A. thaliana
  misc_feature: MA Experiment 20001911 PARAMETER Experiment Name: At_Drought_Reproduction_P Parameter: Plant Line Value: WS
  misc_feature: MA Experiment 20001911 PARAMETER Experiment Name: At_Drought_Reproduction_P Parameter: Timepoint (day) Value: 10
  misc_feature: MA Experiment 20001911 PARAMETER Experiment Name: At_Drought_Reproduction_P Parameter: Tissue Value: Flowers
  misc_feature: MA Experiment 20001911 PARAMETER Experiment Name: At_Drought_Reproduction_P Parameter: Treatment Value: Drought vs. No Drought
aatcaggttccacatttggctttgcacaccttccttgatcctatcaatggcggatctgaaatcaaccttcctcgacgtttactctgttctcaagtctgatctgcttcaagatccttcctttgaattcacccacgaatctcgtcaatggcttgaacggatgcttgactacaatgtacgcggagggaagctaaatcgtggtctctctgtggttgatagctacaagctgttgaagcaaggtcaagacttgacggagaaagagactttcctctcatgtgctcttggttggtgcattgaatggcttcaagcttatttccttgtgcttgatgacatcatggacaactctgtcacacgccgtggccagccttgttggtttagaaagccaaaggttggtatgattgccattaacgatgggattctacttcgcaatcatatccacaggattctcaaaaagcacttcagggaaatgccttactatgttgacctcgttgatttgtttaacgaggtagagtttcaaacagcttgcggccagatgattgatttgatcaccacctttgatggagaaaaagatttgtctaagtactccttgaaatccatcggcgtattgttgagtacaaaacagcttattactcattttatcttcctgttgcttgcgcattgctcatggcgggagaaaatttggaaaaccatactgatgtgaagactgttcttgttgacatgggaatttactttcaagtacaggatgattatctggactgttttgctgatcctgagacacttggcaagatagggacagacatagaagatttcaaatgctcctggttggtagttaaggcattggaacgctgcagtgaagaacaaactaagatactatacgagaactatggtaaagccgaaccatcaaacgttgctaaagtgaaagctctctacaaagagattgatctcgagggagcgttcatggaatatgagaaggaaagctatgagaagctgacaaagttgatcgaagctcaccagagtaaagcaattcaagcagtgctaaaatctttcttggctaagatctacaagaggcagaagtagagacatactcgggcctctctccgttttattcttctgacatttatgtattggtgcatgacttcttttgccttagatcttatgttcccttccaaaaatagaatttgagattcttgttcatgcttatagtatagagacttagaaaatgtctatgtttcttttaatttctgaataaaaaatgtgcaatcagtgat

SEQ ID NO: 47091 - protein, 231 aa, Arabidopsis thaliana
  peptide (1)..(231): Ceres Seq. ID no. 14316566
  misc_feature (49)..(220): Pfam Name: Polyprenyl synthetase Pfam Description: Polyprenyl synthetase
  misc_feature (16)..(195): Homolog of NCBI NO: 14573639 NR Description: farnesyldiphosphate synthase [x Citrofortunella
  misc_feature (16)..(220): Homolog of NCBI NO: 1346029 NR Description: Farnesyl pyrophosphate synthetase 2 (FPP
  misc_feature (16)..(220): Homolog of NCBI NO: 1346028 NR Description: Farnesyl pyrophosphate synthetase 1 (FPP
  misc_feature (16)..(220): Homolog of NCBI NO: 1922251 NR Description: farnesyl pyrophosphate synthase [Gossypium
  misc_feature (16)..(220): Homolog of NCBI NO: 7433992 NR Description: farnesyl-pyrophosphate synthetase - Para rubber
  misc_feature (16)..(220): Homolog of NCBI NO: 20135548 NR Description: farnesyl pyrophosphate synthase [Malus x
  misc_feature (18)..(220): Homolog of NCBI NO: 1076319 NR Description: farnesyl-pyrophosphate synthetase FPS1 -
  misc_feature (18)..(220): Homolog of NCBI NO: 15238801 NR Description: farnesyl pyrophosphate synthetase 1 (FPS1)
  misc_feature (18)..(220): Homolog of NCBI NO: 1146159 NR Description: farnesyl diphosphate synthase short form
  misc_feature (16)..(220): Homolog of NCBI NO: 15236002 NR Description: farnesyl pyrophosphate synthetase 2 (FPS2)
IRFHIWLCTPSLILSMADLKSTFLDVYSVLKSDLLQDPSFEFTHESRQWLERMLDYNVRGGKLNRGLSVVDSYKLLKQGQDLTEKETFLSCALGWCIEWLQAYFLVLDDIMDNSVTRRGQPCWFRKPKVGMIAINDGILLRNHIHRILKKHFREMPYYVDLVDLFNEVEFQTACGQMIDLITTFDGEKDLSKYSLKSIGVLLSTKQLITHFIFLLLAHCSWREKIWKTILM

SEQ ID NO: 47092 - protein, 216 aa, Arabidopsis thaliana
  peptide (1)..(216): Ceres Seq. ID no. 14316567
  misc_feature (34)..(205): Pfam Name: Polyprenyl synthetase Pfam Description: Polyprenyl synthetase
  misc_feature (1)..(180): Homolog of NCBI NO: 14573639 NR Description: farnesyldiphosphate synthase [x Citrofortunella
  misc_feature (1)..(205): Homolog of NCBI NO: 1346029 NR Description: Farnesyl pyrophosphate synthetase 2 (FPP
  misc_feature (1)..(205): Homolog of NCBI NO: 1346028 NR Description: Farnesyl pyrophosphate synthetase 1 (FPP
  misc_feature (1)..(205): Homolog of NCBI NO: 1922251 NR Description: farnesyl pyrophosphate synthase [Gossypium
  misc_feature (1)..(205): Homolog of NCBI NO: 7433992 NR Description: farnesyl-pyrophosphate synthetase - Para rubber
  misc_feature (1)..(205): Homolog of NCBI NO: 20135548 NR Description: farnesyl pyrophosphate synthase [Malus x
  misc_feature (3)..(205): Homolog of NCBI NO: 1076319 NR Description: farnesyl-pyrophosphate synthetase FPS1 -
  misc_feature (3)..(205): Homolog of NCBI NO: 15238801 NR Description: farnesyl pyrophosphate synthetase 1 (FPS1)
  misc_feature (3)..(205): Homolog of NCBI NO: 1146159 NR Description: farnesyl diphosphate synthase short form
  misc_feature (1)..(205): Homolog of NCBI NO: 15236002 NR Description: farnesyl pyrophosphate synthetase 2 (FPS2)
MADLKSTFLDVYSVLKSDLLQDPSFEFTHESRQWLERMLDYNVRGGKLNRGLSVVDSYKLLKQGQDLTEKETFLSCALGWCIEWLQAYFLVLDDIMDNSVTRRGQPCWFRKPKVGMIAINDGILLRNHIHRILKKHFREMPYYVDLVDLFNEVEFQTACGQMIDLITTFDGEKDLSKYSLKSIGVLLSTKQLITHFIFLLLAHCSWREKIWKTILM

SEQ ID NO: 47093 - protein, 179 aa, Arabidopsis thaliana
  peptide (1)..(179): Ceres Seq. ID no. 14316568
  misc_feature (1)..(168): Pfam Name: Polyprenyl synthetase Pfam Description: Polyprenyl synthetase
  misc_feature (1)..(143): Homolog of NCBI NO: 14573639 NR Description: farnesyldiphosphate synthase [x Citrofortunella
  misc_feature (1)..(168): Homolog of NCBI NO: 1346029 NR Description: Farnesyl pyrophosphate synthetase 2 (FPP
  misc_feature (1)..(168): Homolog of NCBI NO: 1346028 NR Description: Farnesyl pyrophosphate synthetase 1 (FPP
  misc_feature (1)..(168): Homolog of NCBI NO: 1922251 NR Description: farnesyl pyrophosphate synthase [Gossypium
  misc_feature (1)..(168): Homolog of NCBI NO: 7433992 NR Description: farnesyl-pyrophosphate synthetase - Para rubber
  misc_feature (1)..(168): Homolog of NCBI NO: 20135548 NR Description: farnesyl pyrophosphate synthase [Malus x
  misc_feature (1)..(168): Homolog of NCBI NO: 1076319 NR Description: farnesyl-pyrophosphate synthetase FPS1 -
  misc_feature (1)..(168): Homolog of NCBI NO: 15238801 NR Description: farnesyl pyrophosphate synthetase 1 (FPS1)
  misc_feature (1)..(168): Homolog of NCBI NO: 1146159 NR Description: farnesyl diphosphate synthase short form
  misc_feature (1)..(168): Homolog of NCBI NO: 15236002 NR Description: farnesyl pyrophosphate synthetase 2 (FPS2)
MLDYNVRGGKLNRGLSVVDSYKLLKQGQDLTEKETFLSCALGWCIEWLQAYFLVLDDIMDNSVTRRGQPCWFRKPKVGMIAINDGILLRNHIHRILKKHFREMPYYVDLVDLFNEVEFQTACGQMIDLITTFDGEKDLSKYSLKSIGVLLSTKQLITHFIFLLLAHCSWREKIWKTILM

SEQ ID NO: 47094 - DNA, 1872 bp, Arabidopsis thaliana
  misc_feature (1)..(1872): Ceres Seq. ID no. 12601249
  misc_feature: MA Experiment ID: 20000306 Result: Down-regulated in Transcription
  misc_feature: MA Experiment 20000306 PARAMETER Experiment Name: At_Germinating_Seeds_Sub_P Parameter: Age (hr) Value: 6 vs. 0
  misc_feature: MA Experiment 20000306 PARAMETER Experiment Name: At_Germinating_Seeds_Sub_P Parameter: Organism Value: A. thaliana
  misc_feature: MA Experiment 20000306 PARAMETER Experiment Name: At_Germinating_Seeds_Sub_P Parameter: Plant Line Value: WS
  misc_feature: MA Experiment 20000306 PARAMETER Experiment Name: At_Germinating_Seeds_Sub_P Parameter: Tissue Value: Germinating Seeds
  misc_feature: MA Experiment ID: 20000307 Result: Down-regulated in Transcription
  misc_feature: MA Experiment 20000307 PARAMETER Experiment Name: At_Germinating_Seeds_Sub_P Parameter: Age (hr) Value: 24 vs. 0
  misc_feature: MA Experiment 20000307 PARAMETER Experiment Name: At_Germinating_Seeds_Sub_P Parameter: Organism Value: A. thaliana
  misc_feature: MA Experiment 20000307 PARAMETER Experiment Name: At_Germinating_Seeds_Sub_P Parameter: Plant Line Value: WS
  misc_feature: MA Experiment 20000307 PARAMETER Experiment Name: At_Germinating_Seeds_Sub_P Parameter: Tissue Value: Germinating Seeds
ggattgaaccctctctctctctctctgtttcttcgacgatctctttcgcaccgctcaatcatcctcccgattccgtaagtttcggttttgaatcgtttcttctcctctgccactatcgtcttcttctcggttttctatatcgttttagtttctttcaccgtcgtttcttttctctcccacgctcatccaattttcttcccctaaagaaccggaatttagtgtctgtgtgtgatggagtccagtagagtagtagtgggtggtgggctgcccttggcgaataggaggaactctagctttgccaaacccaaaatccaacaagggacttttctacctctatctcggatcaataatgtctctgccccccaaaaatgctcccttcacaccaatccaaaccccatgttcccttttgttactcgccgcaagagccagactaaccctgattgcggtgtcgtcaagttgggggaagaagatgactcttgctcttcactggacaaactcccggaggttaatggggttcacactggtgtagcacgtcctgtcgatatcaaacgagaactcgtgatgctctctcttccagccattgctggccaagctattgatcctttgacgctgctaatggagactgcatacatcggaaggctcggatctgtagagttgggttcagctggcgtttccatggccattttcaataccatatcaaagctcttcaacattccgctcctcagcgttgccacttctttcgtcgctgaagatattgcaaagattgccgctcaagatttagcctcagtgtcaacagcgctagtgttagccattggaattggcatcttcgaggcactggcattgtctttggcatctggaccctttctaaggttaatgggtatacaatctgtaagttcggtccagagaatgtcagaaatgttcatccctgcgcggcagtttcttgtccttagggcgcttggtgctcctgcttatgtggtttccttagcacttcaaggcatttttcgtggattcaaggatacaaaaactccagtctactgtttaggtattggtaattttctggctgtatttctattccctctgtttatatacaaattcaggatgggtgtagccggggcagcaatctctagtgtcatctcccagtacactgttgccattttgatgcttatactcttgaacaaaagagttatactgcttcctccaaagattgggtcactaaagttcggcgattacctaaaatcagggggatttgttctgggaaggactctttctgtgctcgtgaccatgactgttgccacatcaatggcggctcgtcagggagttttcgcaatggcagcacatcagatatgcatgcaagtgtggttggcggtatctctgcttactgatgcactagcttcatctggacaggccttgatcgcgagctctgcatccaaaagagactttgaaggtgtgaaagaggttactacttttgttctgaagataggagtggtgactgggatcgcactggctattgtgttggggatgtctttcagttcaatagctggtttgttttccaaagaccctgaagttctgcggattgtgagaaagggtgtattgtttgtagcggcgactcaaccaataacagcgctagcgtttatctttgatgggctgcactatgggatgtctgacttcccctacgcggcttgctcgatgatggtggtgggaggaatatcatcagcgttcatgctgtatgcaccggcagggttggggctaagtggagtgtgggtggggctgagcatgttcatgggattgcggatggtggctggattcagcagattaatgtggaggaagggtccatggtggttcatgcataccagtgacaagcgtcttgcttaa

SEQ ID NO: 47095 - protein, 546 aa, Arabidopsis thaliana
  peptide (1)..(546): Ceres Seq. ID no. 12601250
  misc_feature (107)..(317): Pfam Name: MviN-like protein Pfam Description: MviN-like protein
  misc_feature (181)..(527): Homolog of NCBI NO: 25405456 NR Description: hypothetical protein F11M15.20 [imported] -
  misc_feature (104)..(176): Homolog of NCBI NO: 37532300 NR Description: putative membrane protein
  misc_feature (181)..(528): Homolog of NCBI NO: 37532300 NR Description: putative membrane protein
  misc_feature (107)..(208): Homolog of NCBI NO: 15231918 NR Description: MATE efflux family protein, putative
  misc_feature (183)..(538): Homolog of NCBI NO: 15231918 NR Description: MATE efflux family protein, putative
  misc_feature (105)..(535): Homolog of NCBI NO: 7487160 NR Description: hypothetical protein At2g38330 [imported] -
  misc_feature (105)..(544): Homolog of NCBI NO: 30687474 NR Description: MATE efflux protein family [Arabidopsis thaliana]
  misc_feature (413)..(436): Homolog of NCBI NO: 15233839 NR Description: putative protein; protein id: At4g38380.1
  misc_feature (91)..(217): Homolog of NCBI NO: 15233839 NR Description: putative protein; protein id: At4g38380.1
  misc_feature (271)..(412): Homolog of NCBI NO: 15233839 NR Description: putative protein; protein id: At4g38380.1
MESSRVVVGGGLPLANRRNSSFAKPKIQQGTFLPLSRINNVSAPQKCSLHTNPNPMFPFVTRRKSQTNPDCGVVKLGEEDDSCSSLDKLPEVNGVHTGVARPVDIKRELVMLSLPAIAGQAIDPLTLLMETAYIGRLGSVELGSAGVSMAIFNTISKLFNIPLLSVATSFVAEDIAKIAAQDLASVSTALVLAIGIGIFEALALSLASGPFLRLMGIQSVSSVQRMSEMFIPARQFLVLRALGAPAYVVSLALQGIFRGFKDTKTPVYCLGIGNFLAVFLFPLFIYKFRMGVAGAAISSVISQYTVAILMLILLNKRVILLPPKIGSLKFGDYLKSGGFVLGRTLSVLVTMTVATSMAARQGVFAMAAHQICMQVWLAVSLLTDALASSGQALIASSASKRDFEGVKEVTTFVLKIGVVTGIALAIVLGMSFSSIAGLFSKDPEVLRIVRKGVLFVAATQPITALAFIFDGLHYGMSDFPYAACSMMVVGGISSAFMLYAPAGLGLSGVWVGLSMFMGLRMVAGFSRLMWRKGPWWFMHTSDKRLA

SEQ ID NO: 47096 - protein, 491 aa, Arabidopsis thaliana
  peptide (1)..(491): Ceres Seq. ID no. 12601251
  misc_feature (52)..(262): Pfam Name: MviN-like protein Pfam Description: MviN-like protein
  misc_feature (126)..(472): Homolog of NCBI NO: 25405456 NR Description: hypothetical protein F11M15.20 [imported] -
  misc_feature (49)..(121): Homolog of NCBI NO: 37532300 NR Description: putative membrane protein
  misc_feature (126)..(473): Homolog of NCBI NO: 37532300 NR Description: putative membrane protein
  misc_feature (52)..(153): Homolog of NCBI NO: 15231918 NR Description: MATE efflux family protein, putative
  misc_feature (128)..(483): Homolog of NCBI NO: 15231918 NR Description: MATE efflux family protein, putative
  misc_feature (50)..(480): Homolog of NCBI NO: 7487160 NR Description: hypothetical protein At2g38330 [imported] -
  misc_feature (50)..(489): Homolog of NCBI NO: 30687474 NR Description: MATE efflux protein family [Arabidopsis thaliana]
  misc_feature (358)..(381): Homolog of NCBI NO: 15233839 NR Description: putative protein; protein id: At4g38380.1
  misc_feature (36)..(162): Homolog of NCBI NO: 15233839 NR Description: putative protein; protein id: At4g38380.1
  misc_feature (216)..(357): Homolog of NCBI NO: 15233839 NR Description: putative protein; protein id: At4g38380.1
MFPFVTRRKSQTNPDCGVVKLGEEDDSCSSLDKLPEVNGVHTGVARPVDIKRELVMLSLPAIAGQAIDPLTLLMETAYIGRLGSVELGSAGVSMAIFNTISKLFNIPLLSVATSFVAEDIAKIAAQDLASVSTALVLAIGIGIFEALALSLASGPFLRLMGIQSVSSVQRMSEMFIPARQFLVLRALGAPAYVVSLALQGIFRGFKDTKTPVYCLGIGNFLAVFLFPLFIYKFRMGVAGAAISSVISQYTVAILMLILLNKRVILLPPKIGSLKFGDYLKSGGFVLGRTLSVLVTMTVATSMAARQGVFAMAAHQICMQVWLAVSLLTDALASSGQALIASSASKRDFEGVKEVTTFVLKIGVVTGIALAIVLGMSFSSIAGLFSKDPEVLRIVRKGVLFVAATQPITALAFIFDGLHYGMSDFPYAACSMMVVGGISSAFMLYAPAGLGLSGVWVGLSMFMGLRMVAGFSRLMWRKGPWWFMHTSDKRLA

SEQ ID NO: 47097 - protein, 436 aa, Arabidopsis thaliana
  peptide (1)..(436): Ceres Seq. ID no. 12601252
  misc_feature (1)..(207): Pfam Name: MviN-like protein Pfam Description: MviN-like protein
  misc_feature (71)..(417): Homolog of NCBI NO: 25405456 NR Description: hypothetical protein F11M15.20 [imported] -
  misc_feature (1)..(66): Homolog of NCBI NO: 37532300 NR Description: putative membrane protein
  misc_feature (71)..(418): Homolog of NCBI NO: 37532300 NR Description: putative membrane protein
  misc_feature (1)..(98): Homolog of NCBI NO: 15231918 NR Description: MATE efflux family protein, putative
  misc_feature (73)..(428): Homolog of NCBI NO: 15231918 NR Description: MATE efflux family protein, putative
  misc_feature (1)..(425): Homolog of NCBI NO: 7487160 NR Description: hypothetical protein At2g38330 [imported] -
  misc_feature (1)..(434): Homolog of NCBI NO: 30687474 NR Description: MATE efflux protein family [Arabidopsis thaliana]
  misc_feature (303)..(326): Homolog of NCBI NO: 15233839 NR Description: putative protein; protein id: At4g38380.1
  misc_feature (1)..(107): Homolog of NCBI NO: 15233839 NR Description: putative protein; protein id: At4g38380.1
  misc_feature (161)..(302): Homolog of NCBI NO: 15233839 NR Description: putative protein; protein id: At4g38380.1
MLSLPAIAGQAIDPLTLLMETAYIGRLGSVELGSAGVSMAIFNTISKLFNIPLLSVATSFVAEDIAKIAAQDLASVSTALVLAIGIGIFEALALSLASGPFLRLMGIQSVSSVQRMSEMFIPARQFLVLRALGAPAYVVSLALQGIFRGFKDTKTPVYCLGIGNFLAVFLFPLFIYKFRMGVAGAAISSVISQYTVAILMLILLNKRVILLPPKIGSLKFGDYLKSGGFVLGRTLSVLVTMTVATSMAARQGVFAMAAHQICMQVWLAVSLLTDALASSGQALIASSASKRDFEGVKEVTTFVLKIGVVTGIALAIVLGMSFSSIAGLFSKDPEVLRIVRKGVLFVAATQPITALAFIFDGLHYGMSDFPYAACSMMVVGGISSAFMLYAPAGLGLSGVWVGLSMFMGLRMVAGFSRLMWRKGPWWFMHTSDKRLA

SEQ ID NO: 47098 - DNA, 3249 bp, Arabidopsis thaliana
  misc_feature (1)..(3249): Ceres Seq. ID no. 13578479
  misc_feature: MA Experiment ID: 20000171 Result: Down-regulated in Transcription
  misc_feature: MA Experiment 20000171 PARAMETER Experiment Name: At_42deg_Heat_P Parameter: Age (day) Value: 14
  misc_feature: MA Experiment 20000171 PARAMETER Experiment Name: At_42deg_Heat_P Parameter: Organism Value: A. thaliana
  misc_feature: MA Experiment 20000171 PARAMETER Experiment Name: At_42deg_Heat_P Parameter: Plant Line Value: WS
  misc_feature: MA Experiment 20000171 PARAMETER Experiment Name: At_42deg_Heat_P Parameter: Temperature (deg C) Value: 42 vs. 22
  misc_feature: MA Experiment 20000171 PARAMETER Experiment Name: At_42deg_Heat_P Parameter: Timepoint (hr) Value: 1
  misc_feature: MA Experiment 20000171 PARAMETER Experiment Name: At_42deg_Heat_P Parameter: Tissue Value: Aerial
  misc_feature: MA Experiment ID: 20000173 Result: Down-regulated in Transcription
  misc_feature: MA Experiment 20000173 PARAMETER Experiment Name: At_42deg_Heat_P Parameter: Age (day) Value: 14
  misc_feature: MA Experiment 20000173 PARAMETER Experiment Name: At_42deg_Heat_P Parameter: Organism Value: A. thaliana
  misc_feature: MA Experiment 20000173 PARAMETER Experiment Name: At_42deg_Heat_P Parameter: Plant Line Value: WS
  misc_feature: MA Experiment 20000173 PARAMETER Experiment Name: At_42deg_Heat_P Parameter: Temperature (deg C) Value: 42 vs. 22
  misc_feature: MA Experiment 20000173 PARAMETER Experiment Name: At_42deg_Heat_P Parameter: Timepoint (hr) Value: 6
  misc_feature: MA Experiment 20000173 PARAMETER Experiment Name: At_42deg_Heat_P Parameter: Tissue Value: Aerial
  misc_feature: MA Experiment ID: 20000180 Result: Up-regulated in Transcription
  misc_feature: MA Experiment 20000180 PARAMETER Experiment Name: At_Germinating_Seeds_P Parameter: Age (hr) Value: 24 vs. 0
  misc_feature: MA Experiment 20000180 PARAMETER Experiment Name: At_Germinating_Seeds_P Parameter: Tissue Value: Germinating Seeds
  misc_feature: MA Experiment ID: 20000182 Result: Down-regulated in Transcription
  misc_feature: MA Experiment 20000182 PARAMETER Experiment Name: At_2mM_SA_P Parameter: Age (day) Value: 14
  misc_feature: MA Experiment 20000182 PARAMETER Experiment Name: At_2mM_SA_P Parameter: Organism Value: A. thaliana
  misc_feature: MA Experiment 20000182 PARAMETER Experiment Name: At_2mM_SA_P Parameter: Plant Line Value: WS
  misc_feature: MA Experiment 20000182 PARAMETER Experiment Name: At_2mM_SA_P Parameter: Timepoint (hr) Value: 6
  misc_feature: MA Experiment 20000182 PARAMETER Experiment Name: At_2mM_SA_P Parameter: Tissue Value: Aerial
  misc_feature: MA Experiment 20000182 PARAMETER Experiment Name: At_2mM_SA_P Parameter: Treatment Value: 2mM SA vs. No Treatment
  misc_feature: MA Experiment ID: 20000185 Result: Down-regulated in Transcription
  misc_feature: MA Experiment 20000185 PARAMETER Experiment Name: At_Roots__P Parameter: Age (day) Value: 7 vs. 21
  misc_feature: MA Experiment 20000185 PARAMETER Experiment Name: At_Roots__P Parameter: Organism Value: A. thaliana
  misc_feature: MA Experiment 20000185 PARAMETER Experiment Name: At_Roots__P Parameter: Tissue Value: Roots vs. Whole Plant
  misc_feature: MA Experiment ID: 20000234 Result: Down-regulated in Transcription
  misc_feature: MA Experiment 20000234 PARAMETER Experiment Name: At_Siliques_P Parameter: Age (day) Value: 21
  misc_feature: MA Experiment 20000234 PARAMETER Experiment Name: At_Siliques_P Parameter: Organism Value: A. thaliana
  misc_feature: MA Experiment 20000234 PARAMETER Experiment Name: At_Siliques_P Parameter: Plant Line Value: WS
  misc_feature: MA Experiment 20000234 PARAMETER Experiment Name: At_Siliques_P Parameter: Tissue Value: Less Than 5mm Siliques vs. Whole Plant
  misc_feature: MA Experiment ID: 20000264 Result: Down-regulated in Transcription
  misc_feature: MA Experiment 20000264 PARAMETER Experiment Name: At_Open_Flower_P Parameter: Age (day) Value: 21
  misc_feature: MA Experiment 20000264 PARAMETER Experiment Name: At_Open_Flower_P Parameter: Plant Line Value: WS
  misc_feature: MA Experiment 20000264 PARAMETER Experiment Name: At_Open_Flower_P Parameter: Tissue Value: Open Flower vs. Whole Plant
  misc_feature: MA Experiment ID: 20000265 Result: Down-regulated in Transcription
  misc_feature: MA Experiment 20000265 PARAMETER Experiment Name: At_Open_Flower_P Parameter: Age (day) Value: 21
  misc_feature: MA Experiment 20000265 PARAMETER Experiment Name: At_Open_Flower_P Parameter: Plant Line Value: WS
  misc_feature: MA Experiment 20000265 PARAMETER Experiment Name: At_Open_Flower_P Parameter: Tissue Value: Closed Flower vs. Whole Plant
  misc_feature: MA Experiment ID: 20000286 Result: Down-regulated in Transcription
  misc_feature: MA Experiment 20000286 PARAMETER Experiment Name: At_Open_Flower_P Parameter: Age (day) Value: 21
  misc_feature: MA Experiment 20000286 PARAMETER Experiment Name: At_Open_Flower_P Parameter: Plant Line Value: WS
  misc_feature: MA Experiment 20000286 PARAMETER Experiment Name: At_Open_Flower_P Parameter: Tissue Value: Half Open vs. Whole Plant
  misc_feature: MA Experiment ID: 20000438 Result: Up-regulated in Transcription
  misc_feature: MA Experiment 20000438 PARAMETER Experiment Name: At_Shoots__P Parameter: Age (day) Value: 14
  misc_feature: MA Experiment 20000438 PARAMETER Experiment Name: At_Shoots__P Parameter: Tissue Value: Shoots vs. Whole Plant
  misc_feature: MA Experiment ID: 20000439 Result: Down-regulated in Transcription
  misc_feature: MA Experiment 20000439 PARAMETER Experiment Name: At_Roots__P Parameter: Age (day) Value: 14 vs. 21
  misc_feature: MA Experiment 20000439 PARAMETER Experiment Name: At_Roots__P Parameter: Organism Value: A. thaliana
  misc_feature: MA Experiment 20000439 PARAMETER Experiment Name: At_Roots__P Parameter: Tissue Value: Roots vs. Whole Plant
  misc_feature: MA Experiment ID: 20000794 Result: Down-regulated in Transcription
  misc_feature: MA Experiment 20000794 PARAMETER Experiment Name: At_Petals_P Parameter: Age (day) Value: 23-25 days
  misc_feature: MA Experiment 20000794 PARAMETER Experiment Name: At_Petals_P Parameter: Plant Line Value: WS
  misc_feature: MA Experiment 20000794 PARAMETER Experiment Name: At_Petals_P Parameter: Tissue Value: Petals vs. Whole plant
  misc_feature: MA Experiment ID: 20001450 Result: Up-regulated in Transcription
  misc_feature: MA Experiment 20001450 PARAMETER Experiment Name: At_Far-red-induction_P Parameter: Age (day) Value: 7
  misc_feature: MA Experiment 20001450 PARAMETER Experiment Name: At_Far-red-induction_P Parameter: Light Value: Far-red vs. White
  misc_feature: MA Experiment 20001450 PARAMETER Experiment Name: At_Far-red-induction_P Parameter: Organism Value: A. thaliana
  misc_feature: MA Experiment 20001450 PARAMETER Experiment Name: At_Far-red-induction_P Parameter: Plant Line Value: Columbia
  misc_feature: MA Experiment 20001450 PARAMETER Experiment Name: At_Far-red-induction_P Parameter: Timepoint (hr) Value: 8
  misc_feature: MA Experiment 20001450 PARAMETER Experiment Name: At_Far-red-induction_P Parameter: Tissue Value: Whole Plant
  misc_feature: MA Experiment ID: 20001557 Result: Down-regulated in Transcription
  misc_feature: MA Experiment 20001557 PARAMETER Experiment Name: At_Drought_Soil_Dry_P Parameter: Age (day) Value: 27
  misc_feature: MA Experiment 20001557 PARAMETER Experiment Name: At_Drought_Soil_Dry_P Parameter: Organism Value: A. thaliana
  misc_feature: MA Experiment 20001557 PARAMETER Experiment Name: At_Drought_Soil_Dry_P Parameter: Plant Line Value: WS
  misc_feature: MA Experiment 20001557 PARAMETER Experiment Name: At_Drought_Soil_Dry_P Parameter: Post Timepoint (hr) Value: 3
  misc_feature: MA Experiment 20001557 PARAMETER Experiment Name: At_Drought_Soil_Dry_P Parameter: Post-Treatment Value: Re-Water vs. No Drought
  misc_feature: MA Experiment 20001557 PARAMETER Experiment Name: At_Drought_Soil_Dry_P Parameter: Timepoint (day) Value: 13
  misc_feature: MA Experiment 20001557 PARAMETER Experiment Name: At_Drought_Soil_Dry_P Parameter: Treatment Value: Drought vs. No Drought
  misc_feature: MA Experiment ID: 20001560 Result: Down-regulated in Transcription
  misc_feature: MA Experiment 20001560 PARAMETER Experiment Name: At_Drought_Soil_Dry_P Parameter: Age (day) Value: 28
  misc_feature: MA Experiment 20001560 PARAMETER Experiment Name: At_Drought_Soil_Dry_P Parameter: Organism Value: A. thaliana
  misc_feature: MA Experiment 20001560 PARAMETER Experiment Name: At_Drought_Soil_Dry_P Parameter: Plant Line Value: WS
  misc_feature: MA Experiment 20001560 PARAMETER Experiment Name: At_Drought_Soil_Dry_P Parameter: Post Timepoint (hr) Value: None
  misc_feature: MA Experiment 20001560 PARAMETER Experiment Name: At_Drought_Soil_Dry_P Parameter: Post-Treatment Value: None
  misc_feature: MA Experiment 20001560 PARAMETER Experiment Name: At_Drought_Soil_Dry_P Parameter: Timepoint (day) Value: 14
  misc_feature: MA Experiment 20001560 PARAMETER Experiment Name: At_Drought_Soil_Dry_P Parameter: Treatment Value: Drought vs. No Drought
  misc_feature: MA Experiment ID: 20001904 Result: Down-regulated in Transcription
  misc_feature: MA Experiment 20001904 PARAMETER Experiment Name: At_Drought_Reproduction_P Parameter: Age (day) Value: 37
  misc_feature: MA Experiment 20001904 PARAMETER Experiment Name: At_Drought_Reproduction_P Parameter: Organism Value: A. thaliana
  misc_feature: MA Experiment 20001904 PARAMETER Experiment Name: At_Drought_Reproduction_P Parameter: Plant Line Value: WS
  misc_feature: MA Experiment 20001904 PARAMETER Experiment Name: At_Drought_Reproduction_P Parameter: Timepoint (day) Value: 7
  misc_feature: MA Experiment 20001904 PARAMETER Experiment Name: At_Drought_Reproduction_P Parameter: Tissue Value: Rosettes
  misc_feature: MA Experiment 20001904 PARAMETER Experiment Name: At_Drought_Reproduction_P Parameter: Treatment Value: Drought vs. No Drought
ggaaaaatcgaaggataatctgtttcttccagcacaagttaacttgcaagagagagctcaaagatggaaccaacagaaaaaccatcgaccaaaccatcttctcggactctacctagagacactcgtggctctctcgaagtattcaacccgtcaactcagctgacccgacccgataacccggtgttccgtcctgaaccaccagcgtggcaaaacttgagtgatccacgtggcaccagtcctcaaccccgaccacaacaagaaccagctccatccaaccctgttcggtctgatcaagaaatcgctgtcacgacctcatggatggctctgaaagacccatcaccggagacaatctccaagaagacgatcaccgccgagaaaccacagaagtcggcggtggcggctgagcagagagcggcagagtggggattggttttgaagaccgatacaaagacgggaaagccacaaggagtaggcgtgaggaactctggtggaactgagaatgatcctaacgggaaaaagactacatcgcagagaaactcgcaaaactcttgccggagctccggtgagatgtcggacggagatgttcccggcgggaggagtgggattccaagagtatcggaagatctaaaagatgcgttgtcgacgtttcaacaaacgtttgtggtctcagatgctacaaaacctgattatccgattatgtatgcaagtgctggtttcttcaatatgactggttacacttccaaagaagtcgtcggcagaaactgccgatttttacaaggatcaggtacagatgcagatgagttagcaaagataagagagacattagctgctggtaacaattattgtgggcgtatattgaattacaagaaagatgggacctctttttggaatcttctcacgattgctcccattaaagacgagagtggcaaagtcctcaaatttatcggaatgcaagtggaggtgagcaagcacactgaaggggccaaagaaaaggctttgaggcccaatgggcttccggaatctctgattcgatacgatgcccgccaaaaagatatggcgacaaactcagtgacagagctagtagaggcggtgaagagacctcgggcactaagcgaatcgacgaatctccatcccttcatgacaaaatcggagagcgatgaacttccgaaaaaaccagctcggcgaatgtccgaaaatgttgttccgtcaggccgaagaaactctggcggcggaagaagaaactcgatgcagcgaatcaacgaaattcccgagaaaaaatctagaaaatcttccctttccttcatggggatcaagaagaagagcgaatctttggatgaatctatagacgatggatttatagagtatggagaagaagacgatgagattagtgatagggacgagagacctgagagtgtggatgataaagtgagacaaaaggaaatgagaaagggtattgatctagctactacactcgaacgtatcgagaagaatttcgtcatcactgatcctaggcttcccgataatcccattatttttgcatctgatagtttcttggagctcacggaatatagccgtgaagaaattcttggaagaaattgcaggtttctacaaggtccagagactgatctaaccacagtgaagaagattcgaaatgctattgataaccaaaccgaagtgacagttcagctcatcaactacaccaagagcggaaagaagttctggaacattttccacttgcaacctatgcgtgatcagaagggagaagtacaatactttattggagttcaactagacgggagcaagcacgtagaaccagttcgcaatgtcattgaagaaaccgcagtgaaagagggagaagacctggtgaaaaaaacagctgtgaatatcgatgaagcggttcgagaacttcctgatgccaacatgacaccagaggatttatgggcaaaccactcaaaggttgttcattgtaagcctcacaggaaagattcaccaccatggatagctatccaaaaggtgttggaaagtggtgaaccgattggtttgaagcatttcaaaccggtgaaacctttgggttctggtgacacaggaagtgtgcatctagtggaactcgttggaacagatcagttgtttgcaatgaaagcaatggacaaggctgttatgcttaaccgaaacaaagtacatagagctagagctgagagagagatcctagatttgcttgaccatccttttcttcctgcactctacgcttcttttcagacaaaaacacatatatgtcttataacagattactatccaggaggagaactcttcatgctcctagatcgacaacctaggaaggttctcaaagaagatgctgtaagattctatgctgctcaagttgtcgttgcactcgagtatcttcactgtcaaggaataatttaccgagacttgaaaccggaaaacgttttaatccaaggcaatggcgatatctctttgtcggattttgatctgtcttgcttgacatcttgcaaacctcagctgttgattccgagtatagacgagaagaagaagaaaaagcaacaaaagagtcaacaaactccaatcttcatggctgaaccaatgcgtgcatcaaactcatttgttggcactgaagagtacattgctccggaaattatatccggagcaggacatacgagtgcagtagactggtgggctcttggtatacttatgtatgaaatgttatacggatacactccttttagaggaaaaacaagacagaagactttcaccaatgttcttcaaaaagatctcaagtttccagctagcattcctgcaagtcttcaagtgaaacagctgatttttaggctgttacaacgagatccgaagaaaagactaggttgttttgaaggagcaaatgaagtcaagcaacattctttcttcaaaggcataaattgggctctgattcgatgcacgaaccctccagagctcgagactccgatattttctggtgaagctgaaaacggagagaaagttgttgatcctgagctagaagatctgcaaacaaatgttttttgagatttggactaaacgtttatcgttttcttttcaagaattgttggaaactctttgttctccaaaaatctcgtttttaattattttcattttaccattatctttatttatttataatgccaagtgtttctaataatttgtgtgagtttcttaagaatatgttttttatatatgtcaataaaattaatcaagttttgc

SEQ ID NO: 47099 - protein, 996 aa, Arabidopsis thaliana
  peptide (1)..(996): Ceres Seq. ID no. 13578480
  misc_feature (663)..(952): Pfam Name: Protein kinase domain Pfam Description: Protein kinase domain
  misc_feature (663)..(952): Pfam Name: Protein kinase domain Pfam Description: Protein kinase domain
  misc_feature (618)..(814): Homolog of NCBI NO: 15238798 NR Description: protein kinase, putative [Arabidopsis thaliana]
  misc_feature (171)..(668): Homolog of NCBI NO: 27807565 NR Description: phytochrome 3 [Onoclea sensibilis]
  misc_feature (172)..(668): Homolog of NCBI NO: 27807561 NR Description: phytochrome 3 [Dryopteris filix-mas]
  misc_feature (29)..(488): Homolog of NCBI NO: 34224025 NR Description: phototropin-like protein [Pisum sativum]
  misc_feature (190)..(961): Homolog of NCBI NO: 7522091 NR Description: PHY3 protein - maidenhair fern
  misc_feature (618)..(814): Homolog of NCBI NO: 15238798 NR Description: protein kinase, putative [Arabidopsis thaliana]
  misc_feature (172)..(668): Homolog of NCBI NO: 27807561 NR Description: phytochrome 3 [Dryopteris filix-mas]
  misc_feature (190)..(961): Homolog of NCBI NO: 7522091 NR Description: PHY3 protein - maidenhair fern
  misc_feature (148)..(972): Homolog of NCBI NO: 7489818 NR Description: serine/threonine protein kinase (EC 2.7.1.-),
  misc_feature (449)..(996): Homolog of NCBI NO: 30697007 NR Description: non phototropic hypocotyl 1-related [Arabidopsis
  misc_feature (62)..(384): Homolog of NCBI NO: 30697007 NR Description: non phototropic hypocotyl 1-related [Arabidopsis
  misc_feature (102)..(985): Homolog of NCBI NO: 7804485 NR Description: phototropin [Adiantum capillus-veneris]
  misc_feature (190)..(961): Homolog of NCBI NO: 19570333 NR Description: PHY3 [Adiantum capillus-veneris]
  misc_feature (29)..(488): Homolog of NCBI NO: 34224025 NR Description: phototropin-like protein [Pisum sativum]
  misc_feature (171)..(668): Homolog of NCBI NO: 27807565 NR Description: phytochrome 3 [Onoclea sensibilis]
  misc_feature (190)..(961): Homolog of NCBI NO: 19570333 NR Description: PHY3 [Adiantum capillus-veneris]
  misc_feature (102)..(985): Homolog of NCBI NO: 7804485 NR Description: phototropin [Adiantum capillus-veneris]
  misc_feature (62)..(384): Homolog of NCBI NO: 30697007 NR Description: non phototropic hypocotyl 1-related [Arabidopsis
  misc_feature (449)..(996): Homolog of NCBI NO: 30697007 NR Description: non phototropic hypocotyl 1-related [Arabidopsis
  misc_feature (148)..(972): Homolog of NCBI NO: 7489818 NR Description: serine/threonine protein kinase (EC 2.7.1.-),
MEPTEKPSTKPSSRTLPRDTRGSLEVFNPSTQLTRPDNPVFRPEPPAWQNLSDPRGTSPQPRPQQEPAPSNPVRSDQEIAVTTSWMALKDPSPETISKKTITAEKPQKSAVAAEQRAAEWGLVLKTDTKTGKPQGVGVRNSGGTENDPNGKKTTSQRNSQNSCRSSGEMSDGDVPGGRSGIPRVSEDLKDALSTFQQTFVVSDATKPDYPIMYASAGFFNMTGYTSKEVVGRNCRFLQGSGTDADELAKIRETLAAGNNYCGRILNYKKDGTSFWNLLTIAPIKDESGKVLKFIGMQVEVSKHTEGAKEKALRPNGLPESLIRYDARQKDMATNSVTELVEAVKRPRALSESTNLHPFMTKSESDELPKKPARRMSENVVPSGRRNSGGGRRNSMQRINEIPEKKSRKSSLSFMGIKKKSESLDESIDDGFIEYGEEDDEISDRDERPESVDDKVRQKEMRKGIDLATTLERIEKNFVITDPRLPDNPIIFASDSFLELTEYSREEILGRNCRFLQGPETDLTTVKKIRNAIDNQTEVTVQLINYTKSGKKFWNIFHLQPMRDQKGEVQYFIGVQLDGSKHVEPVRNVIEETAVKEGEDLVKKTAVNIDEAVRELPDANMTPEDLWANHSKVVHCKPHRKDSPPWIAIQKVLESGEPIGLKHFKPVKPLGSGDTGSVHLVELVGTDQLFAMKAMDKAVMLNRNKVHRARAEREILDLLDHPFLPALYASFQTKTHICLITDYYPGGELFMLLDRQPRKVLKEDAVRFYAAQVVVALEYLHCQGIIYRDLKPENVLIQGNGDISLSDFDLSCLTSCKPQLLIPSIDEKKKKKQQKSQQTPIFMAEPMRASNSFVGTEEYIAPEIISGAGHTSAVDWWALGILMYEMLYGYTPFRGKTRQKTFTNVLQKDLKFPASIPASLQVKQLIFRLLQRDPKKRLGCFEGANEVKQHSFFKGINWALIRCTNPPELETPIFSGEAENGEKVVDPELEDLQTNVF

SEQ ID NO: 47100 - protein, 911 aa, Arabidopsis thaliana
  peptide (1)..(911): Ceres Seq. ID no. 13578481
  misc_feature (578)..(867): Pfam Name: Protein kinase domain Pfam Description: Protein kinase domain
  misc_feature (578)..(867): Pfam Name: Protein kinase domain Pfam Description: Protein kinase domain
  misc_feature (533)..(729): Homolog of NCBI NO: 15238798 NR Description: protein kinase, putative [Arabidopsis thaliana]
  misc_feature (86)..(583): Homolog of NCBI NO: 27807565 NR Description: phytochrome 3 [Onoclea sensibilis]
  misc_feature (87)..(583): Homolog of NCBI NO: 27807561 NR Description: phytochrome 3 [Dryopteris filix-mas]
  misc_feature (1)..(403): Homolog of NCBI NO: 34224025 NR Description: phototropin-like protein [Pisum sativum]
  misc_feature (105)..(876): Homolog of NCBI NO: 7522091 NR Description: PHY3 protein - maidenhair fern
  misc_feature (533)..(729): Homolog of NCBI NO: 15238798 NR Description: protein kinase, putative [Arabidopsis thaliana]
  misc_feature (87)..(583): Homolog of NCBI NO: 27807561 NR Description: phytochrome 3 [Dryopteris filix-mas]
  misc_feature (105)..(876): Homolog of NCBI NO: 7522091 NR Description: PHY3 protein - maidenhair fern
  misc_feature (63)..(887): Homolog of NCBI NO: 7489818 NR Description: serine/threonine protein kinase (EC 2.7.1.-),
  misc_feature (364)..(911): Homolog of NCBI NO: 30697007 NR Description: non phototropic hypocotyl 1-related [Arabidopsis
  misc_feature (1)..(299): Homolog of NCBI NO: 30697007 NR Description: non phototropic hypocotyl 1-related [Arabidopsis
  misc_feature (17)..(900): Homolog of NCBI NO: 7804485 NR Description: phototropin [Adiantum capillus-veneris]
  misc_feature (105)..(876): Homolog of NCBI NO: 19570333 NR Description: PHY3 [Adiantum capillus-veneris]
  misc_feature (1)..(403): Homolog of NCBI NO: 34224025 NR Description: phototropin-like protein [Pisum sativum]
  misc_feature (86)..(583): Homolog of NCBI NO: 27807565 NR Description: phytochrome 3 [Onoclea sensibilis]
  misc_feature (105)..(876): Homolog of NCBI NO: 19570333 NR Description: PHY3 [Adiantum capillus-veneris]
  misc_feature (17)..(900): Homolog of NCBI NO: 7804485 NR Description: phototropin [Adiantum capillus-veneris]
  misc_feature (1)..(299): Homolog of NCBI NO: 30697007 NR Description: non phototropic hypocotyl 1-related [Arabidopsis
  misc_feature (364)..(911): Homolog of NCBI NO: 30697007 NR Description: non phototropic hypocotyl 1-related [Arabidopsis
  misc_feature (63)..(887): Homolog of NCBI NO: 7489818 NR Description: serine/threonine protein kinase (EC 2.7.1.-),
MALKDPSPETISKKTITAEKPQKSAVAAEQRAAEWGLVLKTDTKTGKPQGVGVRNSGGTENDPNGKKTTSQRNSQNSCRSSGEMSDGDVPGGRSGIPRVSEDLKDALSTFQQTFVVSDATKPDYPIMYASAGFFNMTGYTSKEVVGRNCRFLQGSGTDADELAKIRETLAAGNNYCGRILNYKKDGTSFWNLLTIAPIKDESGKVLKFIGMQVEVSKHTEGAKEKALRPNGLPESLIRYDARQKDMATNSVTELVEAVKRPRALSESTNLHPFMTKSESDELPKKPARRMSENVVPSGRRNSGGGRRNSMQRINEIPEKKSRKSSLSFMGIKKKSESLDESIDDGFIEYGEEDDEISDRDERPESVDDKVRQKEMRKGIDLATTLERIEKNFVITDPRLPDNPIIFASDSFLELTEYSREEILGRNCRFLQGPETDLTTVKKIRNAIDNQTEVTVQLINYTKSGKKFWNIFHLQPMRDQKGEVQYFIGVQLDGSKHVEPVRNVIEETAVKEGEDLVKKTAVNIDEAVRELPDANMTPEDLWANHSKVVHCKPHRKDSPPWIAIQKVLESGEPIGLKHFKPVKPLGSGDTGSVHLVELVGTDQLFAMKAMDKAVMLNRNKVHRARAEREILDLLDHPFLPALYASFQTKTHICLITDYYPGGELFMLLDRQPRKVLKEDAVRFYAAQVVVALEYLHCQGIIYRDLKPENVLIQGNGDISLSDFDLSCLTSCKPQLLIPSIDEKKKKKQQKSQQTPIFMAEPMRASNSFVGTEEYIAPEIISGAGHTSAVDWWALGILMYEMLYGYTPFRGKTRQKTFTNVLQKDLKFPASIPASLQVKQLIFRLLQRDPKKRLGCFEGANEVKQHSFFKGINWALIRCTNPPELETPIFSGEAENGEKVVDPELEDLQTNVF

SEQ ID NO: 47101 - protein, 828 aa, Arabidopsis thaliana
  peptide (1)..(828): Ceres Seq. ID no. 13578482
  misc_feature (495)..(784): Pfam Name: Protein kinase domain Pfam Description: Protein kinase domain
  misc_feature (495)..(784): Pfam Name: Protein kinase domain Pfam Description: Protein kinase domain
  misc_feature (450)..(646): Homolog of NCBI NO: 15238798 NR Description: protein kinase, putative [Arabidopsis thaliana]
  misc_feature (3)..(500): Homolog of NCBI NO: 27807565 NR Description: phytochrome 3 [Onoclea sensibilis]
  misc_feature (4)..(500): Homolog of NCBI NO: 27807561 NR Description: phytochrome 3 [Dryopteris filix-mas]
  misc_feature (1)..(320): Homolog of NCBI NO: 34224025 NR Description: phototropin-like protein [Pisum sativum]
  misc_feature (22)..(793): Homolog of NCBI NO: 7522091 NR Description: PHY3 protein - maidenhair fern
  misc_feature (450)..(646): Homolog of NCBI NO: 15238798 NR Description: protein kinase, putative [Arabidopsis thaliana]
  misc_feature (4)..(500): Homolog of NCBI NO: 27807561 NR Description: phytochrome 3 [Dryopteris filix-mas]
  misc_feature (22)..(793): Homolog of NCBI NO: 7522091 NR Description: PHY3 protein - maidenhair fern
  misc_feature (1)..(804): Homolog of NCBI NO: 7489818 NR Description: serine/threonine protein kinase (EC 2.7.1.-),
  misc_feature (281)..(828): Homolog of NCBI NO: 30697007 NR Description: non phototropic hypocotyl 1-related [Arabidopsis
  misc_feature (1)..(216): Homolog of NCBI NO: 30697007 NR Description: non phototropic hypocotyl 1-related [Arabidopsis
  misc_feature (1)..(817): Homolog of NCBI NO: 7804485 NR Description: phototropin [Adiantum capillus-veneris]
  misc_feature (22)..(793): Homolog of NCBI NO: 19570333 NR Description: PHY3 [Adiantum capillus-veneris]
  misc_feature (1)..(320): Homolog of NCBI NO: 34224025 NR Description: phototropin-like protein [Pisum sativum]
  misc_feature (3)..(500): Homolog of NCBI NO: 27807565 NR Description: phytochrome 3 [Onoclea sensibilis]
  misc_feature (22)..(793): Homolog of NCBI NO: 19570333 NR Description: PHY3 [Adiantum capillus-veneris]
  misc_feature (1)..(817): Homolog of NCBI NO: 7804485 NR Description: phototropin [Adiantum capillus-veneris]
  misc_feature (1)..(216): Homolog of NCBI NO: 30697007 NR Description: non phototropic hypocotyl 1-related [Arabidopsis
  misc_feature (281)..(828): Homolog of NCBI NO: 30697007 NR Description: non phototropic hypocotyl 1-related [Arabidopsis
  misc_feature (1)..(804): Homolog of NCBI NO: 7489818 NR Description: serine/threonine protein kinase (EC 2.7.1.-),
MSDGDVPGGRSGIPRVSEDLKDALSTFQQTFVVSDATKPDYPIMYASAGFFNMTGYTSKEVVGRNCRFLQGSGTDADELAKIRETLAAGNNYCGRILNYKKDGTSFWNLLTIAPIKDESGKVLKFIGMQVEVSKHTEGAKEKALRPNGLPESLIRYDARQKDMATNSVTELVEAVKRPRALSESTNLHPFMTKSESDELPKKPARRMSENVVPSGRRNSGGGRRNSMQRINEIPEKKSRKSSLSFMGIKKKSESLDESIDDGFIEYGEEDDEISDRDERPESVDDKVRQKEMRKGIDLATTLERIEKNFVITDPRLPDNPIIFASDSFLELTEYSREEILGRNCRFLQGPETDLTTVKKIRNAIDNQTEVTVQLINYTKSGKKFWNIFHLQPMRDQKGEVQYFIGVQLDGSKHVEPVRNVIEETAVKEGEDLVKKTAVNIDEAVRELPDANMTPEDLWANHSKVVHCKPHRKDSPPWIAIQKVLESGEPIGLKHFKPVKPLGSGDTGSVHLVELVGTDQLFAMKAMDKAVMLNRNKVHRARAEREILDLLDHPFLPALYASFQTKTHICLITDYYPGGELFMLLDRQPRKVLKEDAVRFYAAQVVVALEYLHCQGIIYRDLKPENVLIQGNGDISLSDFDLSCLTSCKPQLLIPSIDEKKKKKQQKSQQTPIFMAEPMRASNSFVGTEEYIAPEIISGAGHTSAVDWWALGILMYEMLYGYTPFRGKTRQKTFTNVLQKDLKFPASIPASLQVKQLIFRLLQRDPKKRLGCFEGANEVKQHSFFKGINWALIRCTNPPELETPIFSGEAENGEKVVDPELEDLQTNVF

SEQ ID NO: 47102 - DNA, 2517 bp, Arabidopsis thaliana
  misc_feature (1)..(2517): Ceres Seq. ID no. 14310218
  misc_feature: MA Experiment ID: 20000184 Result: Down-regulated in Transcription
  misc_feature: MA Experiment 20000184 PARAMETER Experiment Name: At_Shoots__P Parameter: Age (day) Value: 7
  misc_feature: MA Experiment 20000184 PARAMETER Experiment Name: At_Shoots__P Parameter: Tissue Value: Shoots vs. Whole Plant
  misc_feature: MA Experiment ID: 20000496 Result: Up-regulated in Transcription
  misc_feature: MA Experiment 20000496 PARAMETER Experiment Name: At_Guard_Cells_P Parameter: Harvest Date Value: 7/19/2002
  misc_feature: MA Experiment 20000496 PARAMETER Experiment Name: At_Guard_Cells_P Parameter: Organism Value: Canola
  misc_feature: MA Experiment 20000496 PARAMETER Experiment Name: At_Guard_Cells_P Parameter: Tissue Value: Guard Cells vs. Leaves
  misc_feature: MA Experiment ID: 20001247 Result: Down-regulated in Transcription
  misc_feature: MA Experiment 20001247 PARAMETER Experiment Name: At_Far-red-induction_P Parameter: Age (day) Value: 7
  misc_feature: MA Experiment 20001247 PARAMETER Experiment Name: At_Far-red-induction_P Parameter: Light Value: Far-red vs. White
  misc_feature: MA Experiment 20001247 PARAMETER Experiment Name: At_Far-red-induction_P Parameter: Organism Value: A. thaliana
  misc_feature: MA Experiment 20001247 PARAMETER Experiment Name: At_Far-red-induction_P Parameter: Plant Line Value: Columbia
  misc_feature: MA Experiment 20001247 PARAMETER Experiment Name: At_Far-red-induction_P Parameter: Timepoint (hr) Value: 1
  misc_feature: MA Experiment 20001247 PARAMETER Experiment Name: At_Far-red-induction_P Parameter: Tissue Value: Whole Plant
  misc_feature: MA Experiment ID: 20001451 Result: Down-regulated in Transcription
  misc_feature: MA Experiment 20001451 PARAMETER Experiment Name: At_Far-red-induction_P Parameter: Age (day) Value: 7
  misc_feature: MA Experiment 20001451 PARAMETER Experiment Name: At_Far-red-induction_P Parameter: Light Value: Far-red vs. White
  misc_feature: MA Experiment 20001451 PARAMETER Experiment Name: At_Far-red-induction_P Parameter: Organism Value: A. thaliana
  misc_feature: MA Experiment 20001451 PARAMETER Experiment Name: At_Far-red-induction_P Parameter: Plant Line Value: Columbia
  misc_feature: MA Experiment 20001451 PARAMETER Experiment Name: At_Far-red-induction_P Parameter: Timepoint (hr) Value: 24
  misc_feature: MA Experiment 20001451 PARAMETER Experiment Name: At_Far-red-induction_P Parameter: Tissue Value: Whole Plant
agaattatcgggagaacttcagacatgctctgctccgaccgaatctcatcatctatcaatttcatgtgacttattaaattgttctgtattctaagaagtggttccgtagaagcggagcaatgccgatttctatggaacttccagttttctctactctccgagtaccattgttctctcgtttagctttacttcctacttttggagttccgttttcgtcccttggtgctacgacgcgattgaactgtacatctcgaaaggcgcgtcggatttgcgtgatgtgcttagtgagggattctgctccgatagagacgtgcgagagagctggagaagatgggtctgacgagttcattgaggttcttgtcatcggtagtcgcaaggagtctatcatggattcatgcttggattctccttttccttctcttcctctccgattttggagtattagcaaggacagctctggaggtttagtgttacagcagaggctcaatcaccaagataatgcctcgaagaccatgaatccaattgagctgttacagtcacgtccaagggccttcatccttgtttgtacttttctcgcctaacattgtggctagtgctggatatggttctgaccaggttgaagctattaatattcttagtgcagtaagatctgggggtaacttagctgttgctgtgctattaaagcctttcagctttgaaggccgaaagcgtctagaagaggttaacgagttggctagaaaactgcagcaacacaccaatttctgtatagatatcgacatagaggttttactacagaaggatttggtaactttggacgaggcgctgagaaatgcaaacaatgctgtgtctatggcaataaatgcagcttccgctctgataagtgggatgcatggaaacttcatcgatgtgatgcataaagatcttaaagaacttgaaggttcagaagttaaaacgattctagaaagttacaaagaggcaaaggttggttttggagttggtcacaaccttaagacttcgatattacgagctatatatgactgcccattctttcgacctggtctaaaggatctaaacgctattatatgcattgtggctagttcggtacctctccagaagaaagacgtgaaaacaattcttcgtactttccgtcaaactatggagtacactggagatattatagtatctactgttcatgagcctgatctggagcctaaagtgcgtgtcacaacgttttttattctaagttcttcagaagaggaaacatccaacaaaggcaacattttttctggtcttgttccttttgttttaaatatcttcacgagatatcgttcacagctccaaaaagaaacaaatattggacttggagagacgccagtttcaattaaagattcagcagactctactgacataaaaacttccaatcagaatgttgaggaatttgaaattgactctgaggacctcctggaagtttctgagaacggtgatgatagtgaatacccattaaaagagggggaaccatccagaaacagtcgtctggatcttaaagatgaaaatgtagaagattttggtgcaatccagagggagcctattgccaattggagtatggatcagggatatcagattgagcagaaatggcaagctgattctggagacactgcagtgcttagcctgggaattgtcaaccttcctgttggtgtgagaccttcgaagaaattgaacagtaatctcagtgttgccagtcaactctctaggaaggctgattccagagaagaatcatttttcaaccctaatggctcgacaaaagactctagtgatactgcatctaccctgctatctgagaaatatgctgattttacaaagcaaagaaatctatccgctcgagcatcgtctatgctggaagctgaacgagattcatcaaaaagatggagtcctattcttgagatgcagtacagaggaggacttttcaagggaagatgccaaggaggccttcccgaaggaaagggtcgtttggtacttggagatggaagcatatatgatggaatgtggcacaacggtaaaagatctggtctcggaacattctacttcaagaatggagacgtgttccaaggcacatggagagaagatttaatacacggaaagggttggttttatttgcacaaaggtgatcgatggtttgcaaatttctggaaaggaaaagccagtggcgaaggccggttctattcaaagtccggtgagatattctttggacatttcaaagatggttggcgccacggacaattcctctgtatagatttggatggaacaagatactctgaaacttgggacgacggtgttctcattgaccggaaacaagtggacgccggagattgatatcatccggcaatgctgtaactatatagtgcatatcgattttgtcttttctcaggttattattatgacaaaacgtgattcataaaaagtattcctgtgacttaaaaactccttttctttgattagatgtttaaaagaaacgaatta

SEQ ID NO: 47103 - protein, 506 aa, Arabidopsis thaliana
  peptide (1)..(506): Ceres Seq. ID no. 14310219
  misc_feature (464)..(486): Pfam Name: MORN repeat Pfam Description: MORN repeat
  misc_feature (369)..(495): Homolog of NCBI NO: 40062709 NR Description: MORN repeat protein [uncultured bacterium 314]
  misc_feature (364)..(502): Homolog of NCBI NO: 28211437 NR Description: putative phosphatidylinositol 4-phosphate
  misc_feature (369)..(493): Homolog of NCBI NO: 23508109 NR Description: hypothetical protein [Plasmodium falciparum 3D7]
  misc_feature (369)..(506): Homolog of NCBI NO: 25404297 NR Description: hypothetical protein T7P1.4 [imported] -
  misc_feature (369)..(506): Homolog of NCBI NO: 22330351 NR Description: phosphatidylinositol-4-phosphate 5-kinase
  misc_feature (369)..(491): Homolog of NCBI NO: 29346157 NR Description: putative phosphatidylinositol-4-phosphate
  misc_feature (1)..(430): Homolog of NCBI NO: 5882723 NR Description: F25A4.3 [Arabidopsis thaliana]
  misc_feature (1)..(471): Homolog of NCBI NO: 25406404 NR Description: hypothetical protein F9E10.14 [imported] -
  misc_feature (162)..(506): Homolog of NCBI NO: 25406404 NR Description: hypothetical protein F9E10.14 [imported] -
  misc_feature (162)..(506): Homolog of NCBI NO: 5882723 NR Description: F25A4.3 [Arabidopsis thaliana]
MAINAASALISGMHGNFIDVMHKDLKELEGSEVKTILESYKEAKVGFGVGHNLKTSILRAIYDCPFFRPGLKDLNAIICIVASSVPLQKKDVKTILRTFRQTMEYTGDIIVSTVHEPDLEPKVRVTTFFILSSSEEETSNKGNIFSGLVPFVLNIFTRYRSQLQKETNIGLGETPVSIKDSADSTDIKTSNQNVEEFEIDSEDLLEVSENGDDSEYPLKEGEPSRNSRLDLKDENVEDFGAIQREPIANWSMDQGYQIEQKWQADSGDTAVLSLGIVNLPVGVRPSKKLNSNLSVASQLSRKADSREESFFNPNGSTKDSSDTASTLLSEKYADFTKQRNLSARASSMLEAERDSSKRWSPILEMQYRGGLFKGRCQGGLPEGKGRLVLGDGSIYDGMWHNGKRSGLGTFYFKNGDVFQGTWREDLIHGKGWFYLHKGDRWFANFWKGKASGEGRFYSKSGEIFFGHFKDGWRHGQFLCIDLDGTRYSETWDDGVLIDRKQVDAGD

SEQ ID NO: 47104 - protein, 494 aa, Arabidopsis thaliana
  peptide (1)..(494): Ceres Seq. ID no. 14310220
  misc_feature (452)..(474): Pfam Name: MORN repeat Pfam Description: MORN repeat
  misc_feature (357)..(483): Homolog of NCBI NO: 40062709 NR Description: MORN repeat protein [uncultured bacterium 314]
  misc_feature (352)..(490): Homolog of NCBI NO: 28211437 NR Description: putative phosphatidylinositol 4-phosphate
  misc_feature (357)..(481): Homolog of NCBI NO: 23508109 NR Description: hypothetical protein [Plasmodium falciparum 3D7]
  misc_feature (357)..(494): Homolog of NCBI NO: 25404297 NR Description: hypothetical protein T7P1.4 [imported] -
  misc_feature (357)..(494): Homolog of NCBI NO: 22330351 NR Description: phosphatidylinositol-4-phosphate 5-kinase
  misc_feature (357)..(479): Homolog of NCBI NO: 29346157 NR Description: putative phosphatidylinositol-4-phosphate
  misc_feature (1)..(418): Homolog of NCBI NO: 5882723 NR Description: F25A4.3 [Arabidopsis thaliana]
  misc_feature (1)..(459): Homolog of NCBI NO: 25406404 NR Description: hypothetical protein F9E10.14 [imported] -
  misc_feature (150)..(494): Homolog of NCBI NO: 25406404 NR Description: hypothetical protein F9E10.14 [imported] -
  misc_feature (150)..(494): Homolog of NCBI NO: 5882723 NR Description: F25A4.3 [Arabidopsis thaliana]
MHGNFIDVMHKDLKELEGSEVKTILESYKEAKVGFGVGHNLKTSILRAIYDCPFFRPGLKDLNAIICIVASSVPLQKKDVKTILRTFRQTMEYTGDIIVSTVHEPDLEPKVRVTTFFILSSSEEETSNKGNIFSGLVPFVLNIFTRYRSQLQKETNIGLGETPVSIKDSADSTDIKTSNQNVEEFEIDSEDLLEVSENGDDSEYPLKEGEPSRNSRLDLKDENVEDFGAIQREPIANWSMDQGYQIEQKWQADSGDTAVLSLGIVNLPVGVRPSKKLNSNLSVASQLSRKADSREESFFNPNGSTKDSSDTASTLLSEKYADFTKQRNLSARASSMLEAERDSSKRWSPILEMQYRGGLFKGRCQGGLPEGKGRLVLGDGSIYDGMWHNGKRSGLGTFYFKNGDVFQGTWREDLIHGKGWFYLHKGDRWFANFWKGKASGEGRFYSKSGEIFFGHFKDGWRHGQFLCIDLDGTRYSETWDDGVLIDRKQVDAGD

SEQ ID NO: 47105 - protein, 486 aa, Arabidopsis thaliana
  peptide (1)..(486): Ceres Seq. ID no. 14310221
  misc_feature (444)..(466): Pfam Name: MORN repeat Pfam Description: MORN repeat
  misc_feature (349)..(475): Homolog of NCBI NO: 40062709 NR Description: MORN repeat protein [uncultured bacterium 314]
  misc_feature (344)..(482): Homolog of NCBI NO: 28211437 NR Description: putative phosphatidylinositol 4-phosphate
  misc_feature (349)..(473): Homolog of NCBI NO: 23508109 NR Description: hypothetical protein [Plasmodium falciparum 3D7]
  misc_feature (349)..(486): Homolog of NCBI NO: 25404297 NR Description: hypothetical protein T7P1.4 [imported] -
  misc_feature (349)..(486): Homolog of NCBI NO: 22330351 NR Description: phosphatidylinositol-4-phosphate 5-kinase
  misc_feature (349)..(471): Homolog of NCBI NO: 29346157 NR Description: putative phosphatidylinositol-4-phosphate
  misc_feature (1)..(410): Homolog of NCBI NO: 5882723 NR Description: F25A4.3 [Arabidopsis thaliana]
  misc_feature (1)..(451): Homolog of NCBI NO: 25406404 NR Description: hypothetical protein F9E10.14 [imported] -
  misc_feature (142)..(486): Homolog of NCBI NO: 25406404 NR Description: hypothetical protein F9E10.14 [imported] -
  misc_feature (142)..(486): Homolog of NCBI NO: 5882723 NR Description: F25A4.3 [Arabidopsis thaliana]
MHKDLKELEGSEVKTILESYKEAKVGFGVGHNLKTSILRAIYDCPFFRPGLKDLNAIICIVASSVPLQKKDVKTILRTFRQTMEYTGDIIVSTVHEPDLEPKVRVTTFFILSSSEEETSNKGNIFSGLVPFVLNIFTRYRSQLQKETNIGLGETPVSIKDSADSTDIKTSNQNVEEFEIDSEDLLEVSENGDDSEYPLKEGEPSRNSRLDLKDENVEDFGAIQREPIANWSMDQGYQIEQKWQADSGDTAVLSLGIVNLPVGVRPSKKLNSNLSVASQLSRKADSREESFFNPNGSTKDSSDTASTLLSEKYADFTKQRNLSARASSMLEAERDSSKRWSPILEMQYRGGLFKGRCQGGLPEGKGRLVLGDGSIYDGMWHNGKRSGLGTFYFKNGDVFQGTWREDLIHGKGWFYLHKGDRWFANFWKGKASGEGRFYSKSGEIFFGHFKDGWRHGQFLCIDLDGTRYSETWDDGVLIDRKQVDAGD

SEQ ID NO: 47106 - DNA, 1374 bp, Arabidopsis thaliana
  misc_feature (1)..(1374): Ceres Seq. ID no. 13592445
  misc_feature: MA Experiment ID: 20000495 Result: Down-regulated in Transcription
  misc_feature: MA Experiment 20000495 PARAMETER Experiment Name: At_Guard_Cells_P Parameter: Harvest Date Value: 8/2/2002
  misc_feature: MA Experiment 20000495 PARAMETER Experiment Name: At_Guard_Cells_P Parameter: Organism Value: A. thaliana
  misc_feature: MA Experiment 20000495 PARAMETER Experiment Name: At_Guard_Cells_P Parameter: Tissue Value: Guard Cells vs. Leaves
gggaggaaactcaaattgttacagttcacaagtaatctcttcttcaagctttctctctctaccaatttaagtatctctctttcttctcctctctctctctacgaaaactccgttagacccgttctctctgttctaattttattcttcttcgtgttctcgttagggtttttgattctttcaacacagacccaaatcaatttctctcgtgtctttacgatgacctcgaagaacaatggtttgtcagctgcgctcgtttcgaatctccaagatgtgctttcgaagagaaaagtaggaaatgaggaaaaagttggaagcgatggatcggcggaggaggctccgtctacatctgattccgttgatgttgcgtcggtggaggaagagatcgatgattctagacctattgttttagttacgaatggtgatgggattgattcgccagggcttgtttctctcgttgaggctttggttctcgaagggctttacaatgttcatgtttgtgctcctcaaacggacaaatcagcctctgctcattctactactccaggagaaacaatcgctgtaagctctgtaaaactcaaaggtgccacagcctttgaagtttcagggactcctgtggactgcatctcattaggattatctggagcgctttttgcttggtcaaaacctatactggtaattagtggaattaatcagggatcaagctgtggccatcaaatgttctattcaggtgcagttgctggaggcagggaggctttgatttctggggtaccctctttgtcaatatcgttgaattggaagaaaaatgaaagccaagaaagtcactttaaggatgctgttggtgtctgcttacctttgataaacgcaactatcagagacattgcgaaaggagttttccctaaagactgctctctcaacatagaaattccaacatcaccctcatcaaacaagggtttcaaggtaacaaagcaaagcatgtggaggcagtatcctagttggcaagctgtttcagctaatcgtcaccctggtgctgggaatttcatgtccaaccaacaaagtttaggggctcagcttgcccagcttggcagggatgcttcagcggctggggcggctcgtcgttttaccactcagaagaagagtattgtagaaattgaatcagttggtgttgctggtaaaactgatacccgtgttaagaaattctttcgtctagagtttcttgctaaagaacaagaacacacagatgaagatttggatgtcaaggctctagaagatggtttcgtttccgtgactccattttctctccttccaaaaacggattcagaaactcaagccgcagcatcagaatggatctccaaagcccttaactctgatcaatga

SEQ ID NO: 47107 - protein, 457 aa, Arabidopsis thaliana
  peptide (1)..(457): Ceres Seq. ID no. 13592446
  misc_feature (133)..(239): Pfam Name: Survival protein SurE Pfam Description: Survival protein SurE
  misc_feature (135)..(329): Homolog of NCBI NO: 39996623 NR Description: stationary-phase survival protein SurE
  misc_feature (135)..(341): Homolog of NCBI NO: 15791661 NR Description: SurE protein homolog [Campylobacter jejuni]
  misc_feature (241)..(316): Homolog of NCBI NO: 7485145 NR Description: hypothetical protein - Arabidopsis thaliana
  misc_feature (126)..(239): Homolog of NCBI NO: 7485145 NR Description: hypothetical protein - Arabidopsis thaliana
  misc_feature (133)..(356): Homolog of NCBI NO: 33146601 NR Description: putative stationary phase survival protein SurE
  misc_feature (389)..(454): Homolog of NCBI NO: 18414342 NR Description: expressed protein [Arabidopsis thaliana]
  misc_feature (126)..(384): Homolog of NCBI NO: 18414342 NR Description: expressed protein [Arabidopsis thaliana]
  misc_feature (73)..(239): Homolog of NCBI NO: 25406225 NR Description: hypothetical protein F3N23.8 [imported] -
  misc_feature (242)..(457): Homolog of NCBI NO: 25406225 NR Description: hypothetical protein F3N23.8 [imported] -
  misc_feature (73)..(457): Homolog of NCBI NO: 15218620 NR Description: expressed protein [Arabidopsis thaliana]
GRKLKLLQFTSNLFFKLSLSTNLSISLSSPLSLYENSVRPVLSVLILFFFVFSLGFLILSTQTQINFSRVFTMTSKNNGLSAALVSNLQDVLSKRKVGNEEKVGSDGSAEEAPSTSDSVDVASVEEEIDDSRPIVLVTNGDGIDSPGLVSLVEALVLEGLYNVHVCAPQTDKSASAHSTTPGETIAVSSVKLKGATAFEVSGTPVDCISLGLSGALFAWSKPILVISGINQGSSCGHQMFYSGAVAGGREALISGVPSLSISLNWKKNESQESHFKDAVGVCLPLINATIRDIAKGVFPKDCSLNIEIPTSPSSNKGFKVTKQSMWRQYPSWQAVSANRHPGAGNFMSNQQSLGAQLAQLGRDASAAGAARRFTTQKKSIVEIESVGVAGKTDTRVKKFFRLEFLAKEQEHTDEDLDVKALEDGFVSVTPFSLLPKTDSETQAAASEWISKALNSDQ

SEQ ID NO: 47108 - protein, 385 aa, Arabidopsis thaliana
  peptide (1)..(385): Ceres Seq. ID no. 13592447
  misc_feature (61)..(167): Pfam Name: Survival protein SurE Pfam Description: Survival protein SurE
  misc_feature (63)..(257): Homolog of NCBI NO: 39996623 NR Description: stationary-phase survival protein SurE
  misc_feature (63)..(269): Homolog of NCBI NO: 15791661 NR Description: SurE protein homolog [Campylobacter jejuni]
  misc_feature (169)..(244): Homolog of NCBI NO: 7485145 NR Description: hypothetical protein - Arabidopsis thaliana
  misc_feature (54)..(167): Homolog of NCBI NO: 7485145 NR Description: hypothetical protein - Arabidopsis thaliana
  misc_feature (61)..(284): Homolog of NCBI NO: 33146601 NR Description: putative stationary phase survival protein SurE
  misc_feature (317)..(382): Homolog of NCBI NO: 18414342 NR Description: expressed protein [Arabidopsis thaliana]
  misc_feature (54)..(312): Homolog of NCBI NO: 18414342 NR Description: expressed protein [Arabidopsis thaliana]
  misc_feature (1)..(167): Homolog of NCBI NO: 25406225 NR Description: hypothetical protein F3N23.8 [imported] -
  misc_feature (170)..(385): Homolog of NCBI NO: 25406225 NR Description: hypothetical protein F3N23.8 [imported] -
  misc_feature (1)..(385): Homolog of NCBI NO: 15218620 NR Description: expressed protein [Arabidopsis thaliana]
MTSKNNGLSAALVSNLQDVLSKRKVGNEEKVGSDGSAEEAPSTSDSVDVASVEEEIDDSRPIVLVTNGDGIDSPGLVSLVEALVLEGLYNVHVCAPQTDKSASAHSTTPGETIAVSSVKLKGATAFEVSGTPVDCISLGLSGALFAWSKPILVISGINQGSSCGHQMFYSGAVAGGREALISGVPSLSISLNWKKNESQESHFKDAVGVCLPLINATIRDIAKGVFPKDCSLNIEIPTSPSSNKGFKVTKQSMWRQYPSWQAVSANRHPGAGNFMSNQQSLGAQLAQLGRDASAAGAARRFTTQKKSIVEIESVGVAGKTDTRVKKFFRLEFLAKEQEHTDEDLDVKALEDGFVSVTPFSLLPKTDSETQAAASEWISKALNSDQ

SEQ ID NO: 47109 - DNA, 2589 bp, Arabidopsis thaliana; identical to SEQ ID NO: 46443
  misc_feature (1)..(2589): Ceres Seq. ID no. 12600667
  misc_feature: MA Experiment ID: 20000169 Result: Up-regulated in Transcription
  misc_feature: MA Experiment 20000169 PARAMETER Experiment Name: At_100uM_ABA_P Parameter: Age (day) Value: 14
  misc_feature: MA Experiment 20000169 PARAMETER Experiment Name: At_100uM_ABA_P Parameter: Organism Value: A. thaliana
  misc_feature: MA Experiment 20000169 PARAMETER Experiment Name: At_100uM_ABA_P Parameter: Plant Line Value: WS
  misc_feature: MA Experiment 20000169 PARAMETER Experiment Name: At_100uM_ABA_P Parameter: Timepoint (hr) Value: 6
  misc_feature: MA Experiment 20000169 PARAMETER Experiment Name: At_100uM_ABA_P Parameter: Tissue Value: Aerial
  misc_feature: MA Experiment 20000169 PARAMETER Experiment Name: At_100uM_ABA_P Parameter: Treatment Value: 100uM ABA vs. No Treatment
  misc_feature: MA Experiment ID: 20000179 Result: Up-regulated in Transcription
  misc_feature: MA Experiment 20000179 PARAMETER Experiment Name: At_Germinating_Seeds_P Parameter: Age (hr) Value: 6 vs. 0
  misc_feature: MA Experiment 20000179 PARAMETER Experiment Name: At_Germinating_Seeds_P Parameter: Tissue Value: Germinating Seeds
  misc_feature: MA Experiment ID: 20000180 Result: Up-regulated in Transcription
  misc_feature: MA Experiment 20000180 PARAMETER Experiment Name: At_Germinating_Seeds_P Parameter: Age (hr) Value: 24 vs. 0
  misc_feature: MA Experiment 20000180 PARAMETER Experiment Name: At_Germinating_Seeds_P Parameter: Tissue Value: Germinating Seeds
  misc_feature: MA Experiment ID: 20000185 Result: Down-regulated in Transcription
  misc_feature: MA Experiment 20000185 PARAMETER Experiment Name: At_Roots__P Parameter: Age (day) Value: 7 vs. 21
  misc_feature: MA Experiment 20000185 PARAMETER Experiment Name: At_Roots__P Parameter: Organism Value: A. thaliana
  misc_feature: MA Experiment 20000185 PARAMETER Experiment Name: At_Roots__P Parameter: Tissue Value: Roots vs. Whole Plant
  misc_feature: MA Experiment ID: 20000211 Result: Down-regulated in Transcription
  misc_feature: MA Experiment 20000211 PARAMETER Experiment Name: At_0.001percent_MeJA__P Parameter: Age (day) Value: 14
  misc_feature: MA Experiment 20000211 PARAMETER Experiment Name: At_0.001percent_MeJA__P Parameter: Organism Value: A. thaliana
  misc_feature: MA Experiment 20000211 PARAMETER Experiment Name: At_0.001percent_MeJA__P Parameter: Plant Line Value: WS
  misc_feature: MA Experiment 20000211 PARAMETER Experiment Name: At_0.001percent_MeJA__P Parameter: Timepoint (hr) Value: 1
  misc_feature: MA Experiment 20000211 PARAMETER Experiment Name: At_0.001percent_MeJA__P Parameter: Tissue Value: Aerial
  misc_feature: MA Experiment 20000211 PARAMETER Experiment Name: At_0.001percent_MeJA__P Parameter: Treatment Value: 0.001percent MeJA vs. No Treatment
  misc_feature: MA Experiment ID: 20000213 Result: Down-regulated in Transcription
  misc_feature: MA Experiment 20000213 PARAMETER Experiment Name: At_4deg_Cold_P Parameter: Timepoint (hr) Value: 2
  misc_feature: MA Experiment ID: 20000227 Result: Up-regulated in Transcription
  misc_feature: MA Experiment 20000227 PARAMETER Experiment Name: At_Root-Tips-vs-Tops_P Parameter: Tissue Value: Root Tips vs. Root Tops
  misc_feature: MA Experiment ID: 20000234 Result: Down-regulated in Transcription
  misc_feature: MA Experiment 20000234 PARAMETER Experiment Name: At_Siliques_P Parameter: Age (day) Value: 21
  misc_feature: MA Experiment 20000234 PARAMETER Experiment Name: At_Siliques_P Parameter: Organism Value: A. thaliana
  misc_feature: MA Experiment 20000234 PARAMETER Experiment Name: At_Siliques_P Parameter: Plant Line Value: WS
  misc_feature: MA Experiment 20000234 PARAMETER Experiment Name: At_Siliques_P Parameter: Tissue Value: Less Than 5mm Siliques vs. Whole Plant
  misc_feature: MA Experiment ID: 20000235 Result: Down-regulated in Transcription
  misc_feature: MA Experiment 20000235 PARAMETER Experiment Name: At_Siliques_P Parameter: Age (day) Value: 21
  misc_feature: MA Experiment 20000235 PARAMETER Experiment Name: At_Siliques_P Parameter: Organism Value: A. thaliana
  misc_feature: MA Experiment 20000235 PARAMETER Experiment Name: At_Siliques_P Parameter: Plant Line Value: WS
  misc_feature: MA Experiment 20000235 PARAMETER Experiment Name: At_Siliques_P Parameter: Tissue Value: 5-10mm Siliques vs. Whole Plant
  misc_feature: MA Experiment ID: 20000265 Result: Down-regulated in Transcription
  misc_feature: MA Experiment 20000265 PARAMETER Experiment Name: At_Open_Flower_P Parameter: Age (day) Value: 21
  misc_feature: MA Experiment 20000265 PARAMETER Experiment Name: At_Open_Flower_P Parameter: Plant Line Value: WS
  misc_feature: MA Experiment 20000265 PARAMETER Experiment Name: At_Open_Flower_P Parameter: Tissue Value: Closed Flower vs. Whole Plant
  misc_feature: MA Experiment ID: 20000268 Result: Down-regulated in Transcription
  misc_feature: MA Experiment 20000268 PARAMETER Experiment Name: At_100mM_NaCl__P Parameter: Age (day) Value: 14
  misc_feature: MA Experiment 20000268 PARAMETER Experiment Name: At_100mM_NaCl__P Parameter: Organism Value: A. thaliana
  misc_feature: MA Experiment 20000268 PARAMETER Experiment Name: At_100mM_NaCl__P Parameter: Plant Line Value: WS
  misc_feature: MA Experiment 20000268 PARAMETER Experiment Name: At_100mM_NaCl__P Parameter: Timepoint (hr) Value: 6
  misc_feature: MA Experiment 20000268 PARAMETER Experiment Name: At_100mM_NaCl__P Parameter: Tissue Value: Whole Plant
  misc_feature: MA Experiment 20000268 PARAMETER Experiment Name: At_100mM_NaCl__P Parameter: Treatment Value: 100mM NaCl vs. No Treatment
  misc_feature: MA Experiment ID: 20000269 Result: Down-regulated in Transcription
  misc_feature: MA Experiment 20000269 PARAMETER Experiment Name: At_1mM_KNO3_L-vs-H_Roots_P Parameter: Age (day) Value: 7,10,12
  misc_feature: MA Experiment 20000269 PARAMETER Experiment Name: At_1mM_KNO3_L-vs-H_Roots_P Parameter: Organism Value: A. thaliana
  misc_feature: MA Experiment 20000269 PARAMETER Experiment Name: At_1mM_KNO3_L-vs-H_Roots_P Parameter: Plant Line Value: WS
  misc_feature: MA Experiment 20000269 PARAMETER Experiment Name: At_1mM_KNO3_L-vs-H_Roots_P Parameter: Timepoint (day) Value: 7,10,12
  misc_feature: MA Experiment 20000269 PARAMETER Experiment Name: At_1mM_KNO3_L-vs-H_Roots_P Parameter: Tissue Value: Roots
  misc_feature: MA Experiment 20000269 PARAMETER Experiment Name: At_1mM_KNO3_L-vs-H_Roots_P Parameter: Treatment Value: 1mM KNO3 vs. 50mM KNO3
  misc_feature: MA Experiment ID: 20000286 Result: Down-regulated in Transcription
  misc_feature: MA Experiment 20000286 PARAMETER Experiment Name: At_Open_Flower_P Parameter: Age (day) Value: 21
  misc_feature: MA Experiment 20000286 PARAMETER Experiment Name: At_Open_Flower_P Parameter: Plant Line Value: WS
  misc_feature: MA Experiment 20000286 PARAMETER Experiment Name: At_Open_Flower_P Parameter: Tissue Value: Half Open vs. Whole Plant
  misc_feature: MA Experiment ID: 20000308 Result: Down-regulated in Transcription
  misc_feature: MA Experiment 20000308 PARAMETER Experiment Name: At_100mM_NaCl__P Parameter: Age (day) Value: 17
  misc_feature: MA Experiment 20000308 PARAMETER Experiment Name: At_100mM_NaCl__P Parameter: Organism Value: A. thaliana
  misc_feature: MA Experiment 20000308 PARAMETER Experiment Name: At_100mM_NaCl__P Parameter: Plant Line Value: WS
  misc_feature: MA Experiment 20000308 PARAMETER Experiment Name: At_100mM_NaCl__P Parameter: Timepoint (hr) Value: 72
  misc_feature: MA Experiment 20000308 PARAMETER Experiment Name: At_100mM_NaCl__P Parameter: Tissue Value: Whole Plant
  misc_feature: MA Experiment 20000308 PARAMETER Experiment Name: At_100mM_NaCl__P Parameter: Treatment Value: 100mM NaCl vs. No Treatment
  misc_feature: MA Experiment ID: 20000438 Result: Down-regulated in Transcription
  misc_feature: MA Experiment 20000438 PARAMETER Experiment Name: At_Shoots__P Parameter: Age (day) Value: 14
  misc_feature: MA Experiment 20000438 PARAMETER Experiment Name: At_Shoots__P Parameter: Tissue Value: Shoots vs. Whole Plant
  misc_feature: MA Experiment ID: 20000439 Result: Down-regulated in Transcription
  misc_feature: MA Experiment 20000439 PARAMETER Experiment Name: At_Roots__P Parameter: Age (day) Value: 14 vs. 21
  misc_feature: MA Experiment 20000439 PARAMETER Experiment Name: At_Roots__P Parameter: Organism Value: A. thaliana
  misc_feature: MA Experiment 20000439 PARAMETER Experiment Name: At_Roots__P Parameter: Tissue Value: Roots vs. Whole Plant
  misc_feature: MA Experiment ID: 20000441 Result: Up-regulated in Transcription
  misc_feature: MA Experiment 20000441 PARAMETER Experiment Name: At_1uM_BR-BRZ__P Parameter: Tissue Value: Shoot Apices
  misc_feature: MA Experiment 20000441 PARAMETER Experiment Name: At_1uM_BR-BRZ__P Parameter: Treatment Value: 1uM BR vs. No Treatment
  misc_feature: MA Experiment ID: 20000443 Result: Up-regulated in Transcription
  misc_feature: MA Experiment 20000443 PARAMETER Experiment Name: At_1uM_BR-BRZ__P Parameter: Tissue Value: Shoot Apices
  misc_feature: MA Experiment 20000443 PARAMETER Experiment Name: At_1uM_BR-BRZ__P Parameter: Treatment Value: 1uM BRZ vs. No Treatment
  misc_feature: MA Experiment ID: 20000452 Result: Down-regulated in Transcription
  misc_feature: MA Experiment 20000452 PARAMETER Experiment Name: At_CS6879_Shoots-Roots_P Parameter: Age (day) Value: 14
  misc_feature: MA Experiment 20000452 PARAMETER Experiment Name: At_CS6879_Shoots-Roots_P Parameter: Organism Value: A. thaliana
  misc_feature: MA Experiment 20000452 PARAMETER Experiment Name: At_CS6879_Shoots-Roots_P Parameter: Plant Line Value: CS6879 vs. WS
  misc_feature: MA Experiment 20000452 PARAMETER Experiment Name: At_CS6879_Shoots-Roots_P Parameter: Tissue Value: Shoots
  misc_feature: MA Experiment ID: 20000456 Result: Down-regulated in Transcription
  misc_feature: MA Experiment 20000456 PARAMETER Experiment Name: At_100uM_BA_P Parameter: Age (day) Value: 14
  misc_feature: MA Experiment 20000456 PARAMETER Experiment Name: At_100uM_BA_P Parameter: Organism Value: A. thaliana
  misc_feature: MA Experiment 20000456 PARAMETER Experiment Name: At_100uM_BA_P Parameter: Plant Line Value: WS
  misc_feature: MA Experiment 20000456 PARAMETER Experiment Name: At_100uM_BA_P Parameter: Timepoint (hr) Value: 6
  misc_feature: MA Experiment 20000456 PARAMETER Experiment Name: At_100uM_BA_P Parameter: Tissue Value: Aerial
  misc_feature: MA Experiment 20000456 PARAMETER Experiment Name: At_100uM_BA_P Parameter: Treatment Value: 100uM BA vs. No Treatment
  misc_feature: MA Experiment ID: 20000573 Result: Up-regulated in Transcription
  misc_feature: MA Experiment 20000573 PARAMETER Experiment Name: At_100uM_ABA_Mutants__P Parameter: Organism Value: A. thaliana
  misc_feature: MA Experiment 20000573 PARAMETER Experiment Name: At_100uM_ABA_Mutants__P Parameter: Plant Line Value: CS22 vs. Ler wt
  misc_feature: MA Experiment 20000573 PARAMETER Experiment Name: At_100uM_ABA_Mutants__P Parameter: Timepoint (hr) Value: N/A
  misc_feature: MA Experiment 20000573 PARAMETER Experiment Name: At_100uM_ABA_Mutants__P Parameter: Tissue Value: Whole Plant
  misc_feature: MA Experiment 20000573 PARAMETER Experiment Name: At_100uM_ABA_Mutants__P Parameter: Treatment Value: None
  misc_feature: MA Experiment ID: 20000709 Result: Up-regulated in Transcription
  misc_feature: MA Experiment 20000709 PARAMETER Experiment Name: At_15mM_NH4NO3_L-to-H_P Parameter: Age (hr) Value: 14
  misc_feature: MA Experiment 20000709 PARAMETER Experiment Name: At_15mM_NH4NO3_L-to-H_P Parameter: Organism Value: A. thaliana
  misc_feature: MA Experiment 20000709 PARAMETER Experiment Name: At_15mM_NH4NO3_L-to-H_P Parameter: Plant Line Value: WS
  misc_feature: MA Experiment 20000709 PARAMETER Experiment Name: At_15mM_NH4NO3_L-to-H_P Parameter: Timepoint (hr) Value: 4
  misc_feature: MA Experiment 20000709 PARAMETER Experiment Name: At_15mM_NH4NO3_L-to-H_P Parameter: Tissue Value: Aerial
  misc_feature: MA Experiment 20000709 PARAMETER Experiment Name: At_15mM_NH4NO3_L-to-H_P Parameter: Treatment Value: 15mM NH4NO3 vs. 30mM Mannitol
  misc_feature: MA Experiment ID: 20000794 Result: Up-regulated in Transcription
  misc_feature: MA Experiment 20000794 PARAMETER Experiment Name: At_Petals_P Parameter: Age (day) Value: 23-25 days
  misc_feature: MA Experiment 20000794 PARAMETER Experiment Name: At_Petals_P Parameter: Plant Line Value: WS
  misc_feature: MA Experiment 20000794 PARAMETER Experiment Name: At_Petals_P Parameter: Tissue Value: Petals vs. Whole plant
  misc_feature: MA Experiment ID: 20001247 Result: Up-regulated in Transcription
  misc_feature: MA Experiment 20001247 PARAMETER Experiment Name: At_Far-red-induction_P Parameter: Age (day) Value: 7
  misc_feature: MA Experiment 20001247 PARAMETER Experiment Name: At_Far-red-induction_P Parameter: Light Value: Far-red vs. White
  misc_feature: MA Experiment 20001247 PARAMETER Experiment Name: At_Far-red-induction_P Parameter: Organism Value: A. thaliana
  misc_feature: MA Experiment 20001247 PARAMETER Experiment Name: At_Far-red-induction_P Parameter: Plant Line Value: Columbia
  misc_feature: MA Experiment 20001247 PARAMETER Experiment Name: At_Far-red-induction_P Parameter: Timepoint (hr) Value: 1
  misc_feature: MA Experiment 20001247 PARAMETER Experiment Name: At_Far-red-induction_P Parameter: Tissue Value: Whole Plant
  misc_feature: MA Experiment ID: 20001248 Result: Up-regulated in Transcription
  misc_feature: MA Experiment 20001248 PARAMETER Experiment Name: At_Far-red-induction_P Parameter: Age (day) Value: 7
  misc_feature: MA Experiment 20001248 PARAMETER Experiment Name: At_Far-red-induction_P Parameter: Light Value: Far-red vs. White
  misc_feature: MA Experiment 20001248 PARAMETER Experiment Name: At_Far-red-induction_P Parameter: Organism Value: A. thaliana
  misc_feature: MA Experiment 20001248 PARAMETER Experiment Name: At_Far-red-induction_P Parameter: Plant Line Value: Columbia
  misc_feature: MA Experiment 20001248 PARAMETER Experiment Name: At_Far-red-induction_P Parameter: Timepoint (hr) Value: 4
  misc_feature: MA Experiment 20001248 PARAMETER Experiment Name: At_Far-red-induction_P Parameter: Tissue Value: Whole Plant
  misc_feature: MA Experiment ID: 20001450 Result: Up-regulated in Transcription
  misc_feature: MA Experiment 20001450 PARAMETER Experiment Name: At_Far-red-induction_P Parameter: Age (day) Value: 7
  misc_feature: MA Experiment 20001450 PARAMETER Experiment Name: At_Far-red-induction_P Parameter: Light Value: Far-red vs. White
  misc_feature: MA Experiment 20001450 PARAMETER Experiment Name: At_Far-red-induction_P Parameter: Organism Value: A. thaliana
  misc_feature: MA Experiment 20001450 PARAMETER Experiment Name: At_Far-red-induction_P Parameter: Plant Line Value: Columbia
  misc_feature: MA Experiment 20001450 PARAMETER Experiment Name: At_Far-red-induction_P Parameter: Timepoint (hr) Value: 8
  misc_feature: MA Experiment 20001450 PARAMETER Experiment Name: At_Far-red-induction_P Parameter: Tissue Value: Whole Plant
  misc_feature: MA Experiment ID: 20001451 Result: Up-regulated in Transcription
  misc_feature: MA Experiment 20001451 PARAMETER Experiment Name: At_Far-red-induction_P Parameter: Age (day) Value: 7
  misc_feature: MA Experiment 20001451 PARAMETER Experiment Name: At_Far-red-induction_P Parameter: Light Value: Far-red vs. White
  misc_feature: MA Experiment 20001451 PARAMETER Experiment Name: At_Far-red-induction_P Parameter: Organism Value: A. thaliana
  misc_feature: MA Experiment 20001451 PARAMETER Experiment Name: At_Far-red-induction_P Parameter: Plant Line Value: Columbia
  misc_feature: MA Experiment 20001451 PARAMETER Experiment Name: At_Far-red-induction_P Parameter: Timepoint (hr) Value: 24
  misc_feature: MA Experiment 20001451 PARAMETER Experiment Name: At_Far-red-induction_P Parameter: Tissue Value: Whole Plant
  misc_feature: MA Experiment ID: 20001556 Result: Down-regulated in Transcription
  misc_feature: MA Experiment 20001556 PARAMETER Experiment Name: At_Drought_Soil_Dry_P Parameter: Age (day) Value: 26
  misc_feature: MA Experiment 20001556 PARAMETER Experiment Name: At_Drought_Soil_Dry_P Parameter: Organism Value: A. thaliana
  misc_feature: MA Experiment 20001556 PARAMETER Experiment Name: At_Drought_Soil_Dry_P Parameter: Plant Line Value: WS
  misc_feature: MA Experiment 20001556 PARAMETER Experiment Name: At_Drought_Soil_Dry_P Parameter: Post Timepoint (hr) Value: None
  misc_feature: MA Experiment 20001556 PARAMETER Experiment Name: At_Drought_Soil_Dry_P Parameter: Post-Treatment Value: None
  misc_feature: MA Experiment 20001556 PARAMETER Experiment Name: At_Drought_Soil_Dry_P Parameter: Timepoint (day) Value: 12
  misc_feature: MA Experiment 20001556 PARAMETER Experiment Name: At_Drought_Soil_Dry_P Parameter: Treatment Value: Drought vs. No Drought
  misc_feature: MA Experiment ID: 20001559 Result: Down-regulated in Transcription
  misc_feature: MA Experiment 20001559 PARAMETER Experiment Name: At_Drought_Soil_Dry_P Parameter: Age (day) Value: 28
  misc_feature: MA Experiment 20001559 PARAMETER Experiment Name: At_Drought_Soil_Dry_P Parameter: Organism Value: A. thaliana
  misc_feature: MA Experiment 20001559 PARAMETER Experiment Name: At_Drought_Soil_Dry_P Parameter: Plant Line Value: WS
  misc_feature: MA Experiment 20001559 PARAMETER Experiment Name: At_Drought_Soil_Dry_P Parameter: Post Timepoint (hr) Value: 29
  misc_feature: MA Experiment 20001559 PARAMETER Experiment Name: At_Drought_Soil_Dry_P Parameter: Post-Treatment Value: Re-Water vs. No Drought
  misc_feature: MA Experiment 20001559 PARAMETER Experiment Name: At_Drought_Soil_Dry_P Parameter: Timepoint (day) Value: 14
  misc_feature: MA Experiment 20001559 PARAMETER Experiment Name: At_Drought_Soil_Dry_P Parameter: Treatment Value: Drought vs. No Drought
  misc_feature: MA Experiment ID: 20001560 Result: Down-regulated in Transcription
  misc_feature: MA Experiment 20001560 PARAMETER Experiment Name: At_Drought_Soil_Dry_P Parameter: Age (day) Value: 28
  misc_feature: MA Experiment 20001560 PARAMETER Experiment Name: At_Drought_Soil_Dry_P Parameter: Organism Value: A. thaliana
  misc_feature: MA Experiment 20001560 PARAMETER Experiment Name: At_Drought_Soil_Dry_P Parameter: Plant Line Value: WS
  misc_feature: MA Experiment 20001560 PARAMETER Experiment Name: At_Drought_Soil_Dry_P Parameter: Post Timepoint (hr) Value: None
  misc_feature: MA Experiment 20001560 PARAMETER Experiment Name: At_Drought_Soil_Dry_P Parameter: Post-Treatment Value: None
  misc_feature: MA Experiment 20001560 PARAMETER Experiment Name: At_Drought_Soil_Dry_P Parameter: Timepoint (day) Value: 14
  misc_feature: MA Experiment 20001560 PARAMETER Experiment Name: At_Drought_Soil_Dry_P Parameter: Treatment Value: Drought vs. No Drought
  misc_feature: MA Experiment ID: 20001757 Result: Up-regulated in Transcription
  misc_feature: MA Experiment 20001757 PARAMETER Experiment Name: At_50mM_NH4NO3_L-to-H_P Parameter: Timepoint (hr) Value: 6
  misc_feature: MA Experiment 20001757 PARAMETER Experiment Name: At_50mM_NH4NO3_L-to-H_P Parameter: Tissue Value: Leaf
  misc_feature: MA Experiment 20001757 PARAMETER Experiment Name: At_50mM_NH4NO3_L-to-H_P Parameter: Treatment Value: 50mM NH4NO3 vs 100mM Mannitol
  misc_feature: MA Experiment ID: 20001769 Result: Down-regulated in Transcription
  misc_feature: MA Experiment 20001769 PARAMETER Experiment Name: At_Far-red-enriched-adult_P Parameter: Age (day) Value: 28
  misc_feature: MA Experiment 20001769 PARAMETER Experiment Name: At_Far-red-enriched-adult_P Parameter: Light Value: Far-red enriched vs. White
  misc_feature: MA Experiment 20001769 PARAMETER Experiment Name: At_Far-red-enriched-adult_P Parameter: Organism Value: A. thaliana
  misc_feature: MA Experiment 20001769 PARAMETER Experiment Name: At_Far-red-enriched-adult_P Parameter: Plant Line Value: Columbia
  misc_feature: MA Experiment 20001769 PARAMETER Experiment Name: At_Far-red-enriched-adult_P Parameter: Timepoint (hr) Value: 4
  misc_feature: MA Experiment 20001769 PARAMETER Experiment Name: At_Far-red-enriched-adult_P Parameter: Tissue Value: Aerial
  misc_feature: MA Experiment ID: 20001905 Result: Down-regulated in Transcription
  misc_feature: MA Experiment 20001905 PARAMETER Experiment Name: At_Drought_Reproduction_P Parameter: Age (day) Value: 40
  misc_feature: MA Experiment 20001905 PARAMETER Experiment Name: At_Drought_Reproduction_P Parameter: Organism Value: A. thaliana
  misc_feature: MA Experiment 20001905 PARAMETER Experiment Name: At_Drought_Reproduction_P Parameter: Plant Line Value: WS
  misc_feature: MA Experiment 20001905 PARAMETER Experiment Name: At_Drought_Reproduction_P Parameter: Timepoint (day) Value: 10
  misc_feature: MA Experiment 20001905 PARAMETER Experiment Name: At_Drought_Reproduction_P Parameter: Tissue Value: Rosettes
  misc_feature: MA Experiment 20001905 PARAMETER Experiment Name: At_Drought_Reproduction_P Parameter: Treatment Value: Drought vs. No Drought
  misc_feature: MA Experiment ID: 20001911 Result: Down-regulated in Transcription
  misc_feature: MA Experiment 20001911 PARAMETER Experiment Name: At_Drought_Reproduction_P Parameter: Age (day) Value: 40
  misc_feature: MA Experiment 20001911 PARAMETER Experiment Name: At_Drought_Reproduction_P Parameter: Organism Value: A. thaliana
  misc_feature: MA Experiment 20001911 PARAMETER Experiment Name: At_Drought_Reproduction_P Parameter: Plant Line Value: WS
  misc_feature: MA Experiment 20001911 PARAMETER Experiment Name: At_Drought_Reproduction_P Parameter: Timepoint (day) Value: 10
  misc_feature: MA Experiment 20001911 PARAMETER Experiment Name: At_Drought_Reproduction_P Parameter: Tissue Value: Flowers
  misc_feature: MA Experiment 20001911 PARAMETER Experiment Name: At_Drought_Reproduction_P Parameter: Treatment Value: Drought vs. No Drought

SEQ ID NO: 47110 - protein, 798 aa, Arabidopsis thaliana; identical to SEQ ID NO: 46444
  peptide (1)..(798): Ceres Seq. ID no. 12600668
  misc_feature (424)..(654): Pfam Name: Glycosyl hydrolase family 3 C terminal domain Pfam Description: Glycosyl hydrolase family 3 C terminal domain
  misc_feature (424)..(654): Pfam Name: Glycosyl hydrolase family 3 C terminal domain Pfam Description: Glycosyl hydrolase family 3 C terminal domain
  misc_feature (424)..(654): Pfam Name: Glycosyl hydrolase family 3 C terminal domain Pfam Description: Glycosyl hydrolase family 3 C terminal domain
  misc_feature (226)..(795): Homolog of NCBI NO: 15238197 NR Description: glycosyl hydrolase family 3
  misc_feature (40)..(794): Homolog of NCBI NO: 15218202 NR Description: glycosyl hydrolase family 3
  misc_feature (37)..(786): Homolog of NCBI NO: 25453520 NR Description: beta-1,4-xylosidase [imported] - Arabidopsis
  misc_feature (37)..(786): Homolog of NCBI NO: 15230897 NR Description: glycosyl hydrolase family 3; protein id:
  misc_feature (52)..(792): Homolog of NCBI NO: 18025340 NR Description: alpha-L-arabinofuranosidase/beta-D-xylosidase
  misc_feature (226)..(795): Homolog of NCBI NO: 15238197 NR Description: glycosyl hydrolase family 3
  misc_feature (37)..(786): Homolog of NCBI NO: 25453520 NR Description: beta-1,4-xylosidase [imported] - Arabidopsis
  misc_feature (52)..(792): Homolog of NCBI NO: 18025340 NR Description: alpha-L-arabinofuranosidase/beta-D-xylosidase
  misc_feature (37)..(786): Homolog of NCBI NO: 15230897 NR Description: glycosyl hydrolase family 3; protein id:
  misc_feature (37)..(786): Homolog of NCBI NO: 25453520 NR Description: beta-1,4-xylosidase [imported] - Arabidopsis
  misc_feature (40)..(794): Homolog of NCBI NO: 15218202 NR Description: glycosyl hydrolase family 3
  misc_feature (226)..(795): Homolog of NCBI NO: 15238197 NR Description: glycosyl hydrolase family 3
  misc_feature (33)..(795): Homolog of NCBI NO: 18378991 NR Description: glycosyl hydrolase family 3
  misc_feature (38)..(795): Homolog of NCBI NO: 25518461 NR Description: hypothetical protein T14P4.8 - Arabidopsis
  misc_feature (38)..(795): Homolog of NCBI NO: 15237736 NR Description: glycosyl hydrolase family 3; protein id:
  misc_feature (35)..(792): Homolog of NCBI NO: 38344900 NR Description: OSJNBb0079B02.3 [Oryza sativa (japonica
  misc_feature (25)..(792): Homolog of NCBI NO: 15242492 NR Description: glycosyl hydrolase family 3
  misc_feature (33)..(795): Homolog of NCBI NO: 18378991 NR Description: glycosyl hydrolase family 3
  misc_feature (38)..(795): Homolog of NCBI NO: 25518461 NR Description: hypothetical protein T14P4.8 - Arabidopsis
  misc_feature (38)..(795): Homolog of NCBI NO: 15237736 NR Description: glycosyl hydrolase family 3; protein id:
  misc_feature (35)..(792): Homolog of NCBI NO: 38344900 NR Description: OSJNBb0079B02.3 [Oryza sativa (japonica
  misc_feature (25)..(792): Homolog of NCBI NO: 15242492 NR Description: glycosyl hydrolase family 3
  misc_feature (52)..(792): Homolog of NCBI NO: 18025340 NR Description: alpha-L-arabinofuranosidase/beta-D-xylosidase
  misc_feature (37)..(786): Homolog of NCBI NO: 15230897 NR Description: glycosyl hydrolase family 3; protein id:
  misc_feature (40)..(794): Homolog of NCBI NO: 15218202 NR Description: glycosyl hydrolase family 3
  misc_feature (25)..(792): Homolog of NCBI NO: 15242492 NR Description: glycosyl hydrolase family 3
  misc_feature (35)..(792): Homolog of NCBI NO: 38344900 NR Description: OSJNBb0079B02.3 [Oryza sativa (japonica
  misc_feature (38)..(795): Homolog of NCBI NO: 15237736 NR Description: glycosyl hydrolase family 3; protein id:
  misc_feature (38)..(795): Homolog of NCBI NO: 25518461 NR Description: hypothetical protein T14P4.8 - Arabidopsis
  misc_feature (33)..(795): Homolog of NCBI NO: 18378991 NR Description: glycosyl hydrolase family 3

SEQ ID NO: 47111 - protein, 774 aa, Arabidopsis thaliana; identical to SEQ ID NO: 46445
  peptide (1)..(774): Ceres Seq. ID no. 12600669
  misc_feature (400)..(630): Pfam Name: Glycosyl hydrolase family 3 C terminal domain Pfam Description: Glycosyl hydrolase family 3 C terminal domain
  misc_feature (400)..(630): Pfam Name: Glycosyl hydrolase family 3 C terminal domain Pfam Description: Glycosyl hydrolase family 3 C terminal domain
  misc_feature (400)..(630): Pfam Name: Glycosyl hydrolase family 3 C terminal domain Pfam Description: Glycosyl hydrolase family 3 C terminal domain
  misc_feature (202)..(771): Homolog of NCBI NO: 15238197 NR Description: glycosyl hydrolase family 3
  misc_feature (16)..(770): Homolog of NCBI NO: 15218202 NR Description: glycosyl hydrolase family 3
  misc_feature (13)..(762): Homolog of NCBI NO: 25453520 NR Description: beta-1,4-xylosidase [imported] - Arabidopsis
  misc_feature (13)..(762): Homolog of NCBI NO: 15230897 NR Description: glycosyl hydrolase family 3; protein id:
  misc_feature (28)..(768): Homolog of NCBI NO: 18025340 NR Description: alpha-L-arabinofuranosidase/beta-D-xylosidase
  misc_feature (202)..(771): Homolog of NCBI NO: 15238197 NR Description: glycosyl hydrolase family 3
  misc_feature (13)..(762): Homolog of NCBI NO: 25453520 NR Description: beta-1,4-xylosidase [imported] - Arabidopsis
  misc_feature (28)..(768): Homolog of NCBI NO: 18025340 NR Description: alpha-L-arabinofuranosidase/beta-D-xylosidase
  misc_feature (13)..(762): Homolog of NCBI NO: 15230897 NR Description: glycosyl hydrolase family 3; protein id:
  misc_feature (13)..(762): Homolog of NCBI NO: 25453520 NR Description: beta-1,4-xylosidase [imported] - Arabidopsis
  misc_feature (16)..(770): Homolog of NCBI NO: 15218202 NR Description: glycosyl hydrolase family 3
  misc_feature (202)..(771): Homolog of NCBI NO: 15238197 NR Description: glycosyl hydrolase family 3
  misc_feature (9)..(771): Homolog of NCBI NO: 18378991 NR Description: glycosyl hydrolase family 3
  misc_feature (14)..(771): Homolog of NCBI NO: 25518461 NR Description: hypothetical protein T14P4.8 - Arabidopsis
  misc_feature (14)..(771): Homolog of NCBI NO: 15237736 NR Description: glycosyl hydrolase family 3; protein id:
  misc_feature (11)..(768): Homolog of NCBI NO: 38344900 NR Description: OSJNBb0079B02.3 [Oryza sativa (japonica
  misc_feature (1)..(768): Homolog of NCBI NO: 15242492 NR Description: glycosyl hydrolase family 3
  misc_feature (9)..(771): Homolog of NCBI NO: 18378991 NR Description: glycosyl hydrolase family 3
  misc_feature (14)..(771): Homolog of NCBI NO: 25518461 NR Description: hypothetical protein T14P4.8 - Arabidopsis
  misc_feature (14)..(771): Homolog of NCBI NO: 15237736 NR Description: glycosyl hydrolase family 3; protein id:
  misc_feature (11)..(768): Homolog of NCBI NO: 38344900 NR Description: OSJNBb0079B02.3 [Oryza sativa (japonica
  misc_feature (1)..(768): Homolog of NCBI NO: 15242492 NR Description: glycosyl hydrolase family 3
  misc_feature (28)..(768): Homolog of NCBI NO: 18025340 NR Description: alpha-L-arabinofuranosidase/beta-D-xylosidase
  misc_feature (13)..(762): Homolog of NCBI NO: 15230897 NR Description: glycosyl hydrolase family 3; protein id:
  misc_feature (16)..(770): Homolog of NCBI NO: 15218202 NR Description: glycosyl hydrolase family 3
  misc_feature (1)..(768): Homolog of NCBI NO: 15242492 NR Description: glycosyl hydrolase family 3
  misc_feature (11)..(768): Homolog of NCBI NO: 38344900 NR Description: OSJNBb0079B02.3 [Oryza sativa (japonica
  misc_feature (14)..(771): Homolog of NCBI NO: 15237736 NR Description: glycosyl hydrolase family 3; protein id:
  misc_feature (14)..(771): Homolog of NCBI NO: 25518461 NR Description: hypothetical protein T14P4.8 - Arabidopsis
  misc_feature (9)..(771): Homolog of NCBI NO: 18378991 NR Description: glycosyl hydrolase family 3

SEQ ID NO: 47112 - protein, 626 aa, Arabidopsis thaliana; identical to SEQ ID NO: 46446
  peptide (1)..(626): Ceres Seq. ID no. 12600670
  misc_feature (252)..(482): Pfam Name: Glycosyl hydrolase family 3 C terminal domain Pfam Description: Glycosyl hydrolase family 3 C terminal domain
  misc_feature (252)..(482): Pfam Name: Glycosyl hydrolase family 3 C terminal domain Pfam Description: Glycosyl hydrolase family 3 C terminal domain
  misc_feature (252)..(482): Pfam Name: Glycosyl hydrolase family 3 C terminal domain Pfam Description: Glycosyl hydrolase family 3 C terminal domain
  misc_feature (54)..(623): Homolog of NCBI NO: 15238197 NR Description: glycosyl hydrolase family 3
  misc_feature (1)..(622): Homolog of NCBI NO: 15218202 NR Description: glycosyl hydrolase family 3
  misc_feature (1)..(614): Homolog of NCBI NO: 25453520 NR Description: beta-1,4-xylosidase [imported] - Arabidopsis
  misc_feature (1)..(614): Homolog of NCBI NO: 15230897 NR Description: glycosyl hydrolase family 3; protein id:
  misc_feature (1)..(620): Homolog of NCBI NO: 18025340 NR Description: alpha-L-arabinofuranosidase/beta-D-xylosidase
  misc_feature (54)..(623): Homolog of NCBI NO: 15238197 NR Description: glycosyl hydrolase family 3
  misc_feature (1)..(614): Homolog of NCBI NO: 25453520 NR Description: beta-1,4-xylosidase [imported] - Arabidopsis
  misc_feature (1)..(620): Homolog of NCBI NO: 18025340 NR Description: alpha-L-arabinofuranosidase/beta-D-xylosidase
  misc_feature (1)..(614): Homolog of NCBI NO: 15230897 NR Description: glycosyl hydrolase family 3; protein id:
  misc_feature (1)..(614): Homolog of NCBI NO: 25453520 NR Description: beta-1,4-xylosidase [imported] - Arabidopsis
  misc_feature (1)..(622): Homolog of NCBI NO: 15218202 NR Description: glycosyl hydrolase family 3
  misc_feature (54)..(623): Homolog of NCBI NO: 15238197 NR Description: glycosyl hydrolase family 3
  misc_feature (1)..(623): Homolog of NCBI NO: 18378991 NR Description: glycosyl hydrolase family 3
  misc_feature (1)..(623): Homolog of NCBI NO: 25518461 NR Description: hypothetical protein T14P4.8 - Arabidopsis
  misc_feature (1)..(623): Homolog of NCBI NO: 15237736 NR Description: glycosyl hydrolase family 3; protein id:
  misc_feature (1)..(620): Homolog of NCBI NO: 38344900 NR Description: OSJNBb0079B02.3 [Oryza sativa (japonica
  misc_feature (1)..(620): Homolog of NCBI NO: 15242492 NR Description: glycosyl hydrolase family 3
  misc_feature (1)..(623): Homolog of NCBI NO: 18378991 NR Description: glycosyl hydrolase family 3
  misc_feature (1)..(623): Homolog of NCBI NO: 25518461 NR Description: hypothetical protein T14P4.8 - Arabidopsis
  misc_feature (1)..(623): Homolog of NCBI NO: 15237736 NR Description: glycosyl hydrolase family 3; protein id:
  misc_feature (1)..(620): Homolog of NCBI NO: 38344900 NR Description: OSJNBb0079B02.3 [Oryza sativa (japonica
  misc_feature (1)..(620): Homolog of NCBI NO: 15242492 NR Description: glycosyl hydrolase family 3
  misc_feature (1)..(620): Homolog of NCBI NO: 18025340 NR Description: alpha-L-arabinofuranosidase/beta-D-xylosidase
  misc_feature (1)..(614): Homolog of NCBI NO: 15230897 NR Description: glycosyl hydrolase family 3; protein id:
  misc_feature (1)..(622): Homolog of NCBI NO: 15218202 NR Description: glycosyl hydrolase family 3
  misc_feature (1)..(620): Homolog of NCBI NO: 15242492 NR Description: glycosyl hydrolase family 3
  misc_feature (1)..(620): Homolog of NCBI NO: 38344900 NR Description: OSJNBb0079B02.3 [Oryza sativa (japonica
  misc_feature (1)..(623): Homolog of NCBI NO: 15237736 NR Description: glycosyl hydrolase family 3; protein id:
  misc_feature (1)..(623): Homolog of NCBI NO: 25518461 NR Description: hypothetical protein T14P4.8 - Arabidopsis
  misc_feature (1)..(623): Homolog of NCBI NO: 18378991 NR Description: glycosyl hydrolase family 3

SEQ ID NO: 47113 - DNA, 1878 bp, Arabidopsis thaliana
  misc_feature (1)..(1878): Ceres Seq. ID no. 13647936
  misc_feature: MA Experiment ID: 20000179 Result: Up-regulated in Transcription
  misc_feature: MA Experiment 20000179 PARAMETER Experiment Name: At_Germinating_Seeds_P Parameter: Age (hr) Value: 6 vs. 0
  misc_feature: MA Experiment 20000179 PARAMETER Experiment Name: At_Germinating_Seeds_P Parameter: Tissue Value: Germinating Seeds
cggaagctctcacgtgacaaaaacacgcacaaaattattcaagttaccagctttattaagcaaaacgattgagccaaaaaaaacgcatcagaatctggaacctggatcagatctagtcaggggtcagatcggagagccggcaatataatggcagcggcgagacgattacggacgctccaatctcagccggagaacaaggtctgtgtcgattgctcccagaagaatccacaatgggcatcgatttcatatggaatcttcatgtgcttggaatgctccggtaagcaccgtggtttaggtgttcacatctcattcgtcagatccgtcaccatggattcatggtccgagatccagatcaagaaaatggacgctggaggcaacgagcgtctcaacaattttctcgctcagtacgggatctcgaaagagactgatatcatctccaagtacaattccaacgccgcgtctgtgtatcgagatcggatccaagctttagctgagggaagacaatggagagatccgccgattgttaaggaatcggttggtggtggattgatgaataagaagcctccgttgtctcaaggcggtggtagagattctggtaatggtggatgggataattgggataacgatgattcgtttagatctacggatatgaggaggaatcaatcggcgggtgattttaggtcatcgggaggtcgtggtgctccggcgaagtcgaaatcgtctgaggatatatattcacggtctcagctggaggcgtcggcggcgaataaggagagtttctttgcgaaaaggatggctgagaatgagtctaagcctgagggacttcctccttcacaaggtggtaagtatgttgggtttggatctagtccaggtccagctccgagaagcaatcaacagagtggtggtggtgatgttttctctgttatgtctgagggttttggaagattgtctcttgttgctgcatcagctgcaaatgttgttcagactggaaccatggagtttacttccaaggtcaaagaaggtggcttagatcagacggtcagtgagactgttaatgttgttgcgagtaagacaacagagataggacagaggacatgggggatcatgaaaggagtgatggcaattgcctcacaaaaggttgaagagttcactaaagaagaagcatcaacttggaatcaacagaataaaactgagggcaacggttactaccagaactctgggattggaaacaaaacagcaaattcatcttttggaggatcacaatcatcatcaagtggtcacaacaacagttatcgtaactcgaattcttgggatgactggggagaagagaacaatagcaaaaaggaagcagcaccaaaggtgtcgacttctaatgatgatgacgacggcggttgggctggttgggatgataatgatgctaaagatgatgatttctattatcagcctgcaagcgataagaaatctgtaggtcacaatgggaaatcagacactgcttggaccggtggaggttttctctaacggtgttacaggataatggtgaatgaagtttgtacaattaaggaatagcagagcctgtggtcttctcgtgctctgtcacaagagagagcagagtggtcatctcaaccattaagccaccactggtctttcttttcacatatcaattgcttggcgttcaatcaaatcgatcgtcactatttgttcttctacaatatatatagtttttttttttatttgtacaagtttcacagtcacagaggattgcttgctaaactattcgggttagtcttcagctctttttttgagattcaaacttttatttttcttgaaatttgtaatgatcacaaaagacaaattttccgttttattgtcttctttctc

SEQ ID NO: 47114 - protein, 456 aa, Arabidopsis thaliana
  peptide (1)..(456): Ceres Seq. ID no. 13647937
  misc_feature (4)..(120): Pfam Name: Putative GTPase activating protein for Arf Pfam Description: Putative GTPase activating protein for Arf
  misc_feature (7)..(423): Homolog of NCBI NO: 27923732 NR Description: ADP-ribosylation factor GTPase activating protein (ADP-ribosylation factor 1 GTPase activating protein) (ARF1 GAP)
  misc_feature (5)..(122): Homolog of NCBI NO: 6319975 NR Description: Zn-finger-containing protein that functions as factor GTPase-activating protein and is involved in regulating
  misc_feature (155)..(391): Homolog of NCBI NO: 6319975 NR Description: Zn-finger-containing protein that functions as factor GTPase-activating protein and is involved in regulating
  misc_feature (7)..(423): Homolog of NCBI NO: 31542139 NR Description: ADP-ribosylation factor GTPase activating protein
  misc_feature (7)..(423): Homolog of NCBI NO: 21489979 NR Description: ADP-ribosylation factor 1 GTPase activating
  misc_feature (1)..(397): Homolog of NCBI NO: 31217790 NR Description: ENSANGP00000004294 [Anopheles gambiae]
  misc_feature (143)..(455): Homolog of NCBI NO: 29367415 NR Description: ADP ribosylation GTPase-like protein
  misc_feature (1)..(447): Homolog of NCBI NO: 10441356 NR Description: ARF GAP-like zinc finger-containing protein ZIGA2
  misc_feature (1)..(456): Homolog of NCBI NO: 15231865 NR Description: ARF GAP-like zinc finger-containing protein
  misc_feature (1)..(456): Homolog of NCBI NO: 15224315 NR Description: arabidopsis pde1 suppressor 1 protein (Asp1)
MAAARRLRTLQSQPENKVCVDCSQKNPQWASISYGIFMCLECSGKHRGLGVHISFVRSVTMDSWSEIQIKKMDAGGNERLNNFLAQYGISKETDIISKYNSNAASVYRDRIQALAEGRQWRDPPIVKESVGGGLMNKKPPLSQGGGRDSGNGGWDNWDNDDSFRSTDMRRNQSAGDFRSSGGRGAPAKSKSSEDIYSRSQLEASAANKESFFAKRMAENESKPEGLPPSQGGKYVGFGSSPGPAPRSNQQSGGGDVFSVMSEGFGRLSLVAASAANVVQTGTMEFTSKVKEGGLDQTVSETVNVVASKTTEIGQRTWGIMKGVMAIASQKVEEFTKEEASTWNQQNKTEGNGYYQNSGIGNKTANSSFGGSQSSSSGHNNSYRNSNSWDDWGEENNSKKEAAPKVSTSNDDDDGGWAGWDDNDAKDDDFYYQPASDKKSVGHNGKSDTAWTGGGFL

SEQ ID NO: 47115 - protein, 419 aa, Arabidopsis thaliana
  peptide (1)..(419): Ceres Seq. ID no. 13647938
  misc_feature (1)..(83): Pfam Name: Putative GTPase activating protein for Arf Pfam Description: Putative GTPase activating protein for Arf
  misc_feature (1)..(386): Homolog of NCBI NO: 27923732 NR Description: ADP-ribosylation factor GTPase activating protein (ADP-ribosylation factor 1 GTPase activating protein) (ARF1 GAP)
  misc_feature (1)..(85): Homolog of NCBI NO: 6319975 NR Description: Zn-finger-containing protein that functions as factor GTPase-activating protein and is involved in regulating
  misc_feature (118)..(354): Homolog of NCBI NO: 6319975 NR Description: Zn-finger-containing protein that functions as factor GTPase-activating protein and is involved in regulating
  misc_feature (1)..(386): Homolog of NCBI NO: 31542139 NR Description: ADP-ribosylation factor GTPase activating protein
  misc_feature (1)..(386): Homolog of NCBI NO: 21489979 NR Description: ADP-ribosylation factor 1 GTPase activating
  misc_feature (1)..(360): Homolog of NCBI NO: 31217790 NR Description: ENSANGP00000004294 [Anopheles gambiae]
  misc_feature (106)..(418): Homolog of NCBI NO: 29367415 NR Description: ADP ribosylation GTPase-like protein
  misc_feature (1)..(410): Homolog of NCBI NO: 10441356 NR Description: ARF GAP-like zinc finger-containing protein ZIGA2
  misc_feature (1)..(419): Homolog of NCBI NO: 15231865 NR Description: ARF GAP-like zinc finger-containing protein
  misc_feature (1)..(419): Homolog of NCBI NO: 15224315 NR Description: arabidopsis pde1 suppressor 1 protein (Asp1)
MCLECSGKHRGLGVHISFVRSVTMDSWSEIQIKKMDAGGNERLNNFLAQYGISKETDIISKYNSNAASVYRDRIQALAEGRQWRDPPIVKESVGGGLMNKKPPLSQGGGRDSGNGGWDNWDNDDSFRSTDMRRNQSAGDFRSSGGRGAPAKSKSSEDIYSRSQLEASAANKESFFAKRMAENESKPEGLPPSQGGKYVGFGSSPGPAPRSNQQSGGGDVFSVMSEGFGRLSLVAASAANVVQTGTMEFTSKVKEGGLDQTVSETVNVVASKTTEIGQRTWGIMKGVMAIASQKVEEFTKEEASTWNQQNKTEGNGYYQNSGIGNKTANSSFGGSQSSSSGHNNSYRNSNSWDDWGEENNSKKEAAPKVSTSNDDDDGGWAGWDDNDAKDDDFYYQPASDKKSVGHNGKSDTAWTGGGFL

SEQ ID NO: 47116 - protein, 396 aa, Arabidopsis thaliana
  peptide (1)..(396): Ceres Seq. ID no. 13647939
  misc_feature (1)..(60): Pfam Name: Putative GTPase activating protein for Arf Pfam Description: Putative GTPase activating protein for Arf
  misc_feature (1)..(363): Homolog of NCBI NO: 27923732 NR Description: ADP-ribosylation factor GTPase activating protein (ADP-ribosylation factor 1 GTPase activating protein) (ARF1 GAP)
  misc_feature (1)..(62): Homolog of NCBI NO: 6319975 NR Description: Zn-finger-containing protein that functions as factor GTPase-activating protein and is involved in regulating
  misc_feature (95)..(331): Homolog of NCBI NO: 6319975 NR Description: Zn-finger-containing protein that functions as factor GTPase-activating protein and is involved in regulating
  misc_feature (1)..(363): Homolog of NCBI NO: 31542139 NR Description: ADP-ribosylation factor GTPase activating protein
  misc_feature (1)..(363): Homolog of NCBI NO: 21489979 NR Description: ADP-ribosylation factor 1 GTPase activating
  misc_feature (1)..(337): Homolog of NCBI NO: 31217790 NR Description: ENSANGP00000004294 [Anopheles gambiae]
  misc_feature (83)..(395): Homolog of NCBI NO: 29367415 NR Description: ADP ribosylation GTPase-like protein
  misc_feature (1)..(387): Homolog of NCBI NO: 10441356 NR Description: ARF GAP-like zinc finger-containing protein ZIGA2
  misc_feature (1)..(396): Homolog of NCBI NO: 15231865 NR Description: ARF GAP-like zinc finger-containing protein
  misc_feature (1)..(396): Homolog of NCBI NO: 15224315 NR Description: arabidopsis pde1 suppressor 1 protein (Asp1)
MDSWSEIQIKKMDAGGNERLNNFLAQYGISKETDIISKYNSNAASVYRDRIQALAEGRQWRDPPIVKESVGGGLMNKKPPLSQGGGRDSGNGGWDNWDNDDSFRSTDMRRNQSAGDFRSSGGRGAPAKSKSSEDIYSRSQLEASAANKESFFAKRMAENESKPEGLPPSQGGKYVGFGSSPGPAPRSNQQSGGGDVFSVMSEGFGRLSLVAASAANVVQTGTMEFTSKVKEGGLDQTVSETVNVVASKTTEIGQRTWGIMKGVMAIASQKVEEFTKEEASTWNQQNKTEGNGYYQNSGIGNKTANSSFGGSQSSSSGHNNSYRNSNSWDDWGEENNSKKEAAPKVSTSNDDDDGGWAGWDDNDAKDDDFYYQPASDKKSVGHNGKSDTAWTGGGFL

SEQ ID NO: 47117 - DNA, 1691 bp, Arabidopsis thaliana
  misc_feature (1)..(1691): Ceres Seq. ID no. 13647940
  misc_feature: MA Experiment ID: 20000234 Result: Up-regulated in Transcription
  misc_feature: MA Experiment 20000234 PARAMETER Experiment Name: At_Siliques_P Parameter: Age (day) Value: 21
  misc_feature: MA Experiment 20000234 PARAMETER Experiment Name: At_Siliques_P Parameter: Organism Value: A. thaliana
  misc_feature: MA Experiment 20000234 PARAMETER Experiment Name: At_Siliques_P Parameter: Plant Line Value: WS
  misc_feature: MA Experiment 20000234 PARAMETER Experiment Name: At_Siliques_P Parameter: Tissue Value: Less Than 5mm Siliques vs. Whole Plant
  misc_feature: MA Experiment ID: 20000235 Result: Up-regulated in Transcription
  misc_feature: MA Experiment 20000235 PARAMETER Experiment Name: At_Siliques_P Parameter: Age (day) Value: 21
  misc_feature: MA Experiment 20000235 PARAMETER Experiment Name: At_Siliques_P Parameter: Organism Value: A. thaliana
  misc_feature: MA Experiment 20000235 PARAMETER Experiment Name: At_Siliques_P Parameter: Plant Line Value: WS
  misc_feature: MA Experiment 20000235 PARAMETER Experiment Name: At_Siliques_P Parameter: Tissue Value: 5-10mm Siliques vs. Whole Plant
  misc_feature: MA Experiment ID: 20000437 Result: Down-regulated in Transcription
  misc_feature: MA Experiment 20000437 PARAMETER Experiment Name: At_Drought_P Parameter: Age (day) Value: 8
  misc_feature: MA Experiment 20000437 PARAMETER Experiment Name: At_Drought_P Parameter: Organism Value: A. thaliana
  misc_feature: MA Experiment 20000437 PARAMETER Experiment Name: At_Drought_P Parameter: Plant Line Value: WS
  misc_feature: MA Experiment 20000437 PARAMETER Experiment Name: At_Drought_P Parameter: Timepoint (hr) Value: 24
  misc_feature: MA Experiment 20000437 PARAMETER Experiment Name: At_Drought_P Parameter: Tissue Value: Whole Plant
  misc_feature: MA Experiment 20000437 PARAMETER Experiment Name: At_Drought_P Parameter: Treatment Value: Drought vs. No Drought
  misc_feature: MA Experiment ID: 20001557 Result: Up-regulated in Transcription
  misc_feature: MA Experiment 20001557 PARAMETER Experiment Name: At_Drought_Soil_Dry_P Parameter: Age (day) Value: 27
  misc_feature: MA Experiment 20001557 PARAMETER Experiment Name: At_Drought_Soil_Dry_P Parameter: Organism Value: A. thaliana
  misc_feature: MA Experiment 20001557 PARAMETER Experiment Name: At_Drought_Soil_Dry_P Parameter: Plant Line Value: WS
  misc_feature: MA Experiment 20001557 PARAMETER Experiment Name: At_Drought_Soil_Dry_P Parameter: Post Timepoint (hr) Value: 3
  misc_feature: MA Experiment 20001557 PARAMETER Experiment Name: At_Drought_Soil_Dry_P Parameter: Post-Treatment Value: Re-Water vs. No Drought
  misc_feature: MA Experiment 20001557 PARAMETER Experiment Name: At_Drought_Soil_Dry_P Parameter: Timepoint (day) Value: 13
  misc_feature: MA Experiment 20001557 PARAMETER Experiment Name: At_Drought_Soil_Dry_P Parameter: Treatment Value: Drought vs. No Drought
  misc_feature: MA Experiment ID: 20001558 Result: Up-regulated in Transcription
  misc_feature: MA Experiment 20001558 PARAMETER Experiment Name: At_Drought_Soil_Dry_P Parameter: Age (day) Value: 27
  misc_feature: MA Experiment 20001558 PARAMETER Experiment Name: At_Drought_Soil_Dry_P Parameter: Organism Value: A. thaliana
  misc_feature: MA Experiment 20001558 PARAMETER Experiment Name: At_Drought_Soil_Dry_P Parameter: Plant Line Value: WS
  misc_feature: MA Experiment 20001558 PARAMETER Experiment Name: At_Drought_Soil_Dry_P Parameter: Post Timepoint (hr) Value: 6
  misc_feature: MA Experiment 20001558 PARAMETER Experiment Name: At_Drought_Soil_Dry_P Parameter: Post-Treatment Value: Re-Water vs. No Drought
  misc_feature: MA Experiment 20001558 PARAMETER Experiment Name: At_Drought_Soil_Dry_P Parameter: Timepoint (day) Value: 13
  misc_feature: MA Experiment 20001558 PARAMETER Experiment Name: At_Drought_Soil_Dry_P Parameter: Treatment Value: Drought vs. No Drought
  misc_feature: MA Experiment ID: 20001560 Result: Up-regulated in Transcription
  misc_feature: MA Experiment 20001560 PARAMETER Experiment Name: At_Drought_Soil_Dry_P Parameter: Age (day) Value: 28
  misc_feature: MA Experiment 20001560 PARAMETER Experiment Name: At_Drought_Soil_Dry_P Parameter: Organism Value: A. thaliana
  misc_feature: MA Experiment 20001560 PARAMETER Experiment Name: At_Drought_Soil_Dry_P Parameter: Plant Line Value: WS
  misc_feature: MA Experiment 20001560 PARAMETER Experiment Name: At_Drought_Soil_Dry_P Parameter: Post Timepoint (hr) Value: None
  misc_feature: MA Experiment 20001560 PARAMETER Experiment Name: At_Drought_Soil_Dry_P Parameter: Post-Treatment Value: None
  misc_feature: MA Experiment 20001560 PARAMETER Experiment Name: At_Drought_Soil_Dry_P Parameter: Timepoint (day) Value: 14
  misc_feature: MA Experiment 20001560 PARAMETER Experiment Name: At_Drought_Soil_Dry_P Parameter: Treatment Value: Drought vs. No Drought
gcttctctctctctctctctttctcttttcctatatattgacaagcttgcgatctctgttcgctagatctgtctgaaacagtgaggggattcctaggtttcagagcaaagtaatgtctccactcaagtacttgtgttttagaaaggtactcttgttgttgctytmwattccagtctcttccttttctcttcttcttctttctttgcctcatcagttgatgatcatgagctacaacgaatagatcctcatttccgagtgagaagattgttggtgaaagatctggattcaactggtgatgatgatgaaaccaatcttcctcctcctcctaagaagaagaagcttcttactgattctgtttcatcatcatcatcatcatctggtactaagaagaatcaaaccaagctccttaaacccatctcttcttcttcttccaccaagaaccaaactaaactcgccaagaccaccaccatgggtacgtctcacaaacttaactccacaaaatcttcttctaacacaaccaagaccagctctgagctcaagaagctcaattccggaacaaaatccacaaattctacttcttcgatcaagaaatcagcagatctgtccaaatcaagctcatccaaaaacaaaaccaccataaaacccccaagttccaaactttcttcacctccatcagagaagaaatcacaaccctcctcaaaaccagtgaccaaatcgaaacaatccgagaaagaaatcaaaccattctggctagacgacgaagaagacgaagatttcgtaagcgaattcagagatctaccaacaagattccaaagatccctaatcccagacctagagcgaatctcaacaacatccaaaaactacatcaacaaagccaacaaacagatcaccaaaaacttcaaaccctatttcggcaacaaatacgcaccaaccatagcttccgtagtctctttcgtcttcatcctcgtccctctactcttagtctcactcattttcaacagattcaaagcttatttctcactccagaagatcctaatcttcatccaaatctacctctcgatctacttctcaatcctatgcctctcatcgctcgtcaccggaatcgaaccactcaagtttctctacgcaacatcgagctcaacatacgtttgcttgcagatccggcaaaccctaggctacgtcttctacctcttgcttcttctcatgtacctcgttctcgtcttctccacggattgtggtttgggccttaaggtattgggcttggcgcagacctttgtgggctttgctgtaggtctgcattattacgtggcggtgtttcatagggtggtgcttcgtcagcctccgaagacgaactggaagatacacggtgtgtatgccacgtgtttcctttcgatttgtctgttatctaatgctgagaggaggaagaaagagtacttggaagaaggcggtgacgaagggaagaaaaattgaaattttctttattttattcttctctatctttgtatttttatattttaaattttgaaaaattcggcaaaattttagctgagaaatgcaatagaaagaacaattactggtggatggttggaaactttttttaaaaacttcaattgtatttataataaatcgataaatgtggaataaaatttcacaaaaaaaaaaaaaaaaaaactcgagggggggcccggtac

SEQ ID NO: 47118 - protein, 333 aa, Arabidopsis thaliana
  peptide (1)..(333): Ceres Seq. ID no. 15219508
  misc_feature (1)..(86): Homolog of NCBI NO: 28828184 NR Description: similar to Leishmania major. Ppg3 [Dictyostelium
  misc_feature (1)..(86): Homolog of NCBI NO: 28828184 NR Description: similar to Leishmania major. Ppg3 [Dictyostelium
  misc_feature (1)..(86): Homolog of NCBI NO: 28828184 NR Description: similar to Leishmania major. Ppg3 [Dictyostelium
  misc_feature (1)..(86): Homolog of NCBI NO: 28828184 NR Description: similar to Leishmania major. Ppg3 [Dictyostelium
  misc_feature (1)..(86): Homolog of NCBI NO: 28828184 NR Description: similar to Leishmania major. Ppg3 [Dictyostelium
  misc_feature (1)..(86): Homolog of NCBI NO: 28828184 NR Description: similar to Leishmania major. Ppg3 [Dictyostelium
  misc_feature (1)..(86): Homolog of NCBI NO: 28828184 NR Description: similar to Leishmania major. Ppg3 [Dictyostelium
  misc_feature (1)..(86): Homolog of NCBI NO: 28828184 NR Description: similar to Leishmania major. Ppg3 [Dictyostelium
  misc_feature (1)..(86): Homolog of NCBI NO: 28828184 NR Description: similar to Leishmania major. Ppg3 [Dictyostelium
  misc_feature (1)..(333): Homolog of NCBI NO: 15236054 NR Description: expressed protein [Arabidopsis thaliana]
MGTSHKLNSTKSSSNTTKTSSELKKLNSGTKSTNSTSSIKKSADLSKSSSSKNKTTIKPPSSKLSSPPSEKKSQPSSKPVTKSKQSEKEIKPFWLDDEEDEDFVSEFRDLPTRFQRSLIPDLERISTTSKNYINKANKQITKNFKPYFGNKYAPTIASVVSFVFILVPLLLVSLIFNRFKAYFSLQKILIFIQIYLSIYFSILCLSSLVTGIEPLKFLYATSSSTYVCLQIRQTLGYVFYLLLLLMYLVLVFSTDCGLGLKVLGLAQTFVGFAVGLHYYVAVFHRVVLRQPPKTNWKIHGVYATCFLSICLLSNAERRKKEYLEEGGDEGKKN

SEQ ID NO: 47119 - DNA, 2140 bp, Arabidopsis thaliana
  misc_feature (1)..(2140): Ceres Seq. ID no. 13647785
  misc_feature: MA Experiment ID: 20000173 Result: Down-regulated in Transcription
  misc_feature: MA Experiment 20000173 PARAMETER Experiment Name: At_42deg_Heat_P Parameter: Age (day) Value: 14
  misc_feature: MA Experiment 20000173 PARAMETER Experiment Name: At_42deg_Heat_P Parameter: Organism Value: A. thaliana
  misc_feature: MA Experiment 20000173 PARAMETER Experiment Name: At_42deg_Heat_P Parameter: Plant Line Value: WS
  misc_feature: MA Experiment 20000173 PARAMETER Experiment Name: At_42deg_Heat_P Parameter: Temperature (deg C) Value: 42 vs. 22
  misc_feature: MA Experiment 20000173 PARAMETER Experiment Name: At_42deg_Heat_P Parameter: Timepoint (hr) Value: 6
  misc_feature: MA Experiment 20000173 PARAMETER Experiment Name: At_42deg_Heat_P Parameter: Tissue Value: Aerial
  misc_feature: MA Experiment ID: 20000180 Result: Up-regulated in Transcription
  misc_feature: MA Experiment 20000180 PARAMETER Experiment Name: At_Germinating_Seeds_P Parameter: Age (hr) Value: 24 vs. 0
  misc_feature: MA Experiment 20000180 PARAMETER Experiment Name: At_Germinating_Seeds_P Parameter: Tissue Value: Germinating Seeds
  misc_feature: MA Experiment ID: 20000182 Result: Down-regulated in Transcription
  misc_feature: MA Experiment 20000182 PARAMETER Experiment Name: At_2mM_SA_P Parameter: Age (day) Value: 14
  misc_feature: MA Experiment 20000182 PARAMETER Experiment Name: At_2mM_SA_P Parameter: Organism Value: A. thaliana
  misc_feature: MA Experiment 20000182 PARAMETER Experiment Name: At_2mM_SA_P Parameter: Plant Line Value: WS
  misc_feature: MA Experiment 20000182 PARAMETER Experiment Name: At_2mM_SA_P Parameter: Timepoint (hr) Value: 6
  misc_feature: MA Experiment 20000182 PARAMETER Experiment Name: At_2mM_SA_P Parameter: Tissue Value: Aerial
  misc_feature: MA Experiment 20000182 PARAMETER Experiment Name: At_2mM_SA_P Parameter: Treatment Value: 2mM SA vs. No Treatment
  misc_feature: MA Experiment ID: 20000185 Result: Down-regulated in Transcription
  misc_feature: MA Experiment 20000185 PARAMETER Experiment Name: At_Roots__P Parameter: Age (day) Value: 7 vs. 21
  misc_feature: MA Experiment 20000185 PARAMETER Experiment Name: At_Roots__P Parameter: Organism Value: A. thaliana
  misc_feature: MA Experiment 20000185 PARAMETER Experiment Name: At_Roots__P Parameter: Tissue Value: Roots vs. Whole Plant
  misc_feature: MA Experiment ID: 20000439 Result: Down-regulated in Transcription
  misc_feature: MA Experiment 20000439 PARAMETER Experiment Name: At_Roots__P Parameter: Age (day) Value: 14 vs. 21
  misc_feature: MA Experiment 20000439 PARAMETER Experiment Name: At_Roots__P Parameter: Organism Value: A. thaliana
  misc_feature: MA Experiment 20000439 PARAMETER Experiment Name: At_Roots__P Parameter: Tissue Value: Roots vs. Whole Plant
  misc_feature: MA Experiment ID: 20000794 Result: Down-regulated in Transcription
  misc_feature: MA Experiment 20000794 PARAMETER Experiment Name: At_Petals_P Parameter: Age (day) Value: 23-25 days
  misc_feature: MA Experiment 20000794 PARAMETER Experiment Name: At_Petals_P Parameter: Plant Line Value: WS
  misc_feature: MA Experiment 20000794 PARAMETER Experiment Name: At_Petals_P Parameter: Tissue Value: Petals vs. Whole plant
  misc_feature: MA Experiment ID: 20001247 Result: Down-regulated in Transcription
  misc_feature: MA Experiment 20001247 PARAMETER Experiment Name: At_Far-red-induction_P Parameter: Age (day) Value: 7
  misc_feature: MA Experiment 20001247 PARAMETER Experiment Name: At_Far-red-induction_P Parameter: Light Value: Far-red vs. White
  misc_feature: MA Experiment 20001247 PARAMETER Experiment Name: At_Far-red-induction_P Parameter: Organism Value: A. thaliana
  misc_feature: MA Experiment 20001247 PARAMETER Experiment Name: At_Far-red-induction_P Parameter: Plant Line Value: Columbia
  misc_feature: MA Experiment 20001247 PARAMETER Experiment Name: At_Far-red-induction_P Parameter: Timepoint (hr) Value: 1
  misc_feature: MA Experiment 20001247 PARAMETER Experiment Name: At_Far-red-induction_P Parameter: Tissue Value: Whole Plant
  misc_feature: MA Experiment ID: 20001451 Result: Down-regulated in Transcription
  misc_feature: MA Experiment 20001451 PARAMETER Experiment Name: At_Far-red-induction_P Parameter: Age (day) Value: 7
  misc_feature: MA Experiment 20001451 PARAMETER Experiment Name: At_Far-red-induction_P Parameter: Light Value: Far-red vs. White
  misc_feature: MA Experiment 20001451 PARAMETER Experiment Name: At_Far-red-induction_P Parameter: Organism Value: A. thaliana
  misc_feature: MA Experiment 20001451 PARAMETER Experiment Name: At_Far-red-induction_P Parameter: Plant Line Value: Columbia
  misc_feature: MA Experiment 20001451 PARAMETER Experiment Name: At_Far-red-induction_P Parameter: Timepoint (hr) Value: 24
  misc_feature: MA Experiment 20001451 PARAMETER Experiment Name: At_Far-red-induction_P Parameter: Tissue Value: Whole Plant
  misc_feature: MA Experiment ID: 20001557 Result: Down-regulated in Transcription
  misc_feature: MA Experiment 20001557 PARAMETER Experiment Name: At_Drought_Soil_Dry_P Parameter: Age (day) Value: 27
  misc_feature: MA Experiment 20001557 PARAMETER Experiment Name: At_Drought_Soil_Dry_P Parameter: Organism Value: A. thaliana
  misc_feature: MA Experiment 20001557 PARAMETER Experiment Name: At_Drought_Soil_Dry_P Parameter: Plant Line Value: WS
  misc_feature: MA Experiment 20001557 PARAMETER Experiment Name: At_Drought_Soil_Dry_P Parameter: Post Timepoint (hr) Value: 3
  misc_feature: MA Experiment 20001557 PARAMETER Experiment Name: At_Drought_Soil_Dry_P Parameter: Post-Treatment Value: Re-Water vs. No Drought
  misc_feature: MA Experiment 20001557 PARAMETER Experiment Name: At_Drought_Soil_Dry_P Parameter: Timepoint (day) Value: 13
  misc_feature: MA Experiment 20001557 PARAMETER Experiment Name: At_Drought_Soil_Dry_P Parameter: Treatment Value: Drought vs. No Drought
  misc_feature: MA Experiment ID: 20001558 Result: Down-regulated in Transcription
  misc_feature: MA Experiment 20001558 PARAMETER Experiment Name: At_Drought_Soil_Dry_P Parameter: Age (day) Value: 27
  misc_feature: MA Experiment 20001558 PARAMETER Experiment Name: At_Drought_Soil_Dry_P Parameter: Organism Value: A. thaliana
  misc_feature: MA Experiment 20001558 PARAMETER Experiment Name: At_Drought_Soil_Dry_P Parameter: Plant Line Value: WS
  misc_feature: MA Experiment 20001558 PARAMETER Experiment Name: At_Drought_Soil_Dry_P Parameter: Post Timepoint (hr) Value: 6
  misc_feature: MA Experiment 20001558 PARAMETER Experiment Name: At_Drought_Soil_Dry_P Parameter: Post-Treatment Value: Re-Water vs. No Drought
  misc_feature: MA Experiment 20001558 PARAMETER Experiment Name: At_Drought_Soil_Dry_P Parameter: Timepoint (day) Value: 13
  misc_feature: MA Experiment 20001558 PARAMETER Experiment Name: At_Drought_Soil_Dry_P Parameter: Treatment Value: Drought vs. No Drought
  misc_feature: MA Experiment ID: 20001757 Result: Up-regulated in Transcription
  misc_feature: MA Experiment 20001757 PARAMETER Experiment Name: At_50mM_NH4NO3_L-to-H_P Parameter: Timepoint (hr) Value: 6
  misc_feature: MA Experiment 20001757 PARAMETER Experiment Name: At_50mM_NH4NO3_L-to-H_P Parameter: Tissue Value: Leaf
  misc_feature: MA Experiment 20001757 PARAMETER Experiment Name: At_50mM_NH4NO3_L-to-H_P Parameter: Treatment Value: 50mM NH4NO3 vs 100mM Mannitol
  misc_feature: MA Experiment ID: 20001904 Result: Down-regulated in Transcription
  misc_feature: MA Experiment 20001904 PARAMETER Experiment Name: At_Drought_Reproduction_P Parameter: Age (day) Value: 37
  misc_feature: MA Experiment 20001904 PARAMETER Experiment Name: At_Drought_Reproduction_P Parameter: Organism Value: A. thaliana
  misc_feature: MA Experiment 20001904 PARAMETER Experiment Name: At_Drought_Reproduction_P Parameter: Plant Line Value: WS
  misc_feature: MA Experiment 20001904 PARAMETER Experiment Name: At_Drought_Reproduction_P Parameter: Timepoint (day) Value: 7
  misc_feature: MA Experiment 20001904 PARAMETER Experiment Name: At_Drought_Reproduction_P Parameter: Tissue Value: Rosettes
  misc_feature: MA Experiment 20001904 PARAMETER Experiment Name: At_Drought_Reproduction_P Parameter: Treatment Value: Drought vs. No Drought
  misc_feature: MA Experiment ID: 20001905 Result: Down-regulated in Transcription
  misc_feature: MA Experiment 20001905 PARAMETER Experiment Name: At_Drought_Reproduction_P Parameter: Age (day) Value: 40
  misc_feature: MA Experiment 20001905 PARAMETER Experiment Name: At_Drought_Reproduction_P Parameter: Organism Value: A. thaliana
  misc_feature: MA Experiment 20001905 PARAMETER Experiment Name: At_Drought_Reproduction_P Parameter: Plant Line Value: WS
  misc_feature: MA Experiment 20001905 PARAMETER Experiment Name: At_Drought_Reproduction_P Parameter: Timepoint (day) Value: 10
  misc_feature: MA Experiment 20001905 PARAMETER Experiment Name: At_Drought_Reproduction_P Parameter: Tissue Value: Rosettes
  misc_feature: MA Experiment 20001905 PARAMETER Experiment Name: At_Drought_Reproduction_P Parameter: Treatment Value: Drought vs. No Drought
tcaatatctcttccccagatcctcctctctcttcttcactcttttaacggacacttttcactgatctattcactcactcaaatcgccgccggagctaaatcaatcaacaatgacgtcgacctacacgagattcgataccgtatttctcttttctaggttcgccggcgctaagtattcgccgttattgccgtctccgtcgtttactttatctacttccggcattcatcttagaaccaaaccgaattctcgttttcactcgattatagcatcatcctcatcttcatctgtagtcgccggaactgatagcattgagattaaatcgttgccgacgaagcctattgaaggacaaaagactggaactagcggactccggaagaaggtgaaagttttcatggaagagaattatttagccaactggattcaggcattgtttaattcattgccacccgaggactataagaatgcgacattggttttaggaggtgatggtcgttactttaacaaagaagcttcacagatcattatcaaaattgctgctgggaatggagttgggcaaattttagttggaaaggaaggcattttgtcaacsccagcggtttccgctgtaatcaggaaaagaaaggcaaatggaggattcatwatgagtgcaagycataatcctggtggacctgaatatgactggggtatcaagttcaattacagcagtggtcagcctgctcctgaaaccattactgacaaaatatatggaaatacactttcaatctctgagattaaggtggcagagattcctgatattgatctttctcaagttggagtgaccaaatatgggaatttcagtgtagaagttatagatcctgtttccgactatttggagctcatggaggatgttttcgactttgatctcatcagaggtcttctttcaagatcagattttgggttcatgtttgatgccatgcatgctgttactggtgcttatgcgaaaccaatttttgtcgacaatcttggagccaaaccggattcaatttccaacggagttcccctggaagattttgggcatggccatcctgatcctaatttgacatatgcaaaggatttggttgatgtcatgtatcgtgacaatggaccggatttcggagcagcaagtgatggtgatggtgacagaaatatggttttaggaaacaaattctttgtcactccttcagactctgtagctatcatcgcagccaatgcacaagaagcaattccatatttccgtgctggtcctaaggggctggcacgttctatgccgacaagtggtgctcttgatcgtgttgccgagaagttgaagcttcctttcttcgaggttcccactggatggaaattttttggaaatcttatggatgctggaaaattgtcaatctgtggagaagagagctttggcacaggttctgatcacatccgtgagaaggatggaatatgggctgtgttggcgtggctttcgatccttgctcatcgcaacaaggacacgaaaccaggggacaagttggtgtctgttgcagatgttgtgaaagagtattgggcgacatacggaaggaactttttttcaagatacgactatgaagaatgtgaatctgaaggagccaataaaatgatcgagtatcttagagaaatcttgtctaagagcaaggccggtgacgtttatggaaactatgtcctccagtttgcagatgacttctcatacacagaccctgttgatggaagtgttgcatccaagcaaggtgttcggtttgtgttcacggatggatccagaatcatatttcgtttatccggaactggctcagctggagctacagtgcgaatatacattgaacaatttgagccagacgtttcaaaacatgatgtggatgcacaaatagctcttaaacctttaatcgatcttgcattgtctgtatcaaagctgaaggacttcacagggagggagaagcccactgtcattacatgaagagaagtgtcacatggtcctttcgataaggcaatttgggttcctgacttcagttttgtctgccatgtttatttgaaaattccagagcaatgaaatgcttatccttgtaacatatataacttatatacgtctttctatataaataaaagcatttctttt

SEQ ID NO: 47120 - protein, 623 aa, Arabidopsis thaliana
  peptide (1)..(623): Ceres Seq. ID no. 15219487
  misc_feature (362)..(486): Pfam Name: Phosphoglucomutase/phosphomannomutase, Pfam Description: Phosphoglucomutase/phosphomannomutase,
  misc_feature (53)..(623): Homolog of NCBI NO: 33416468 NR Description: Unknown (protein for IMAGE:6403536) [Mus musculus]
  misc_feature (44)..(623): Homolog of NCBI NO: 33876434 NR Description: PGM1 protein [Homo sapiens]
  misc_feature (69)..(623): Homolog of NCBI NO: 12585330 NR Description: Phosphoglucomutase, cytoplasmic (Glucose
  misc_feature (68)..(623): Homolog of NCBI NO: 12643355 NR Description: Probable phosphoglucomutase, cytoplasmic 1
  misc_feature (74)..(623): Homolog of NCBI NO: 12585326 NR Description: Phosphoglucomutase, cytoplasmic (Glucose
  misc_feature (13)..(623): Homolog of NCBI NO: 37531886 NR Description: putative phosphoglucomutase
  misc_feature (13)..(623): Homolog of NCBI NO: 22725961 NR Description: putative plastidic phosphoglucomutase
  misc_feature (50)..(623): Homolog of NCBI NO: 12585317 NR Description: Phosphoglucomutase, chloroplast precursor
  misc_feature (29)..(623): Homolog of NCBI NO: 12585295 NR Description: Phosphoglucomutase, chloroplast precursor
  misc_feature (1)..(623): Homolog of NCBI NO: 12585325 NR Description: Phosphoglucomutase, chloroplast precursor
  misc_feature (160)..(160): Xaa is any aa, unknown or other
  misc_feature (177)..(177): Xaa is any aa, unknown or other
  misc_feature (181)..(181): Xaa is any aa, unknown or other
MTSTYTRFDTVFLFSRFAGAKYSPLLPSPSFTLSTSGIHLRTKPNSRFHSIIASSSSSSVVAGTDSIEIKSLPTKPIEGQKTGTSGLRKKVKVFMEENYLANWIQALFNSLPPEDYKNATLVLGGDGRYFNKEASQIIIKIAAGNGVGQILVGKEGILSXPAVSAVIRKRKANGGFXMSAXHNPGGPEYDWGIKFNYSSGQPAPETITDKIYGNTLSISEIKVAEIPDIDLSQVGVTKYGNFSVEVIDPVSDYLELMEDVFDFDLIRGLLSRSDFGFMFDAMHAVTGAYAKPIFVDNLGAKPDSISNGVPLEDFGHGHPDPNLTYAKDLVDVMYRDNGPDFGAASDGDGDRNMVLGNKFFVTPSDSVAIIAANAQEAIPYFRAGPKGLARSMPTSGALDRVAEKLKLPFFEVPTGWKFFGNLMDAGKLSICGEESFGTGSDHIREKDGIWAVLAWLSILAHRNKDTKPGDKLVSVADVVKEYWATYGRNFFSRYDYEECESEGANKMIEYLREILSKSKAGDVYGNYVLQFADDFSYTDPVDGSVASKQGVRFVFTDGSRIIFRLSGTGSAGATVRIYIEQFEPDVSKHDVDAQIALKPLIDLALSVSKLKDFTGREKPTVIT

SEQ ID NO: 47121 - protein, 529 aa, Arabidopsis thaliana
  peptide (1)..(529): Ceres Seq. ID no. 15219488
  misc_feature (268)..(392): Pfam Name: Phosphoglucomutase/phosphomannomutase, Pfam Description: Phosphoglucomutase/phosphomannomutase,
  misc_feature (1)..(529): Homolog of NCBI NO: 33416468 NR Description: Unknown (protein for IMAGE:6403536) [Mus musculus]
  misc_feature (1)..(529): Homolog of NCBI NO: 33876434 NR Description: PGM1 protein [Homo sapiens]
  misc_feature (1)..(529): Homolog of NCBI NO: 12585330 NR Description: Phosphoglucomutase, cytoplasmic (Glucose
  misc_feature (1)..(529): Homolog of NCBI NO: 12643355 NR Description: Probable phosphoglucomutase, cytoplasmic 1
  misc_feature (1)..(529): Homolog of NCBI NO: 12585326 NR Description: Phosphoglucomutase, cytoplasmic (Glucose
  misc_feature (1)..(529): Homolog of NCBI NO: 37531886 NR Description: putative phosphoglucomutase
  misc_feature (1)..(529): Homolog of NCBI NO: 22725961 NR Description: putative plastidic phosphoglucomutase
  misc_feature (1)..(529): Homolog of NCBI NO: 12585317 NR Description: Phosphoglucomutase, chloroplast precursor
  misc_feature (1)..(529): Homolog of NCBI NO: 12585295 NR Description: Phosphoglucomutase, chloroplast precursor
  misc_feature (1)..(529): Homolog of NCBI NO: 12585325 NR Description: Phosphoglucomutase, chloroplast precursor
  misc_feature (66)..(66): Xaa is any aa, unknown or other
  misc_feature (83)..(83): Xaa is any aa, unknown or other
  misc_feature (87)..(87): Xaa is any aa, unknown or other
MEENYLANWIQALFNSLPPEDYKNATLVLGGDGRYFNKEASQIIIKIAAGNGVGQILVGKEGILSXPAVSAVIRKRKANGGFXMSAXHNPGGPEYDWGIKFNYSSGQPAPETITDKIYGNTLSISEIKVAEIPDIDLSQVGVTKYGNFSVEVIDPVSDYLELMEDVFDFDLIRGLLSRSDFGFMFDAMHAVTGAYAKPIFVDNLGAKPDSISNGVPLEDFGHGHPDPNLTYAKDLVDVMYRDNGPDFGAASDGDGDRNMVLGNKFFVTPSDSVAIIAANAQEAIPYFRAGPKGLARSMPTSGALDRVAEKLKLPFFEVPTGWKFFGNLMDAGKLSICGEESFGTGSDHIREKDGIWAVLAWLSILAHRNKDTKPGDKLVSVADVVKEYWATYGRNFFSRYDYEECESEGANKMIEYLREILSKSKAGDVYGNYVLQFADDFSYTDPVDGSVASKQGVRFVFTDGSRIIFRLSGTGSAGATVRIYIEQFEPDVSKHDVDAQIALKPLIDLALSVSKLKDFTGREKPTVIT

SEQ ID NO: 47122 - protein, 446 aa, Arabidopsis thaliana
  peptide (1)..(446): Ceres Seq. ID no. 15219489
  misc_feature (185)..(309): Pfam Name: Phosphoglucomutase/phosphomannomutase, Pfam Description: Phosphoglucomutase/phosphomannomutase,
  misc_feature (1)..(446): Homolog of NCBI NO: 33416468 NR Description: Unknown (protein for IMAGE:6403536) [Mus musculus]
  misc_feature (1)..(446): Homolog of NCBI NO: 33876434 NR Description: PGM1 protein [Homo sapiens]
  misc_feature (1)..(446): Homolog of NCBI NO: 12585330 NR Description: Phosphoglucomutase, cytoplasmic (Glucose
  misc_feature (1)..(446): Homolog of NCBI NO: 12643355 NR Description: Probable phosphoglucomutase, cytoplasmic 1
  misc_feature (1)..(446): Homolog of NCBI NO: 12585326 NR Description: Phosphoglucomutase, cytoplasmic (Glucose
  misc_feature (1)..(446): Homolog of NCBI NO: 37531886 NR Description: putative phosphoglucomutase
  misc_feature (1)..(446): Homolog of NCBI NO: 22725961 NR Description: putative plastidic phosphoglucomutase
  misc_feature (1)..(446): Homolog of NCBI NO: 12585317 NR Description: Phosphoglucomutase, chloroplast precursor
  misc_feature (1)..(446): Homolog of NCBI NO: 12585295 NR Description: Phosphoglucomutase, chloroplast precursor
  misc_feature (1)..(446): Homolog of NCBI NO: 12585325 NR Description: Phosphoglucomutase, chloroplast precursor
  misc_feature (4)..(4): Xaa is any aa, unknown or other
MSAXHNPGGPEYDWGIKFNYSSGQPAPETITDKIYGNTLSISEIKVAEIPDIDLSQVGVTKYGNFSVEVIDPVSDYLELMEDVFDFDLIRGLLSRSDFGFMFDAMHAVTGAYAKPIFVDNLGAKPDSISNGVPLEDFGHGHPDPNLTYAKDLVDVMYRDNGPDFGAASDGDGDRNMVLGNKFFVTPSDSVAIIAANAQEAIPYFRAGPKGLARSMPTSGALDRVAEKLKLPFFEVPTGWKFFGNLMDAGKLSICGEESFGTGSDHIREKDGIWAVLAWLSILAHRNKDTKPGDKLVSVADVVKEYWATYGRNFFSRYDYEECESEGANKMIEYLREILSKSKAGDVYGNYVLQFADDFSYTDPVDGSVASKQGVRFVFTDGSRIIFRLSGTGSAGATVRIYIEQFEPDVSKHDVDAQIALKPLIDLALSVSKLKDFTGREKPTVIT

SEQ ID NO: 47123 - DNA, 1237 bp, Arabidopsis thaliana
  misc_feature (1)..(1237): Ceres Seq. ID no. 13588261
  misc_feature: MA Experiment ID: 20000166 Result: Up-regulated in Transcription
  misc_feature: MA Experiment 20000166 PARAMETER Experiment Name: At_100uM_ABA_P Parameter: Age (day) Value: 14
  misc_feature: MA Experiment 20000166 PARAMETER Experiment Name: At_100uM_ABA_P Parameter: Organism Value: A. thaliana
  misc_feature: MA Experiment 20000166 PARAMETER Experiment Name: At_100uM_ABA_P Parameter: Plant Line Value: WS
  misc_feature: MA Experiment 20000166 PARAMETER Experiment Name: At_100uM_ABA_P Parameter: Timepoint (hr) Value: 1
  misc_feature: MA Experiment 20000166 PARAMETER Experiment Name: At_100uM_ABA_P Parameter: Tissue Value: Aerial
  misc_feature: MA Experiment 20000166 PARAMETER Experiment Name: At_100uM_ABA_P Parameter: Treatment Value: 100uM ABA vs. No Treatment
  misc_feature: MA Experiment ID: 20000184 Result: Down-regulated in Transcription
  misc_feature: MA Experiment 20000184 PARAMETER Experiment Name: At_Shoots__P Parameter: Age (day) Value: 7
  misc_feature: MA Experiment 20000184 PARAMETER Experiment Name: At_Shoots__P Parameter: Tissue Value: Shoots vs. Whole Plant
aacataaattaagttttttttgtccttttctgcctttacctttccttctactcccgaaaaagcactgactttgctctgtttccttcgttcacacagagaaagagagaaatcttctgagcgaaattctgacaaaagagatgatggaatgggataatcagctacaacccaataaccatcactcttctaatcttcaagggatcgacgttaatggcggctccggcgccggaggaggaatgtacgtgaaggtgatgaccgatgagcagtatgaaactctcaggaaacagattgctatttacggcaccatttgtgagcgtcttgttgagatgcataaaactctcactgctcaacaagatcttgcaggagggagaatgggaggactatatgcagacccaatgatgtcatctttaggtcataagatgacagctagacagaggtggactcctacgccagtccagcttcagattctggaacgtatattcgatcaaggcacgggaacaccgagcaagcagaagatcaaagacataacagaagagctgagccaacacggccagattgctgaacaaaatgtctataactggttccagaaccgacgtgctcgatccaagaggaagcagcatggtggaggttcttctggaaataataatggtgagtctgaggtagagactgaagttgaagcattgaatgagaagagagtagtgaggccagagagtcttcttggtcttccagatggaaatagcaacaataatgggttagggacaacaacagcaacaactactgctcctaggcctgaagatctttgctttcagagccctgagattagctcagaccttcacttgctagatgttctatcaaacccaagggatgagcatcttgttggaaagatgggactggcggaaagttacaacctttatgatcatgttgaagattatggcatgtcaggctgattgaatacaagctgaggaaacttctaattatcagagagatcaatgaaatggatttggtagtcagtcataagcagtattagacttttgtttttcttaaattgtttctttcagggcttattaaagaaacaagtagtttatcttattaatcattttcagagaaacatttacatggattgttgaatcgtcttgtgatgcttgctttgataatttctgcattcagaacgatttttacatccttaaatgaattatactgtaagaaataaaaaaattccaagagaaaaacatttcaattc

SEQ ID NO: 47124 - protein, 268 aa, Arabidopsis thaliana
  peptide (1)..(268): Ceres Seq. ID no. 13588262
  misc_feature (96)..(157): Pfam Name: Homeobox domain Pfam Description: Homeobox domain
  misc_feature (32)..(159): Homolog of NCBI NO: 15218015 NR Description: homeodomain protein [Arabidopsis thaliana]
  misc_feature (15)..(177): Homolog of NCBI NO: 30686974 NR Description: homeodomain protein PALE-2, putative [Arabidopsis
  misc_feature (30)..(200): Homolog of NCBI NO: 40233067 NR Description: homeodomain protein HB1 [Populus tomentosa]
  misc_feature (30)..(200): Homolog of NCBI NO: 3955019 NR Description: HB1 homeodomain protein [Populus tremula x
  misc_feature (2)..(200): Homolog of NCBI NO: 34909272 NR Description: putative HB2 homeodomain protein
  misc_feature (210)..(268): Homolog of NCBI NO: 40233087 NR Description: homeodomain protein HB2 [Populus tomentosa]
  misc_feature (2)..(190): Homolog of NCBI NO: 40233087 NR Description: homeodomain protein HB2 [Populus tomentosa]
  misc_feature (210)..(268): Homolog of NCBI NO: 3955021 NR Description: HB2 homeodomain protein [Populus tremula x
  misc_feature (2)..(190): Homolog of NCBI NO: 3955021 NR Description: HB2 homeodomain protein [Populus tremula x
  misc_feature (1)..(268): Homolog of NCBI NO: 15237035 NR Description: homeodomain protein HB2, putative [Arabidopsis
MMEWDNQLQPNNHHSSNLQGIDVNGGSGAGGGMYVKVMTDEQYETLRKQIAIYGTICERLVEMHKTLTAQQDLAGGRMGGLYADPMMSSLGHKMTARQRWTPTPVQLQILERIFDQGTGTPSKQKIKDITEELSQHGQIAEQNVYNWFQNRRARSKRKQHGGGSSGNNNGESEVETEVEALNEKRVVRPESLLGLPDGNSNNNGLGTTTATTTAPRPEDLCFQSPEISSDLHLLDVLSNPRDEHLVGKMGLAESYNLYDHVEDYGMSG

SEQ ID NO: 47125 - protein, 267 aa, Arabidopsis thaliana
  peptide (1)..(267): Ceres Seq. ID no. 13588263
  misc_feature (95)..(156): Pfam Name: Homeobox domain Pfam Description: Homeobox domain
  misc_feature (31)..(158): Homolog of NCBI NO: 15218015 NR Description: homeodomain protein [Arabidopsis thaliana]
  misc_feature (14)..(176): Homolog of NCBI NO: 30686974 NR Description: homeodomain protein PALE-2, putative [Arabidopsis
  misc_feature (29)..(199): Homolog of NCBI NO: 40233067 NR Description: homeodomain protein HB1 [Populus tomentosa]
  misc_feature (29)..(199): Homolog of NCBI NO: 3955019 NR Description: HB1 homeodomain protein [Populus tremula x
  misc_feature (1)..(199): Homolog of NCBI NO: 34909272 NR Description: putative HB2 homeodomain protein
  misc_feature (209)..(267): Homolog of NCBI NO: 40233087 NR Description: homeodomain protein HB2 [Populus tomentosa]
  misc_feature (1)..(189): Homolog of NCBI NO: 40233087 NR Description: homeodomain protein HB2 [Populus tomentosa]
  misc_feature (209)..(267): Homolog of NCBI NO: 3955021 NR Description: HB2 homeodomain protein [Populus tremula x
  misc_feature (1)..(189): Homolog of NCBI NO: 3955021 NR Description: HB2 homeodomain protein [Populus tremula x
  misc_feature (1)..(267): Homolog of NCBI NO: 15237035 NR Description: homeodomain protein HB2, putative [Arabidopsis
MEWDNQLQPNNHHSSNLQGIDVNGGSGAGGGMYVKVMTDEQYETLRKQIAIYGTICERLVEMHKTLTAQQDLAGGRMGGLYADPMMSSLGHKMTARQRWTPTPVQLQILERIFDQGTGTPSKQKIKDITEELSQHGQIAEQNVYNWFQNRRARSKRKQHGGGSSGNNNGESEVETEVEALNEKRVVRPESLLGLPDGNSNNNGLGTTTATTTAPRPEDLCFQSPEISSDLHLLDVLSNPRDEHLVGKMGLAESYNLYDHVEDYGMSG

SEQ ID NO: 47126 - protein, 236 aa, Arabidopsis thaliana
  peptide (1)..(236): Ceres Seq. ID no. 13588264
  misc_feature (64)..(125): Pfam Name: Homeobox domain Pfam Description: Homeobox domain
  misc_feature (1)..(127): Homolog of NCBI NO: 15218015 NR Description: homeodomain protein [Arabidopsis thaliana]
  misc_feature (1)..(145): Homolog of NCBI NO: 30686974 NR Description: homeodomain protein PALE-2, putative [Arabidopsis
  misc_feature (1)..(168): Homolog of NCBI NO: 40233067 NR Description: homeodomain protein HB1 [Populus tomentosa]
  misc_feature (1)..(168): Homolog of NCBI NO: 3955019 NR Description: HB1 homeodomain protein [Populus tremula x
  misc_feature (1)..(168): Homolog of NCBI NO: 34909272 NR Description: putative HB2 homeodomain protein
  misc_feature (178)..(236): Homolog of NCBI NO: 40233087 NR Description: homeodomain protein HB2 [Populus tomentosa]
  misc_feature (1)..(158): Homolog of NCBI NO: 40233087 NR Description: homeodomain protein HB2 [Populus tomentosa]
  misc_feature (178)..(236): Homolog of NCBI NO: 3955021 NR Description: HB2 homeodomain protein [Populus tremula x
  misc_feature (1)..(158): Homolog of NCBI NO: 3955021 NR Description: HB2 homeodomain protein [Populus tremula x
  misc_feature (1)..(236): Homolog of NCBI NO: 15237035 NR Description: homeodomain protein HB2, putative [Arabidopsis
MYVKVMTDEQYETLRKQIAIYGTICERLVEMHKTLTAQQDLAGGRMGGLYADPMMSSLGHKMTARQRWTPTPVQLQILERIFDQGTGTPSKQKIKDITEELSQHGQIAEQNVYNWFQNRRARSKRKQHGGGSSGNNNGESEVETEVEALNEKRVVRPESLLGLPDGNSNNNGLGTTTATTTAPRPEDLCFQSPEISSDLHLLDVLSNPRDEHLVGKMGLAESYNLYDHVEDYGMSG

SEQ ID NO: 47127 - DNA, 2704 bp, Arabidopsis thaliana
  misc_feature (1)..(2704): Ceres Seq. ID no. 12592568
  misc_feature: MA Experiment ID: 20000227 Result: Down-regulated in Transcription
  misc_feature: MA Experiment 20000227 PARAMETER Experiment Name: At_Root-Tips-vs-Tops_P Parameter: Tissue Value: Root Tips vs. Root Tops
  misc_feature: MA Experiment ID: 20000235 Result: Up-regulated in Transcription
  misc_feature: MA Experiment 20000235 PARAMETER Experiment Name: At_Siliques_P Parameter: Age (day) Value: 21
  misc_feature: MA Experiment 20000235 PARAMETER Experiment Name: At_Siliques_P Parameter: Organism Value: A. thaliana
  misc_feature: MA Experiment 20000235 PARAMETER Experiment Name: At_Siliques_P Parameter: Plant Line Value: WS
  misc_feature: MA Experiment 20000235 PARAMETER Experiment Name: At_Siliques_P Parameter: Tissue Value: 5-10mm Siliques vs. Whole Plant
  misc_feature: MA Experiment ID: 20000286 Result: Up-regulated in Transcription
  misc_feature: MA Experiment 20000286 PARAMETER Experiment Name: At_Open_Flower_P Parameter: Age (day) Value: 21
  misc_feature: MA Experiment 20000286 PARAMETER Experiment Name: At_Open_Flower_P Parameter: Plant Line Value: WS
  misc_feature: MA Experiment 20000286 PARAMETER Experiment Name: At_Open_Flower_P Parameter: Tissue Value: Half Open vs. Whole Plant
  misc_feature: MA Experiment ID: 20000794 Result: Up-regulated in Transcription
  misc_feature: MA Experiment 20000794 PARAMETER Experiment Name: At_Petals_P Parameter: Age (day) Value: 23-25 days
  misc_feature: MA Experiment 20000794 PARAMETER Experiment Name: At_Petals_P Parameter: Plant Line Value: WS
  misc_feature: MA Experiment 20000794 PARAMETER Experiment Name: At_Petals_P Parameter: Tissue Value: Petals vs. Whole plant
  misc_feature: MA Experiment ID: 20001911 Result: Down-regulated in Transcription
  misc_feature: MA Experiment 20001911 PARAMETER Experiment Name: At_Drought_Reproduction_P Parameter: Age (day) Value: 40
  misc_feature: MA Experiment 20001911 PARAMETER Experiment Name: At_Drought_Reproduction_P Parameter: Organism Value: A. thaliana
  misc_feature: MA Experiment 20001911 PARAMETER Experiment Name: At_Drought_Reproduction_P Parameter: Plant Line Value: WS
  misc_feature: MA Experiment 20001911 PARAMETER Experiment Name: At_Drought_Reproduction_P Parameter: Timepoint (day) Value: 10
  misc_feature: MA Experiment 20001911 PARAMETER Experiment Name: At_Drought_Reproduction_P Parameter: Tissue Value: Flowers
  misc_feature: MA Experiment 20001911 PARAMETER Experiment Name: At_Drought_Reproduction_P Parameter: Treatment Value: Drought vs. No Drought
atggcgtttccaataaatctaacccaaacccttctcttcttcttctgccctcttcttcatctctctttcgctgctttcactccaactgataattatctcatcaattccggttctaacaccaatacatctttcttcacaacccgttcttttctcagcgactcttcagaacctggctcgagttttctctccaccgatcgatccatctcgatttctgacacgaacccatctccagattcacccgttttgtacaacacagctcgtgttttccccgtcggaggatcatacaaattccaagtcactaccaaaggcactcactttatccgtctccatttcgcgccttttaaagcttcgagatttaacttaaggtctgctaaatttcgagttttgattaatgggttctctgtgattaacagtttcagtactagctccgtcgttgttaaagaattcatactcaaaatcgatgaccctgttttagagatttcgtttttgccctttaaagcttctggatttgggtttgttaatgcggttgaagtgttttcagcacctaaggattatataatggatcaaggaacgaagcttgtgattcctaactctgctcaaatctttagtaacttgtcatctcaagttcttgagactgttcatagaatcaacgttggtggttcgaaattgacgccgtttaatgatacgttgtggaggacttgggttgttgatgacaactatcttctcttgagagctgctgctagacgtgcttggactactcattctccgaattatcaaaacggtggtgccacgagagagattgctccggataatgtttatatgactgctcaggagatggatcgagataatcaggagttgcaggcaaggtttaacattagttgggggtttcaggttgatgagaaacgagttcttcatttggttcgtttgcatttctgcgatatcgttagttcgtcgcttaatcagctctatttcaatgtctttatcaatgagtatcttgcgtttaaggatgttgatctctccacgcttactttccatgtgcttgcgtctccgttgtacattgattttgttgcggagtctgatcgttctggaatgttgaggattagtgttggaccgtctgatcttagtaatccggcgagagttaatgctctattgaatggagttgagatcatgaggattttgagccctgtgagttctgaagtggtatctggaaagaggaatgttgtctggatcgtggttggctcggttttgggaggttttgtgttcttgtcgctgttcttcttgagcgttttgtgcttgtgcaggcgcaagaacaacaagacgaggagttcagagagcacgggatggacacctttgaggaggtttagaggcagttccaatagtagaacaactgaaagaactgttagttctagtggctaccatactctgagaatctcgttcgcggagttacaatccggaaccaataactttgatagaagtttagttatcggagttggcggattcgggatggtttttagagggtctcttaaagacaacaccaaagtagctgtgaagagaggctctcctggttcaagacagggcttaccagagtttctctctgagataaccattctctctaagatccgtcatcgccatctagtttcacttgttgggtattgcgaagaacagtctgagatgattcttgtttatgagtacatggataaaggaccactcaaaagtcacttatacggatccaccaacccgcctttatcttggaaacaacggcttgaggtctgcattggtgcagccagaggacttcattaccttcacaccggttcttcgcaaggaatcatccaccgggatatcaaatccaccaatatcttactagataacaactatgtagccaaagttgcagactttggactctcaagatccggtccttgtattgatgagacacatgtgagcaccggtgtaaaaggaagctttggatatcttgatcctgaatacttcagaagacaacagctcacggataagtccgatgtttattcatttggtgttgttctttttgaagttctttgcgctagacccgctgttgatccgttgcttgttagggagcaagtaaatttagcagaatgggcaatagagtggcaaaggaaagggatgcttgatcagatcgttgatccgaatatcgcagatgaaatcaaaccgtgctcgttgaagaaattcgctgaaaccgcagagaaatgctgtgcggattacggtgtagatagaccgacaattggcgatgttctatggaacttagaacatgtgcttcagcttcaagaatccggaccattgaacattcctgaagaagattatggagatgttaccgacccgagaacggctcggcaaggtctgtctaatggctcgaacatagagagagactatggagatggaacttcaggcataatcagtagcacccaagtgttctctcagctaatgaccaacgctgggagataaattaaagtcattgctatatagagcaagtatttatcatagtcatagagtacaatacctaaaccgggaaaccaaagcggtgtaccggtatctcagattcggttcgtgtttggtataattttgtttggtttctgtaacttgtagagctatgattgttcatttgatatggatgaatcataaaccgttaaaaccagtacattatttggttaaatattaaaccggttaagagtgg

SEQ ID NO: 47128 - protein, 824 aa, Arabidopsis thaliana
  peptide (1)..(824): Ceres Seq. ID no. 12592569
  misc_feature (24)..(824): Homolog of NCBI NO: 25553554 NR Description: OSJNBa0038F22.1 [Oryza sativa (japonica
  misc_feature (24)..(768): Homolog of NCBI NO: 15226565 NR Description: putative protein kinase; protein id: At2g21480.1
  misc_feature (26)..(784): Homolog of NCBI NO: 15234944 NR Description: putative receptor-like protein kinase; protein
  misc_feature (445)..(776): Homolog of NCBI NO: 15240228 NR Description: receptor-like protein kinase precursor - like
  misc_feature (10)..(504): Homolog of NCBI NO: 15240228 NR Description: receptor-like protein kinase precursor - like
  misc_feature (493)..(824): Homolog of NCBI NO: 19347928 NR Description: putative receptor-protein kinase [Arabidopsis
  misc_feature (438)..(771): Homolog of NCBI NO: 14488367 NR Description: putative protein kinase [Oryza sativa (japonica
  misc_feature (26)..(500): Homolog of NCBI NO: 14488367 NR Description: putative protein kinase [Oryza sativa (japonica
  misc_feature (18)..(824): Homolog of NCBI NO: 15238498 NR Description: receptor-like protein kinase precursor - like
  misc_feature (7)..(824): Homolog of NCBI NO: 15231393 NR Description: receptor protein kinase -like; protein id:
MAFPINLTQTLLFFFCPLLHLSFAAFTPTDNYLINSGSNTNTSFFTTRSFLSDSSEPGSSFLSTDRSISISDTNPSPDSPVLYNTARVFPVGGSYKFQVTTKGTHFIRLHFAPFKASRFNLRSAKFRVLINGFSVINSFSTSSVVVKEFILKIDDPVLEISFLPFKASGFGFVNAVEVFSAPKDYIMDQGTKLVIPNSAQIFSNLSSQVLETVHRINVGGSKLTPFNDTLWRTWVVDDNYLLLRAAARRAWTTHSPNYQNGGATREIAPDNVYMTAQEMDRDNQELQARFNISWGFQVDEKRVLHLVRLHFCDIVSSSLNQLYFNVFINEYLAFKDVDLSTLTFHVLASPLYIDFVAESDRSGMLRISVGPSDLSNPARVNALLNGVEIMRILSPVSSEVVSGKRNVVWIVVGSVLGGFVFLSLFFLSVLCLCRRKNNKTRSSESTGWTPLRRFRGSSNSRTTERTVSSSGYHTLRISFAELQSGTNNFDRSLVIGVGGFGMVFRGSLKDNTKVAVKRGSPGSRQGLPEFLSEITILSKIRHRHLVSLVGYCEEQSEMILVYEYMDKGPLKSHLYGSTNPPLSWKQRLEVCIGAARGLHYLHTGSSQGIIHRDIKSTNILLDNNYVAKVADFGLSRSGPCIDETHVSTGVKGSFGYLDPEYFRRQQLTDKSDVYSFGVVLFEVLCARPAVDPLLVREQVNLAEWAIEWQRKGMLDQIVDPNIADEIKPCSLKKFAETAEKCCADYGVDRPTIGDVLWNLEHVLQLQESGPLNIPEEDYGDVTDPRTARQGLSNGSNIERDYGDGTSGIISSTQVFSQLMTNAGR

SEQ ID NO: 47129 - protein, 638 aa, Arabidopsis thaliana
  peptide (1)..(638): Ceres Seq. ID no. 12592570
  misc_feature (1)..(638): Homolog of NCBI NO: 25553554 NR Description: OSJNBa0038F22.1 [Oryza sativa (japonica
  misc_feature (1)..(582): Homolog of NCBI NO: 15226565 NR Description: putative protein kinase; protein id: At2g21480.1
  misc_feature (1)..(598): Homolog of NCBI NO: 15234944 NR Description: putative receptor-like protein kinase; protein
  misc_feature (259)..(590): Homolog of NCBI NO: 15240228 NR Description: receptor-like protein kinase precursor - like
  misc_feature (1)..(318): Homolog of NCBI NO: 15240228 NR Description: receptor-like protein kinase precursor - like
  misc_feature (307)..(638): Homolog of NCBI NO: 19347928 NR Description: putative receptor-protein kinase [Arabidopsis
  misc_feature (252)..(585): Homolog of NCBI NO: 14488367 NR Description: putative protein kinase [Oryza sativa (japonica
  misc_feature (1)..(314): Homolog of NCBI NO: 14488367 NR Description: putative protein kinase [Oryza sativa (japonica
  misc_feature (1)..(638): Homolog of NCBI NO: 15238498 NR Description: receptor-like protein kinase precursor - like
  misc_feature (1)..(638): Homolog of NCBI NO: 15231393 NR Description: receptor protein kinase -like; protein id:
MDQGTKLVIPNSAQIFSNLSSQVLETVHRINVGGSKLTPFNDTLWRTWVVDDNYLLLRAAARRAWTTHSPNYQNGGATREIAPDNVYMTAQEMDRDNQELQARFNISWGFQVDEKRVLHLVRLHFCDIVSSSLNQLYFNVFINEYLAFKDVDLSTLTFHVLASPLYIDFVAESDRSGMLRISVGPSDLSNPARVNALLNGVEIMRILSPVSSEVVSGKRNVVWIVVGSVLGGFVFLSLFFLSVLCLCRRKNNKTRSSESTGWTPLRRFRGSSNSRTTERTVSSSGYHTLRISFAELQSGTNNFDRSLVIGVGGFGMVFRGSLKDNTKVAVKRGSPGSRQGLPEFLSEITILSKIRHRHLVSLVGYCEEQSEMILVYEYMDKGPLKSHLYGSTNPPLSWKQRLEVCIGAARGLHYLHTGSSQGIIHRDIKSTNILLDNNYVAKVADFGLSRSGPCIDETHVSTGVKGSFGYLDPEYFRRQQLTDKSDVYSFGVVLFEVLCARPAVDPLLVREQVNLAEWAIEWQRKGMLDQIVDPNIADEIKPCSLKKFAETAEKCCADYGVDRPTIGDVLWNLEHVLQLQESGPLNIPEEDYGDVTDPRTARQGLSNGSNIERDYGDGTSGIISSTQVFSQLMTNAGR

SEQ ID NO: 47130 - protein, 551 aa, Arabidopsis thaliana
  peptide (1)..(551): Ceres Seq. ID no. 12592571
  misc_feature (1)..(551): Homolog of NCBI NO: 25553554 NR Description: OSJNBa0038F22.1 [Oryza sativa (japonica
  misc_feature (1)..(495): Homolog of NCBI NO: 15226565 NR Description: putative protein kinase; protein id: At2g21480.1
  misc_feature (1)..(511): Homolog of NCBI NO: 15234944 NR Description: putative receptor-like protein kinase; protein
  misc_feature (172)..(503): Homolog of NCBI NO: 15240228 NR Description: receptor-like protein kinase precursor - like
  misc_feature (1)..(231): Homolog of NCBI NO: 15240228 NR Description: receptor-like protein kinase precursor - like
  misc_feature (220)..(551): Homolog of NCBI NO: 19347928 NR Description: putative receptor-protein kinase [Arabidopsis
  misc_feature (165)..(498): Homolog of NCBI NO: 14488367 NR Description: putative protein kinase [Oryza sativa (japonica
  misc_feature (1)..(227): Homolog of NCBI NO: 14488367 NR Description: putative protein kinase [Oryza sativa (japonica
  misc_feature (1)..(551): Homolog of NCBI NO: 15238498 NR Description: receptor-like protein kinase precursor - like
  misc_feature (1)..(551): Homolog of NCBI NO: 15231393 NR Description: receptor protein kinase -like; protein id:
MTAQEMDRDNQELQARFNISWGFQVDEKRVLHLVRLHFCDIVSSSLNQLYFNVFINEYLAFKDVDLSTLTFHVLASPLYIDFVAESDRSGMLRISVGPSDLSNPARVNALLNGVEIMRILSPVSSEVVSGKRNVVWIVVGSVLGGFVFLSLFFLSVLCLCRRKNNKTRSSESTGWTPLRRFRGSSNSRTTERTVSSSGYHTLRISFAELQSGTNNFDRSLVIGVGGFGMVFRGSLKDNTKVAVKRGSPGSRQGLPEFLSEITILSKIRHRHLVSLVGYCEEQSEMILVYEYMDKGPLKSHLYGSTNPPLSWKQRLEVCIGAARGLHYLHTGSSQGIIHRDIKSTNILLDNNYVAKVADFGLSRSGPCIDETHVSTGVKGSFGYLDPEYFRRQQLTDKSDVYSFGVVLFEVLCARPAVDPLLVREQVNLAEWAIEWQRKGMLDQIVDPNIADEIKPCSLKKFAETAEKCCADYGVDRPTIGDVLWNLEHVLQLQESGPLNIPEEDYGDVTDPRTARQGLSNGSNIERDYGDGTSGIISSTQVFSQLMTNAGR

SEQ ID NO: 47131 - DNA, 1697 bp, Arabidopsis thaliana; identical to SEQ ID NO: 42629
  misc_feature (1)..(1697): Ceres Seq. ID no. 12602431
  misc_feature: MA Experiment ID: 20000794 Result: Up-regulated in Transcription
  misc_feature: MA Experiment 20000794 PARAMETER Experiment Name: At_Petals_P Parameter: Age (day) Value: 23-25 days
  misc_feature: MA Experiment 20000794 PARAMETER Experiment Name: At_Petals_P Parameter: Plant Line Value: WS
  misc_feature: MA Experiment 20000794 PARAMETER Experiment Name: At_Petals_P Parameter: Tissue Value: Petals vs. Whole plant
  misc_feature: MA Experiment ID: 20001451 Result: Down-regulated in Transcription
  misc_feature: MA Experiment 20001451 PARAMETER Experiment Name: At_Far-red-induction_P Parameter: Age (day) Value: 7
  misc_feature: MA Experiment 20001451 PARAMETER Experiment Name: At_Far-red-induction_P Parameter: Light Value: Far-red vs. White
  misc_feature: MA Experiment 20001451 PARAMETER Experiment Name: At_Far-red-induction_P Parameter: Organism Value: A. thaliana
  misc_feature: MA Experiment 20001451 PARAMETER Experiment Name: At_Far-red-induction_P Parameter: Plant Line Value: Columbia
  misc_feature: MA Experiment 20001451 PARAMETER Experiment Name: At_Far-red-induction_P Parameter: Timepoint (hr) Value: 24
  misc_feature: MA Experiment 20001451 PARAMETER Experiment Name: At_Far-red-induction_P Parameter: Tissue Value: Whole Plant

SEQ ID NO: 47132 - protein, 407 aa, Arabidopsis thaliana; identical to SEQ ID NO: 42630
  peptide (1)..(407): Ceres Seq. ID no. 12602432
  misc_feature (265)..(303): Pfam Name: Helix-loop-helix DNA-binding domain Pfam Description: Helix-loop-helix DNA-binding domain
  misc_feature (265)..(303): Pfam Name: Helix-loop-helix DNA-binding domain Pfam Description: Helix-loop-helix DNA-binding domain
  misc_feature (248)..(313): Homolog of NCBI NO: 21536756 NR Description: unknown [Arabidopsis thaliana]
  misc_feature (248)..(313): Homolog of NCBI NO: 18402256 NR Description: expressed protein
  misc_feature (364)..(400): Homolog of NCBI NO: 21740790 NR Description: OSJNBb0091E11.4 [Oryza sativa (japonica
  misc_feature (211)..(313): Homolog of NCBI NO: 21740790 NR Description: OSJNBb0091E11.4 [Oryza sativa (japonica
  misc_feature (1)..(280): Homolog of NCBI NO: 33111977 NR Description: putative bHLH133 transcription factor
  misc_feature (248)..(313): Homolog of NCBI NO: 21536756 NR Description: unknown [Arabidopsis thaliana]
  misc_feature (364)..(400): Homolog of NCBI NO: 21740790 NR Description: OSJNBb0091E11.4 [Oryza sativa (japonica
  misc_feature (1)..(280): Homolog of NCBI NO: 33111977 NR Description: putative bHLH133 transcription factor
  misc_feature (1)..(407): Homolog of NCBI NO: 15233452 NR Description: putative protein
  misc_feature (42)..(407): Homolog of NCBI NO: 11045087 NR Description: putative protein [Brassica napus]
  misc_feature (1)..(209): Homolog of NCBI NO: 11045087 NR Description: putative protein [Brassica napus]
  misc_feature (137)..(403): Homolog of NCBI NO: 33111977 NR Description: putative bHLH133 transcription factor
  misc_feature (1)..(228): Homolog of NCBI NO: 15225300 NR Description: unknown protein; protein id: At2g20090.1
  misc_feature (211)..(313): Homolog of NCBI NO: 21740790 NR Description: OSJNBb0091E11.4 [Oryza sativa (japonica
  misc_feature (248)..(313): Homolog of NCBI NO: 18402256 NR Description: expressed protein
  misc_feature (1)..(228): Homolog of NCBI NO: 15225300 NR Description: unknown protein; protein id: At2g20090.1
  misc_feature (137)..(403): Homolog of NCBI NO: 33111977 NR Description: putative bHLH133 transcription factor
  misc_feature (1)..(209): Homolog of NCBI NO: 11045087 NR Description: putative protein [Brassica napus]
  misc_feature (42)..(407): Homolog of NCBI NO: 11045087 NR Description: putative protein [Brassica napus]
  misc_feature (1)..(407): Homolog of NCBI NO: 15233452 NR Description: putative protein

SEQ ID NO: 47133 - protein, 393 aa, Arabidopsis thaliana; identical to SEQ ID NO: 42631
  peptide (1)..(393): Ceres Seq. ID no. 12602433
  misc_feature (251)..(289): Pfam Name: Helix-loop-helix DNA-binding domain Pfam Description: Helix-loop-helix DNA-binding domain
  misc_feature (251)..(289): Pfam Name: Helix-loop-helix DNA-binding domain Pfam Description: Helix-loop-helix DNA-binding domain
  misc_feature (234)..(299): Homolog of NCBI NO: 21536756 NR Description: unknown [Arabidopsis thaliana]
  misc_feature (234)..(299): Homolog of NCBI NO: 18402256 NR Description: expressed protein
  misc_feature (350)..(386): Homolog of NCBI NO: 21740790 NR Description: OSJNBb0091E11.4 [Oryza sativa (japonica
  misc_feature (197)..(299): Homolog of NCBI NO: 21740790 NR Description: OSJNBb0091E11.4 [Oryza sativa (japonica
  misc_feature (1)..(266): Homolog of NCBI NO: 33111977 NR Description: putative bHLH133 transcription factor
  misc_feature (234)..(299): Homolog of NCBI NO: 21536756 NR Description: unknown [Arabidopsis thaliana]
  misc_feature (350)..(386): Homolog of NCBI NO: 21740790 NR Description: OSJNBb0091E11.4 [Oryza sativa (japonica
  misc_feature (1)..(266): Homolog of NCBI NO: 33111977 NR Description: putative bHLH133 transcription factor
  misc_feature (1)..(393): Homolog of NCBI NO: 15233452 NR Description: putative protein
  misc_feature (28)..(393): Homolog of NCBI NO: 11045087 NR Description: putative protein [Brassica napus]
  misc_feature (1)..(195): Homolog of NCBI NO: 11045087 NR Description: putative protein [Brassica napus]
  misc_feature (123)..(389): Homolog of NCBI NO: 33111977 NR Description: putative bHLH133 transcription factor
  misc_feature (1)..(214): Homolog of NCBI NO: 15225300 NR Description: unknown protein; protein id: At2g20090.1
  misc_feature (197)..(299): Homolog of NCBI NO: 21740790 NR Description: OSJNBb0091E11.4 [Oryza sativa (japonica
  misc_feature (234)..(299): Homolog of NCBI NO: 18402256 NR Description: expressed protein
  misc_feature (1)..(214): Homolog of NCBI NO: 15225300 NR Description: unknown protein; protein id: At2g20090.1
  misc_feature (123)..(389): Homolog of NCBI NO: 33111977 NR Description: putative bHLH133 transcription factor
  misc_feature (1)..(195): Homolog of NCBI NO: 11045087 NR Description: putative protein [Brassica napus]
  misc_feature (28)..(393): Homolog of NCBI NO: 11045087 NR Description: putative protein [Brassica napus]
  misc_feature (1)..(393): Homolog of NCBI NO: 15233452 NR Description: putative protein

SEQ ID NO: 47134 - protein, 379 aa, Arabidopsis thaliana; identical to SEQ ID NO: 42632
  peptide (1)..(379): Ceres Seq. ID no. 12602434
  misc_feature (237)..(275): Pfam Name: Helix-loop-helix DNA-binding domain Pfam Description: Helix-loop-helix DNA-binding domain
  misc_feature (237)..(275): Pfam Name: Helix-loop-helix DNA-binding domain Pfam Description: Helix-loop-helix DNA-binding domain
  misc_feature (220)..(285): Homolog of NCBI NO: 21536756 NR Description: unknown [Arabidopsis thaliana]
  misc_feature (220)..(285): Homolog of NCBI NO: 18402256 NR Description: expressed protein
  misc_feature (336)..(372): Homolog of NCBI NO: 21740790 NR Description: OSJNBb0091E11.4 [Oryza sativa (japonica
  misc_feature (183)..(285): Homolog of NCBI NO: 21740790 NR Description: OSJNBb0091E11.4 [Oryza sativa (japonica
  misc_feature (1)..(252): Homolog of NCBI NO: 33111977 NR Description: putative bHLH133 transcription factor
  misc_feature (220)..(285): Homolog of NCBI NO: 21536756 NR Description: unknown [Arabidopsis thaliana]
  misc_feature (336)..(372): Homolog of NCBI NO: 21740790 NR Description: OSJNBb0091E11.4 [Oryza sativa (japonica
  misc_feature (1)..(252): Homolog of NCBI NO: 33111977 NR Description: putative bHLH133 transcription factor
  misc_feature (1)..(379): Homolog of NCBI NO: 15233452 NR Description: putative protein
  misc_feature (14)..(379): Homolog of NCBI NO: 11045087 NR Description: putative protein [Brassica napus]
  misc_feature (1)..(181): Homolog of NCBI NO: 11045087 NR Description: putative protein [Brassica napus]
  misc_feature (109)..(375): Homolog of NCBI NO: 33111977 NR Description: putative bHLH133 transcription factor
  misc_feature (1)..(200): Homolog of NCBI NO: 15225300 NR Description: unknown protein; protein id: At2g20090.1
  misc_feature (183)..(285): Homolog of NCBI NO: 21740790 NR Description: OSJNBb0091E11.4 [Oryza sativa (japonica
  misc_feature (220)..(285): Homolog of NCBI NO: 18402256 NR Description: expressed protein
  misc_feature (1)..(200): Homolog of NCBI NO: 15225300 NR Description: unknown protein; protein id: At2g20090.1
  misc_feature (109)..(375): Homolog of NCBI NO: 33111977 NR Description: putative bHLH133 transcription factor
  misc_feature (1)..(181): Homolog of NCBI NO: 11045087 NR Description: putative protein [Brassica napus]
  misc_feature (14)..(379): Homolog of NCBI NO: 11045087 NR Description: putative protein [Brassica napus]
  misc_feature (1)..(379): Homolog of NCBI NO: 15233452 NR Description: putative protein

SEQ ID NO: 47135 - DNA, 1746 bp, Arabidopsis thaliana
  misc_feature (1)..(1746): Ceres Seq. ID no. 13588265
  misc_feature: MA Experiment ID: 20000184 Result: Down-regulated in Transcription
  misc_feature: MA Experiment 20000184 PARAMETER Experiment Name: At_Shoots__P Parameter: Age (day) Value: 7
  misc_feature: MA Experiment 20000184 PARAMETER Experiment Name: At_Shoots__P Parameter: Tissue Value: Shoots vs. Whole Plant
  misc_feature: MA Experiment ID: 20000185 Result: Down-regulated in Transcription
  misc_feature: MA Experiment 20000185 PARAMETER Experiment Name: At_Roots__P Parameter: Age (day) Value: 7 vs. 21
  misc_feature: MA Experiment 20000185 PARAMETER Experiment Name: At_Roots__P Parameter: Organism Value: A. thaliana
  misc_feature: MA Experiment 20000185 PARAMETER Experiment Name: At_Roots__P Parameter: Tissue Value: Roots vs. Whole Plant
  misc_feature: MA Experiment ID: 20000439 Result: Down-regulated in Transcription
  misc_feature: MA Experiment 20000439 PARAMETER Experiment Name: At_Roots__P Parameter: Age (day) Value: 14 vs. 21
  misc_feature: MA Experiment 20000439 PARAMETER Experiment Name: At_Roots__P Parameter: Organism Value: A. thaliana
  misc_feature: MA Experiment 20000439 PARAMETER Experiment Name: At_Roots__P Parameter: Tissue Value: Roots vs. Whole Plant
  misc_feature: MA Experiment ID: 20001248 Result: Down-regulated in Transcription
  misc_feature: MA Experiment 20001248 PARAMETER Experiment Name: At_Far-red-induction_P Parameter: Age (day) Value: 7
  misc_feature: MA Experiment 20001248 PARAMETER Experiment Name: At_Far-red-induction_P Parameter: Light Value: Far-red vs. White
  misc_feature: MA Experiment 20001248 PARAMETER Experiment Name: At_Far-red-induction_P Parameter: Organism Value: A. thaliana
  misc_feature: MA Experiment 20001248 PARAMETER Experiment Name: At_Far-red-induction_P Parameter: Plant Line Value: Columbia
  misc_feature: MA Experiment 20001248 PARAMETER Experiment Name: At_Far-red-induction_P Parameter: Timepoint (hr) Value: 4
  misc_feature: MA Experiment 20001248 PARAMETER Experiment Name: At_Far-red-induction_P Parameter: Tissue Value: Whole Plant
  misc_feature: MA Experiment ID: 20001557 Result: Down-regulated in Transcription
  misc_feature: MA Experiment 20001557 PARAMETER Experiment Name: At_Drought_Soil_Dry_P Parameter: Age (day) Value: 27
  misc_feature: MA Experiment 20001557 PARAMETER Experiment Name: At_Drought_Soil_Dry_P Parameter: Organism Value: A. thaliana
  misc_feature: MA Experiment 20001557 PARAMETER Experiment Name: At_Drought_Soil_Dry_P Parameter: Plant Line Value: WS
  misc_feature: MA Experiment 20001557 PARAMETER Experiment Name: At_Drought_Soil_Dry_P Parameter: Post Timepoint (hr) Value: 3
  misc_feature: MA Experiment 20001557 PARAMETER Experiment Name: At_Drought_Soil_Dry_P Parameter: Post-Treatment Value: Re-Water vs. No Drought
  misc_feature: MA Experiment 20001557 PARAMETER Experiment Name: At_Drought_Soil_Dry_P Parameter: Timepoint (day) Value: 13
  misc_feature: MA Experiment 20001557 PARAMETER Experiment Name: At_Drought_Soil_Dry_P Parameter: Treatment Value: Drought vs. No Drought
acatttcgttgcagaaaacatatacttttccgacaaaacatggaagatgttaatcaggagaagaagaaagtacctccaatgtctgaaccagaaagatccacaccgattaagactacaggaggacagtatcgtttctgcaagtcatgtgttgaaggaagtagttgcaggacagtgaggtcaagaaccaagcttatgaacgttttgatagaacgtggaagacctcacgaggctcaaactgttttcaaaacattggcagagacgggacatagaccgtctttgatcagttacacaactcttttagctgcaatgacggttcagaaacagtatggttccataagctctatagtctctgaggtggaacagagcggaaccaaacttgattctatattcttcaatgctgttattaacgctttctctgagtccggtaacatggaagatgcggtgcaagctctgttgaaaatgaaagaacttggtctaaatccgactacgagtacttacaacactttgattaaagggtatgggattgcaggtaagcctgagagatcatctgagttactggatcttatgttggaagagggcaacgtcgatgttggaccgaatataaggacgtttaatgtgttggtgcaagcctggtgcaagaagaagaaggtggaggaggcgtgggaagtggtgaagaagatggaggagtgtggagttaggccggatacggtgacttataacacgattgcaacttgttatgtgcagaaaggagagaccgtgagagctgagagtgaggtggttgagaagatggttatgaaggagaaggcgaaaccgaacggaagaacgtgtgggattgttgtgggagggtattgcagagaagggagagtgagagatggtttgaggtttgtgcggagaatgaaggaaatgagagtggaagcgaatcttgtggtcttcaattctttgatcaatggctttgttgaagtcatggaccgtgatggtatcgatgaggagtgtaacgtgaaggcagatgtaatcacgtacagtactgtgatgaacgcttggagctcagctggatacatggagaaagctgcacaagtgtttaaagaaatggttaaagcaggagtcaaaccagacgctcacgcgtacagcattttagctaaagggtacgttagagcaaaagagccaaagaaagcagaggagcttcttgagacattgatagttgaatccaggcctaacgttgtgatcttcaccactgtgattagcgggtggtgtagcaatggaagtatggatgatgcaatgagggttttcaacaagatgtgcaagttcggggtttcgccaaatataaagacgtttgagactctgatgtggggttacctagaggtgaagcaaccatggaaagcagaagaagttttgcagatgatgagaggatgtggtgtaaagcctgagaattctaccttcttgctgttagcagaagcttggcgtgtcgcgggactcactgatgagtcgaacaaagctatcaatgcattgaaatgtaaagacatagagatcgcaaagttagagaagctgtaccaaaaacagtcctctggtagtagttttaacctattgcagattccagtcgggaaacgggagcttccaaccgcaaaagcgatgaatctttctgcttgtaaactcggagctcgagtgccaatcatatgccagaagcagtcccaagcacagtttgggatcagtggacagtttgtacattcttgtacagtgttcttgagctga

SEQ ID NO: 47136 - protein, 581 aa, Arabidopsis thaliana
  peptide (1)..(581): Ceres Seq. ID no. 13588266
  misc_feature (442)..(476): Pfam Name: PPR repeat Pfam Description: PPR repeat
  misc_feature (57)..(483): Homolog of NCBI NO: 15221635 NR Description: pentatricopeptide (PPR) repeat-containing protein
  misc_feature (64)..(484): Homolog of NCBI NO: 15221282 NR Description: pentatricopeptide (PPR) repeat-containing protein
  misc_feature (45)..(513): Homolog of NCBI NO: 15221282 NR Description: pentatricopeptide (PPR) repeat-containing protein
  misc_feature (42)..(501): Homolog of NCBI NO: 34904258 NR Description: Ipomoea nil leaf protein like protein
  misc_feature (8)..(531): Homolog of NCBI NO: 19071826 NR Description: PnC401 homologue [Arabidopsis thaliana]
  misc_feature (8)..(531): Homolog of NCBI NO: 30688180 NR Description: protein kinase family [Arabidopsis thaliana]
  misc_feature (8)..(531): Homolog of NCBI NO: 19071860 NR Description: SNF1-like protein kinase [Arabidopsis thaliana]
  misc_feature (33)..(523): Homolog of NCBI NO: 3107905 NR Description: leaf protein [Ipomoea nil]
  misc_feature (14)..(581): Homolog of NCBI NO: 26449475 NR Description: unknown protein [Arabidopsis thaliana]
  misc_feature (14)..(581): Homolog of NCBI NO: 30689969 NR Description: pentatricopeptide (PPR) repeat-containing protein
TFRCRKHILFRQNMEDVNQEKKKVPPMSEPERSTPIKTTGGQYRFCKSCVEGSSCRTVRSRTKLMNVLIERGRPHEAQTVFKTLAETGHRPSLISYTTLLAAMTVQKQYGSISSIVSEVEQSGTKLDSIFFNAVINAFSESGNMEDAVQALLKMKELGLNPTTSTYNTLIKGYGIAGKPERSSELLDLMLEEGNVDVGPNIRTFNVLVQAWCKKKKVEEAWEVVKKMEECGVRPDTVTYNTIATCYVQKGETVRAESEVVEKMVMKEKAKPNGRTCGIVVGGYCREGRVRDGLRFVRRMKEMRVEANLVVFNSLINGFVEVMDRDGIDEECNVKADVITYSTVMNAWSSAGYMEKAAQVFKEMVKAGVKPDAHAYSILAKGYVRAKEPKKAEELLETLIVESRPNVVIFTTVISGWCSNGSMDDAMRVFNKMCKFGVSPNIKTFETLMWGYLEVKQPWKAEEVLQMMRGCGVKPENSTFLLLAEAWRVAGLTDESNKAINALKCKDIEIAKLEKLYQKQSSGSSFNLLQIPVGKRELPTAKAMNLSACKLGARVPIICQKQSQAQFGISGQFVHSCTVFLS

SEQ ID NO: 47137 - protein, 568 aa, Arabidopsis thaliana
  peptide (1)..(568): Ceres Seq. ID no. 13588267
  misc_feature (429)..(463): Pfam Name: PPR repeat Pfam Description: PPR repeat
  misc_feature (44)..(470): Homolog of NCBI NO: 15221635 NR Description: pentatricopeptide (PPR) repeat-containing protein
  misc_feature (51)..(471): Homolog of NCBI NO: 15221282 NR Description: pentatricopeptide (PPR) repeat-containing protein
  misc_feature (32)..(500): Homolog of NCBI NO: 15221282 NR Description: pentatricopeptide (PPR) repeat-containing protein
  misc_feature (29)..(488): Homolog of NCBI NO: 34904258 NR Description: Ipomoea nil leaf protein like protein
  misc_feature (1)..(518): Homolog of NCBI NO: 19071826 NR Description: PnC401 homologue [Arabidopsis thaliana]
  misc_feature (1)..(518): Homolog of NCBI NO: 30688180 NR Description: protein kinase family [Arabidopsis thaliana]
  misc_feature (1)..(518): Homolog of NCBI NO: 19071860 NR Description: SNF1-like protein kinase [Arabidopsis thaliana]
  misc_feature (20)..(510): Homolog of NCBI NO: 3107905 NR Description: leaf protein [Ipomoea nil]
  misc_feature (1)..(568): Homolog of NCBI NO: 26449475 NR Description: unknown protein [Arabidopsis thaliana]
  misc_feature (1)..(568): Homolog of NCBI NO: 30689969 NR Description: pentatricopeptide (PPR) repeat-containing protein
MEDVNQEKKKVPPMSEPERSTPIKTTGGQYRFCKSCVEGSSCRTVRSRTKLMNVLIERGRPHEAQTVFKTLAETGHRPSLISYTTLLAAMTVQKQYGSISSIVSEVEQSGTKLDSIFFNAVINAFSESGNMEDAVQALLKMKELGLNPTTSTYNTLIKGYGIAGKPERSSELLDLMLEEGNVDVGPNIRTFNVLVQAWCKKKKVEEAWEVVKKMEECGVRPDTVTYNTIATCYVQKGETVRAESEVVEKMVMKEKAKPNGRTCGIVVGGYCREGRVRDGLRFVRRMKEMRVEANLVVFNSLINGFVEVMDRDGIDEECNVKADVITYSTVMNAWSSAGYMEKAAQVFKEMVKAGVKPDAHAYSILAKGYVRAKEPKKAEELLETLIVESRPNVVIFTTVISGWCSNGSMDDAMRVFNKMCKFGVSPNIKTFETLMWGYLEVKQPWKAEEVLQMMRGCGVKPENSTFLLLAEAWRVAGLTDESNKAINALKCKDIEIAKLEKLYQKQSSGSSFNLLQIPVGKRELPTAKAMNLSACKLGARVPIICQKQSQAQFGISGQFVHSCTVFLS

SEQ ID NO: 47138 - protein, 555 aa, Arabidopsis thaliana
  peptide (1)..(555): Ceres Seq. ID no. 13588268
  misc_feature (416)..(450): Pfam Name: PPR repeat Pfam Description: PPR repeat
  misc_feature (31)..(457): Homolog of NCBI NO: 15221635 NR Description: pentatricopeptide (PPR) repeat-containing protein
  misc_feature (38)..(458): Homolog of NCBI NO: 15221282 NR Description: pentatricopeptide (PPR) repeat-containing protein
  misc_feature (19)..(487): Homolog of NCBI NO: 15221282 NR Description: pentatricopeptide (PPR) repeat-containing protein
  misc_feature (16)..(475): Homolog of NCBI NO: 34904258 NR Description: Ipomoea nil leaf protein like protein
  misc_feature (1)..(505): Homolog of NCBI NO: 19071826 NR Description: PnC401 homologue [Arabidopsis thaliana]
  misc_feature (1)..(505): Homolog of NCBI NO: 30688180 NR Description: protein kinase family [Arabidopsis thaliana]
  misc_feature (1)..(505): Homolog of NCBI NO: 19071860 NR Description: SNF1-like protein kinase [Arabidopsis thaliana]
  misc_feature (7)..(497): Homolog of NCBI NO: 3107905 NR Description: leaf protein [Ipomoea nil]
  misc_feature (1)..(555): Homolog of NCBI NO: 26449475 NR Description: unknown protein [Arabidopsis thaliana]
  misc_feature (1)..(555): Homolog of NCBI NO: 30689969 NR Description: pentatricopeptide (PPR) repeat-containing protein
MSEPERSTPIKTTGGQYRFCKSCVEGSSCRTVRSRTKLMNVLIERGRPHEAQTVFKTLAETGHRPSLISYTTLLAAMTVQKQYGSISSIVSEVEQSGTKLDSIFFNAVINAFSESGNMEDAVQALLKMKELGLNPTTSTYNTLIKGYGIAGKPERSSELLDLMLEEGNVDVGPNIRTFNVLVQAWCKKKKVEEAWEVVKKMEECGVRPDTVTYNTIATCYVQKGETVRAESEVVEKMVMKEKAKPNGRTCGIVVGGYCREGRVRDGLRFVRRMKEMRVEANLVVFNSLINGFVEVMDRDGIDEECNVKADVITYSTVMNAWSSAGYMEKAAQVFKEMVKAGVKPDAHAYSILAKGYVRAKEPKKAEELLETLIVESRPNVVIFTTVISGWCSNGSMDDAMRVFNKMCKFGVSPNIKTFETLMWGYLEVKQPWKAEEVLQMMRGCGVKPENSTFLLLAEAWRVAGLTDESNKAINALKCKDIEIAKLEKLYQKQSSGSSFNLLQIPVGKRELPTAKAMNLSACKLGARVPIICQKQSQAQFGISGQFVHSCTVFLS

SEQ ID NO: 47139 - DNA, 2678 bp, Arabidopsis thaliana
  misc_feature (1)..(2678): Ceres Seq. ID no. 13588926
  misc_feature: MA Experiment ID: 20000171 Result: Up-regulated in Transcription
  misc_feature: MA Experiment 20000171 PARAMETER Experiment Name: At_42deg_Heat_P Parameter: Age (day) Value: 14
  misc_feature: MA Experiment 20000171 PARAMETER Experiment Name: At_42deg_Heat_P Parameter: Organism Value: A. thaliana
  misc_feature: MA Experiment 20000171 PARAMETER Experiment Name: At_42deg_Heat_P Parameter: Plant Line Value: WS
  misc_feature: MA Experiment 20000171 PARAMETER Experiment Name: At_42deg_Heat_P Parameter: Temperature (deg C) Value: 42 vs. 22
  misc_feature: MA Experiment 20000171 PARAMETER Experiment Name: At_42deg_Heat_P Parameter: Timepoint (hr) Value: 1
  misc_feature: MA Experiment 20000171 PARAMETER Experiment Name: At_42deg_Heat_P Parameter: Tissue Value: Aerial
  misc_feature: MA Experiment ID: 20000173 Result: Up-regulated in Transcription
  misc_feature: MA Experiment 20000173 PARAMETER Experiment Name: At_42deg_Heat_P Parameter: Age (day) Value: 14
  misc_feature: MA Experiment 20000173 PARAMETER Experiment Name: At_42deg_Heat_P Parameter: Organism Value: A. thaliana
  misc_feature: MA Experiment 20000173 PARAMETER Experiment Name: At_42deg_Heat_P Parameter: Plant Line Value: WS
  misc_feature: MA Experiment 20000173 PARAMETER Experiment Name: At_42deg_Heat_P Parameter: Temperature (deg C) Value: 42 vs. 22
  misc_feature: MA Experiment 20000173 PARAMETER Experiment Name: At_42deg_Heat_P Parameter: Timepoint (hr) Value: 6
  misc_feature: MA Experiment 20000173 PARAMETER Experiment Name: At_42deg_Heat_P Parameter: Tissue Value: Aerial
  misc_feature: MA Experiment ID: 20000438 Result: Up-regulated in Transcription
  misc_feature: MA Experiment 20000438 PARAMETER Experiment Name: At_Shoots__P Parameter: Age (day) Value: 14
  misc_feature: MA Experiment 20000438 PARAMETER Experiment Name: At_Shoots__P Parameter: Tissue Value: Shoots vs. Whole Plant
  misc_feature: MA Experiment ID: 20000527 Result: Down-regulated in Transcription
  misc_feature: MA Experiment 20000527 PARAMETER Experiment Name: At_10percent_PEG_P Parameter: Age (day) Value: 20
  misc_feature: MA Experiment 20000527 PARAMETER Experiment Name: At_10percent_PEG_P Parameter: Organism Value: A. thaliana
  misc_feature: MA Experiment 20000527 PARAMETER Experiment Name: At_10percent_PEG_P Parameter: Plant Line Value: WS
  misc_feature: MA Experiment 20000527 PARAMETER Experiment Name: At_10percent_PEG_P Parameter: Timepoint (day) Value: 20
  misc_feature: MA Experiment 20000527 PARAMETER Experiment Name: At_10percent_PEG_P Parameter: Tissue Value: Whole Plant
  misc_feature: MA Experiment 20000527 PARAMETER Experiment Name: At_10percent_PEG_P Parameter: Treatment Value: 10percent PEG vs. No Treatment
  misc_feature: MA Experiment ID: 20000573 Result: Down-regulated in Transcription
  misc_feature: MA Experiment 20000573 PARAMETER Experiment Name: At_100uM_ABA_Mutants__P Parameter: Organism Value: A. thaliana
  misc_feature: MA Experiment 20000573 PARAMETER Experiment Name: At_100uM_ABA_Mutants__P Parameter: Plant Line Value: CS22 vs. Ler wt
  misc_feature: MA Experiment 20000573 PARAMETER Experiment Name: At_100uM_ABA_Mutants__P Parameter: Timepoint (hr) Value: N/A
  misc_feature: MA Experiment 20000573 PARAMETER Experiment Name: At_100uM_ABA_Mutants__P Parameter: Tissue Value: Whole Plant
  misc_feature: MA Experiment 20000573 PARAMETER Experiment Name: At_100uM_ABA_Mutants__P Parameter: Treatment Value: None
  misc_feature: MA Experiment ID: 20001248 Result: Down-regulated in Transcription
  misc_feature: MA Experiment 20001248 PARAMETER Experiment Name: At_Far-red-induction_P Parameter: Age (day) Value: 7
  misc_feature: MA Experiment 20001248 PARAMETER Experiment Name: At_Far-red-induction_P Parameter: Light Value: Far-red vs. White
  misc_feature: MA Experiment 20001248 PARAMETER Experiment Name: At_Far-red-induction_P Parameter: Organism Value: A. thaliana
  misc_feature: MA Experiment 20001248 PARAMETER Experiment Name: At_Far-red-induction_P Parameter: Plant Line Value: Columbia
  misc_feature: MA Experiment 20001248 PARAMETER Experiment Name: At_Far-red-induction_P Parameter: Timepoint (hr) Value: 4
  misc_feature: MA Experiment 20001248 PARAMETER Experiment Name: At_Far-red-induction_P Parameter: Tissue Value: Whole Plant
  misc_feature: MA Experiment ID: 20001560 Result: Down-regulated in Transcription
  misc_feature: MA Experiment 20001560 PARAMETER Experiment Name: At_Drought_Soil_Dry_P Parameter: Age (day) Value: 28
  misc_feature: MA Experiment 20001560 PARAMETER Experiment Name: At_Drought_Soil_Dry_P Parameter: Organism Value: A. thaliana
  misc_feature: MA Experiment 20001560 PARAMETER Experiment Name: At_Drought_Soil_Dry_P Parameter: Plant Line Value: WS
  misc_feature: MA Experiment 20001560 PARAMETER Experiment Name: At_Drought_Soil_Dry_P Parameter: Post Timepoint (hr) Value: None
  misc_feature: MA Experiment 20001560 PARAMETER Experiment Name: At_Drought_Soil_Dry_P Parameter: Post-Treatment Value: None
  misc_feature: MA Experiment 20001560 PARAMETER Experiment Name: At_Drought_Soil_Dry_P Parameter: Timepoint (day) Value: 14
  misc_feature: MA Experiment 20001560 PARAMETER Experiment Name: At_Drought_Soil_Dry_P Parameter: Treatment Value: Drought vs. No Drought
  misc_feature: MA Experiment ID: 20001911 Result: Up-regulated in Transcription
  misc_feature: MA Experiment 20001911 PARAMETER Experiment Name: At_Drought_Reproduction_P Parameter: Age (day) Value: 40
  misc_feature: MA Experiment 20001911 PARAMETER Experiment Name: At_Drought_Reproduction_P Parameter: Organism Value: A. thaliana
  misc_feature: MA Experiment 20001911 PARAMETER Experiment Name: At_Drought_Reproduction_P Parameter: Plant Line Value: WS
  misc_feature: MA Experiment 20001911 PARAMETER Experiment Name: At_Drought_Reproduction_P Parameter: Timepoint (day) Value: 10
  misc_feature: MA Experiment 20001911 PARAMETER Experiment Name: At_Drought_Reproduction_P Parameter: Tissue Value: Flowers
  misc_feature: MA Experiment 20001911 PARAMETER Experiment Name: At_Drought_Reproduction_P Parameter: Treatment Value: Drought vs. No Drought
gaattcggcacgaggcagcactctcacgaaatcgtcgtgacgaaacgataaaccctaagtcatggtaaaggaaactctaattcctccgtcatctacgtcaatgacgaccggaacatcttcttcttcgtctctttcaatgacgttatcctcaacaaacgcgttatcgtttttgtcgaaaggatggagagaggtatgggattcagcagatgcggatttgcagctgatgcgagacagagctaactctgttaagaatctagcatcaacgttcgatagagagatcgagaatttcctcaataactcggcgaggtctgcgtttcccgttggttcaccatcggcgtcgtctttctcaaatgaaattggtatcatgaagaagcttcagccgaagatttcggagtttcgtagggtttattcggcgccggagattagtcgcaaggttatggagagatggggacctgcgagagcgaagcttggaatggatctatcggcgattaagaaggcgattgtgtctgagatggaattggatgagcgtcagggagttttggagatgagtagattgaggagacggcgtaatagtgatagggttaggtttacggagtttttcgcggaggctgagagagatggagaagcttatttcggtgattgggaaccgattaggtctttgaagagtagatttaaagagtttgagaaacgaagctcgttagaaatattgagtggattcaagaacagtgaatttgttgagaagctcaaaaccagctttaaatcaatttacaaagaaactgatgaggctaaggatgtccctccgttggatgtacctgaactgttggcatgtttggttagacaatctgaaccttttcttgatcagattggtgttagaaaggatacatgtgaccgaatagtagaaagcctttgcaaatgcaagagccaacaactttggcgtctgccatctgcacaagcatccgatttaattgaaaatgataaccatggagttgatttggatatgaggatagccagtgttcttcaaagcacaggacaccattatgatggtgggttttggactgattttgtgaagcctgagacaccggaaaacaaaaggcatgtggcaattgttacaacagctagtcttccttggatgaccggaacagctgtaaatccgctattcagagcggcgtatttggcaaaagctgcaaaacagagtgttactctcgtggttccttggctctgcgaatctgatcaagaactagtgtatccaaacaatctcaccttcagctcacctgaagaacaagagagttatatacgtaaatggttggaggaaaggattggtttcaaggctgattttaaaatctccttttacccaggaaagttttcaaaagaaaggcgcagcatatttcctgctggtgacacttctcaatttatatcgtcaaaagatgctgacattgctatacttgaagaacctgaacatctcaactggtattatcacggcaagcgttggactgataaattcaaccatgttgttggaattgtccacacaaactacttagagtacatcaagagggagaagaatggagctcttcaagcattttttgtgaaccatgtaaacaattgggtcacacgagcgtattgtgacaaggttcttcgcctctctgcggcaacacaagatttaccaaagtctgttgtatgcaatgtccatggtgtcaatcccaagttccttatgattggggagaaaattgctgaagagagatcccgtggtgaacaagctttctcaaaaggtgcatacttcttaggaaaaatggtgtgggctaaaggatacagagaactaatagatctgatggctaaacacaaaagcgaacttgggagcttcaatctagatgtatatgggaacggtgaagatgcagtcgaggtccaacgtgcagcaaagaaacatgacttgaatctcaatttcctcaaaggaagggaccacgctgacgatgctcttcacaagtacaaagtgttcataaaccccagcatcagcgatgttctatgcacagcaaccgcagaagcactagccatggggaagtttgtggtgtgtgcagatcacccttcaaacgaattctttagatcattcccgaactgcttaacttacaaaacatccgaagactttgtgtccaaagtgcaagaagcaatgacgaaagagccactacctctcactcctgaacaaatgtacaatctctcttgggaagcagcaacacagaggttcatggagtattcagatctcgataagatcttaaacaatggagagggaggaaggaagatgcgaaaatcaagatcggttccgagctttaacgaggtggtcgatggaggattggcattctcacactatgttctaacagggaacgatttcttgagactatgcactggagcaacaccaagaacaaaagactatgataatcaacattgcaaggatctgaatctcgtaccacctcacgttcacaagccaatcttcggctggtagatatttccccataggccacccagttattgcttgtgacttattaaaccactacgttattgttatccttttttacttttacagttgttgtaggtcgtttgtttgttaatagaaagggtagattattattagatgtctttttgtaaaatatcaatacgaagcgtatttgatgatatataaaataactatattg

SEQ ID NO: 47140 - protein, 808 aa, Arabidopsis thaliana
  peptide (1)..(808): Ceres Seq. ID no. 13588927
  misc_feature (556)..(719): Pfam Name: Glycosyl transferases group 1 Pfam Description: Glycosyl transferases group 1
  misc_feature (28)..(150): Homolog of NCBI NO: 38344037 NR Description: OJ991214_12.18 [Oryza sativa (japonica
  misc_feature (576)..(796): Homolog of NCBI NO: 18141114 NR Description: digalactosyldiacylglycerol synthase [Arabidopsis
  misc_feature (339)..(377): Homolog of NCBI NO: 7486557 NR Description: hypothetical protein F6N23.24 - Arabidopsis
  misc_feature (637)..(796): Homolog of NCBI NO: 7486557 NR Description: hypothetical protein F6N23.24 - Arabidopsis
  misc_feature (399)..(611): Homolog of NCBI NO: 7486557 NR Description: hypothetical protein F6N23.24 - Arabidopsis
  misc_feature (339)..(796): Homolog of NCBI NO: 22328179 NR Description: UDP-galactose:MGDG galactosyltransferase
  misc_feature (343)..(794): Homolog of NCBI NO: 34902044 NR Description: name [Oryza sativa (japonica cultivar-group)]
  misc_feature (350)..(808): Homolog of NCBI NO: 27542603 NR Description: digalactosyldiacylglycerol synthase [Xerophyta
  misc_feature (55)..(808): Homolog of NCBI NO: 38344037 NR Description: OJ991214_12.18 [Oryza sativa (japonica
MVKETLIPPSSTSMTTGTSSSSSLSMTLSSTNALSFLSKGWREVWDSADADLQLMRDRANSVKNLASTFDREIENFLNNSARSAFPVGSPSASSFSNEIGIMKKLQPKISEFRRVYSAPEISRKVMERWGPARAKLGMDLSAIKKAIVSEMELDERQGVLEMSRLRRRRNSDRVRFTEFFAEAERDGEAYFGDWEPIRSLKSRFKEFEKRSSLEILSGFKNSEFVEKLKTSFKSIYKETDEAKDVPPLDVPELLACLVRQSEPFLDQIGVRKDTCDRIVESLCKCKSQQLWRLPSAQASDLIENDNHGVDLDMRIASVLQSTGHHYDGGFWTDFVKPETPENKRHVAIVTTASLPWMTGTAVNPLFRAAYLAKAAKQSVTLVVPWLCESDQELVYPNNLTFSSPEEQESYIRKWLEERIGFKADFKISFYPGKFSKERRSIFPAGDTSQFISSKDADIAILEEPEHLNWYYHGKRWTDKFNHVVGIVHTNYLEYIKREKNGALQAFFVNHVNNWVTRAYCDKVLRLSAATQDLPKSVVCNVHGVNPKFLMIGEKIAEERSRGEQAFSKGAYFLGKMVWAKGYRELIDLMAKHKSELGSFNLDVYGNGEDAVEVQRAAKKHDLNLNFLKGRDHADDALHKYKVFINPSISDVLCTATAEALAMGKFVVCADHPSNEFFRSFPNCLTYKTSEDFVSKVQEAMTKEPLPLTPEQMYNLSWEAATQRFMEYSDLDKILNNGEGGRKMRKSRSVPSFNEVVDGGLAFSHYVLTGNDFLRLCTGATPRTKDYDNQHCKDLNLVPPHVHKPIFGW

SEQ ID NO: 47141 - protein, 795 aa, Arabidopsis thaliana
  peptide (1)..(795): Ceres Seq. ID no. 13588928
  misc_feature (543)..(706): Pfam Name: Glycosyl transferases group 1 Pfam Description: Glycosyl transferases group 1
  misc_feature (15)..(137): Homolog of NCBI NO: 38344037 NR Description: OJ991214_12.18 [Oryza sativa (japonica
  misc_feature (563)..(783): Homolog of NCBI NO: 18141114 NR Description: digalactosyldiacylglycerol synthase [Arabidopsis
  misc_feature (326)..(364): Homolog of NCBI NO: 7486557 NR Description: hypothetical protein F6N23.24 - Arabidopsis
  misc_feature (624)..(783): Homolog of NCBI NO: 7486557 NR Description: hypothetical protein F6N23.24 - Arabidopsis
  misc_feature (386)..(598): Homolog of NCBI NO: 7486557 NR Description: hypothetical protein F6N23.24 - Arabidopsis
  misc_feature (326)..(783): Homolog of NCBI NO: 22328179 NR Description: UDP-galactose:MGDG galactosyltransferase
  misc_feature (330)..(781): Homolog of NCBI NO: 34902044 NR Description: name [Oryza sativa (japonica cultivar-group)]
  misc_feature (337)..(795): Homolog of NCBI NO: 27542603 NR Description: digalactosyldiacylglycerol synthase [Xerophyta
  misc_feature (42)..(795): Homolog of NCBI NO: 38344037 NR Description: OJ991214_12.18 [Oryza sativa (japonica
MTTGTSSSSSLSMTLSSTNALSFLSKGWREVWDSADADLQLMRDRANSVKNLASTFDREIENFLNNSARSAFPVGSPSASSFSNEIGIMKKLQPKISEFRRVYSAPEISRKVMERWGPARAKLGMDLSAIKKAIVSEMELDERQGVLEMSRLRRRRNSDRVRFTEFFAEAERDGEAYFGDWEPIRSLKSRFKEFEKRSSLEILSGFKNSEFVEKLKTSFKSIYKETDEAKDVPPLDVPELLACLVRQSEPFLDQIGVRKDTCDRIVESLCKCKSQQLWRLPSAQASDLIENDNHGVDLDMRIASVLQSTGHHYDGGFWTDFVKPETPENKRHVAIVTTASLPWMTGTAVNPLFRAAYLAKAAKQSVTLVVPWLCESDQELVYPNNLTFSSPEEQESYIRKWLEERIGFKADFKISFYPGKFSKERRSIFPAGDTSQFISSKDADIAILEEPEHLNWYYHGKRWTDKFNHVVGIVHTNYLEYIKREKNGALQAFFVNHVNNWVTRAYCDKVLRLSAATQDLPKSVVCNVHGVNPKFLMIGEKIAEERSRGEQAFSKGAYFLGKMVWAKGYRELIDLMAKHKSELGSFNLDVYGNGEDAVEVQRAAKKHDLNLNFLKGRDHADDALHKYKVFINPSISDVLCTATAEALAMGKFVVCADHPSNEFFRSFPNCLTYKTSEDFVSKVQEAMTKEPLPLTPEQMYNLSWEAATQRFMEYSDLDKILNNGEGGRKMRKSRSVPSFNEVVDGGLAFSHYVLTGNDFLRLCTGATPRTKDYDNQHCKDLNLVPPHVHKPIFGW

SEQ ID NO: 47142 - protein, 783 aa, Arabidopsis thaliana
  peptide (1)..(783): Ceres Seq. ID no. 13588929
  misc_feature (531)..(694): Pfam Name: Glycosyl transferases group 1 Pfam Description: Glycosyl transferases group 1
  misc_feature (3)..(125): Homolog of NCBI NO: 38344037 NR Description: OJ991214_12.18 [Oryza sativa (japonica
  misc_feature (551)..(771): Homolog of NCBI NO: 18141114 NR Description: digalactosyldiacylglycerol synthase [Arabidopsis
  misc_feature (314)..(352): Homolog of NCBI NO: 7486557 NR Description: hypothetical protein F6N23.24 - Arabidopsis
  misc_feature (612)..(771): Homolog of NCBI NO: 7486557 NR Description: hypothetical protein F6N23.24 - Arabidopsis
  misc_feature (374)..(586): Homolog of NCBI NO: 7486557 NR Description: hypothetical protein F6N23.24 - Arabidopsis
  misc_feature (314)..(771): Homolog of NCBI NO: 22328179 NR Description: UDP-galactose:MGDG galactosyltransferase
  misc_feature (318)..(769): Homolog of NCBI NO: 34902044 NR Description: name [Oryza sativa (japonica cultivar-group)]
  misc_feature (325)..(783): Homolog of NCBI NO: 27542603 NR Description: digalactosyldiacylglycerol synthase [Xerophyta
  misc_feature (30)..(783): Homolog of NCBI NO: 38344037 NR Description: OJ991214_12.18 [Oryza sativa (japonica
MTLSSTNALSFLSKGWREVWDSADADLQLMRDRANSVKNLASTFDREIENFLNNSARSAFPVGSPSASSFSNEIGIMKKLQPKISEFRRVYSAPEISRKVMERWGPARAKLGMDLSAIKKAIVSEMELDERQGVLEMSRLRRRRNSDRVRFTEFFAEAERDGEAYFGDWEPIRSLKSRFKEFEKRSSLEILSGFKNSEFVEKLKTSFKSIYKETDEAKDVPPLDVPELLACLVRQSEPFLDQIGVRKDTCDRIVESLCKCKSQQLWRLPSAQASDLIENDNHGVDLDMRIASVLQSTGHHYDGGFWTDFVKPETPENKRHVAIVTTASLPWMTGTAVNPLFRAAYLAKAAKQSVTLVVPWLCESDQELVYPNNLTFSSPEEQESYIRKWLEERIGFKADFKISFYPGKFSKERRSIFPAGDTSQFISSKDADIAILEEPEHLNWYYHGKRWTDKFNHVVGIVHTNYLEYIKREKNGALQAFFVNHVNNWVTRAYCDKVLRLSAATQDLPKSVVCNVHGVNPKFLMIGEKIAEERSRGEQAFSKGAYFLGKMVWAKGYRELIDLMAKHKSELGSFNLDVYGNGEDAVEVQRAAKKHDLNLNFLKGRDHADDALHKYKVFINPSISDVLCTATAEALAMGKFVVCADHPSNEFFRSFPNCLTYKTSEDFVSKVQEAMTKEPLPLTPEQMYNLSWEAATQRFMEYSDLDKILNNGEGGRKMRKSRSVPSFNEVVDGGLAFSHYVLTGNDFLRLCTGATPRTKDYDNQHCKDLNLVPPHVHKPIFGW

SEQ ID NO: 47143 - DNA, 1075 bp, Arabidopsis thaliana; identical to SEQ ID NO: 22571
  misc_feature (1)..(1075): Ceres Seq. ID no. 13593739
  misc_feature: MA Experiment ID: 108461 Result: Up-regulated in Transcription
  misc_feature: MA Experiment 108461 PARAMETER Experiment Name: At_Germinating_Seeds_cDNA_P Parameter: Age (day) Value: 1 vs. 0
  misc_feature: MA Experiment 108461 PARAMETER Experiment Name: At_Germinating_Seeds_cDNA_P Parameter: Tissue Value: Germinating Seeds
  misc_feature: MA Experiment ID: 108462 Result: Up-regulated in Transcription
  misc_feature: MA Experiment 108462 PARAMETER Experiment Name: At_Germinating_Seeds_cDNA_P Parameter: Age (day) Value: 2 vs. 0
  misc_feature: MA Experiment 108462 PARAMETER Experiment Name: At_Germinating_Seeds_cDNA_P Parameter: Tissue Value: Germinating Seeds
  misc_feature: MA Experiment ID: 108574 Result: Up-regulated in Transcription
  misc_feature: MA Experiment 108574 PARAMETER Experiment Name: At_Wounding__cDNA_P Parameter: Timepoint (hr) Value: 1
  misc_feature: MA Experiment 108574 PARAMETER Experiment Name: At_Wounding__cDNA_P Parameter: Tissue Value: Aerial
  misc_feature: MA Experiment 108574 PARAMETER Experiment Name: At_Wounding__cDNA_P Parameter: Treatment Value: Wounding vs. No Wounding
  misc_feature: MA Experiment ID: 108577 Result: Up-regulated in Transcription
  misc_feature: MA Experiment 108577 PARAMETER Experiment Name: At_42deg_Heat_cDNA_P Parameter: Temperature (deg C) Value: 42 vs. 22
  misc_feature: MA Experiment 108577 PARAMETER Experiment Name: At_42deg_Heat_cDNA_P Parameter: Timepoint (hr) Value: 6
  misc_feature: MA Experiment 108577 PARAMETER Experiment Name: At_42deg_Heat_cDNA_P Parameter: Tissue Value: Aerial
  misc_feature: MA Experiment ID: 108579 Result: Up-regulated in Transcription
  misc_feature: MA Experiment 108579 PARAMETER Experiment Name: At_4deg_Cold_cDNA_P Parameter: Temperature (deg C) Value: 4 vs. 22
  misc_feature: MA Experiment 108579 PARAMETER Experiment Name: At_4deg_Cold_cDNA_P Parameter: Timepoint (hr) Value: 6
  misc_feature: MA Experiment 108579 PARAMETER Experiment Name: At_4deg_Cold_cDNA_P Parameter: Tissue Value: Aerial
  misc_feature: MA Experiment ID: 108594 Result: Down-regulated in Transcription
  misc_feature: MA Experiment 108594 PARAMETER Experiment Name: At_Ler-rhl_Root_cDNA_P Parameter: Plant Line Value: null
  misc_feature: MA Experiment ID: 108595 Result: Down-regulated in Transcription
  misc_feature: MA Experiment 108595 PARAMETER Experiment Name: At_Ler-pi_Ovule_cDNA_P Parameter: Plant Line Value: null
  misc_feature: MA Experiment ID: 108608 Result: Up-regulated in Transcription
  misc_feature: MA Experiment 108608 PARAMETER Experiment Name: At_100uM_ABA_cDNA_P Parameter: Timepoint (hr) Value: 1
  misc_feature: MA Experiment 108608 PARAMETER Experiment Name: At_100uM_ABA_cDNA_P Parameter: Tissue Value: Aerial
  misc_feature: MA Experiment 108608 PARAMETER Experiment Name: At_100uM_ABA_cDNA_P Parameter: Treatment Value: 100uM ABA vs. No Treatment
  misc_feature: MA Experiment ID: 20000166 Result: Up-regulated in Transcription
  misc_feature: MA Experiment 20000166 PARAMETER Experiment Name: At_100uM_ABA_P Parameter: Age (day) Value: 14
  misc_feature: MA Experiment 20000166 PARAMETER Experiment Name: At_100uM_ABA_P Parameter: Organism Value: A. thaliana
  misc_feature: MA Experiment 20000166 PARAMETER Experiment Name: At_100uM_ABA_P Parameter: Plant Line Value: WS
  misc_feature: MA Experiment 20000166 PARAMETER Experiment Name: At_100uM_ABA_P Parameter: Timepoint (hr) Value: 1
  misc_feature: MA Experiment 20000166 PARAMETER Experiment Name: At_100uM_ABA_P Parameter: Tissue Value: Aerial
  misc_feature: MA Experiment 20000166 PARAMETER Experiment Name: At_100uM_ABA_P Parameter: Treatment Value: 100uM ABA vs. No Treatment
  misc_feature: MA Experiment ID: 20000179 Result: Up-regulated in Transcription
  misc_feature: MA Experiment 20000179 PARAMETER Experiment Name: At_Germinating_Seeds_P Parameter: Age (hr) Value: 6 vs. 0
  misc_feature: MA Experiment 20000179 PARAMETER Experiment Name: At_Germinating_Seeds_P Parameter: Tissue Value: Germinating Seeds
  misc_feature: MA Experiment ID: 20000180 Result: Up-regulated in Transcription
  misc_feature: MA Experiment 20000180 PARAMETER Experiment Name: At_Germinating_Seeds_P Parameter: Age (hr) Value: 24 vs. 0
  misc_feature: MA Experiment 20000180 PARAMETER Experiment Name: At_Germinating_Seeds_P Parameter: Tissue Value: Germinating Seeds
  misc_feature: MA Experiment ID: 20000184 Result: Up-regulated in Transcription
  misc_feature: MA Experiment 20000184 PARAMETER Experiment Name: At_Shoots__P Parameter: Age (day) Value: 7
  misc_feature: MA Experiment 20000184 PARAMETER Experiment Name: At_Shoots__P Parameter: Tissue Value: Shoots vs. Whole Plant
  misc_feature: MA Experiment ID: 20000227 Result: Up-regulated in Transcription
  misc_feature: MA Experiment 20000227 PARAMETER Experiment Name: At_Root-Tips-vs-Tops_P Parameter: Tissue Value: Root Tips vs. Root Tops
  misc_feature: MA Experiment ID: 20000234 Result: Up-regulated in Transcription
  misc_feature: MA Experiment 20000234 PARAMETER Experiment Name: At_Siliques_P Parameter: Age (day) Value: 21
  misc_feature: MA Experiment 20000234 PARAMETER Experiment Name: At_Siliques_P Parameter: Organism Value: A. thaliana
  misc_feature: MA Experiment 20000234 PARAMETER Experiment Name: At_Siliques_P Parameter: Plant Line Value: WS
  misc_feature: MA Experiment 20000234 PARAMETER Experiment Name: At_Siliques_P Parameter: Tissue Value: Less Than 5mm Siliques vs. Whole Plant
  misc_feature: MA Experiment ID: 20000235 Result: Up-regulated in Transcription
  misc_feature: MA Experiment 20000235 PARAMETER Experiment Name: At_Siliques_P Parameter: Age (day) Value: 21
  misc_feature: MA Experiment 20000235 PARAMETER Experiment Name: At_Siliques_P Parameter: Organism Value: A. thaliana
  misc_feature: MA Experiment 20000235 PARAMETER Experiment Name: At_Siliques_P Parameter: Plant Line Value: WS
  misc_feature: MA Experiment 20000235 PARAMETER Experiment Name: At_Siliques_P Parameter: Tissue Value: 5-10mm Siliques vs. Whole Plant
  misc_feature: MA Experiment ID: 20000264 Result: Up-regulated in Transcription
  misc_feature: MA Experiment 20000264 PARAMETER Experiment Name: At_Open_Flower_P Parameter: Age (day) Value: 21
  misc_feature: MA Experiment 20000264 PARAMETER Experiment Name: At_Open_Flower_P Parameter: Plant Line Value: WS
  misc_feature: MA Experiment 20000264 PARAMETER Experiment Name: At_Open_Flower_P Parameter: Tissue Value: Open Flower vs. Whole Plant
  misc_feature: MA Experiment ID: 20000265 Result: Up-regulated in Transcription
  misc_feature: MA Experiment 20000265 PARAMETER Experiment Name: At_Open_Flower_P Parameter: Age (day) Value: 21
  misc_feature: MA Experiment 20000265 PARAMETER Experiment Name: At_Open_Flower_P Parameter: Plant Line Value: WS
  misc_feature: MA Experiment 20000265 PARAMETER Experiment Name: At_Open_Flower_P Parameter: Tissue Value: Closed Flower vs. Whole Plant
  misc_feature: MA Experiment ID: 20000286 Result: Up-regulated in Transcription
  misc_feature: MA Experiment 20000286 PARAMETER Experiment Name: At_Open_Flower_P Parameter: Age (day) Value: 21
  misc_feature: MA Experiment 20000286 PARAMETER Experiment Name: At_Open_Flower_P Parameter: Plant Line Value: WS
  misc_feature: MA Experiment 20000286 PARAMETER Experiment Name: At_Open_Flower_P Parameter: Tissue Value: Half Open vs. Whole Plant
  misc_feature: MA Experiment ID: 20000438 Result: Up-regulated in Transcription
  misc_feature: MA Experiment 20000438 PARAMETER Experiment Name: At_Shoots__P Parameter: Age (day) Value: 14
  misc_feature: MA Experiment 20000438 PARAMETER Experiment Name: At_Shoots__P Parameter: Tissue Value: Shoots vs. Whole Plant
  misc_feature: MA Experiment ID: 20000439 Result: Up-regulated in Transcription
  misc_feature: MA Experiment 20000439 PARAMETER Experiment Name: At_Roots__P Parameter: Age (day) Value: 14 vs. 21
  misc_feature: MA Experiment 20000439 PARAMETER Experiment Name: At_Roots__P Parameter: Organism Value: A. thaliana
  misc_feature: MA Experiment 20000439 PARAMETER Experiment Name: At_Roots__P Parameter: Tissue Value: Roots vs. Whole Plant
  misc_feature: MA Experiment ID: 20000445 Result: Up-regulated in Transcription
  misc_feature: MA Experiment 20000445 PARAMETER Experiment Name: At_100uM_NAA__P Parameter: Age (day) Value: 14
  misc_feature: MA Experiment 20000445 PARAMETER Experiment Name: At_100uM_NAA__P Parameter: Organism Value: A. thaliana
  misc_feature: MA Experiment 20000445 PARAMETER Experiment Name: At_100uM_NAA__P Parameter: Plant Line Value: WS
  misc_feature: MA Experiment 20000445 PARAMETER Experiment Name: At_100uM_NAA__P Parameter: Timepoint (hr) Value: 6
  misc_feature: MA Experiment 20000445 PARAMETER Experiment Name: At_100uM_NAA__P Parameter: Tissue Value: Aerial
  misc_feature: MA Experiment 20000445 PARAMETER Experiment Name: At_100uM_NAA__P Parameter: Treatment Value: 100uM NAA vs. No Treatment
  misc_feature: MA Experiment ID: 20001450 Result: Down-regulated in Transcription
  misc_feature: MA Experiment 20001450 PARAMETER Experiment Name: At_Far-red-induction_P Parameter: Age (day) Value: 7
  misc_feature: MA Experiment 20001450 PARAMETER Experiment Name: At_Far-red-induction_P Parameter: Light Value: Far-red vs. White
  misc_feature: MA Experiment 20001450 PARAMETER Experiment Name: At_Far-red-induction_P Parameter: Organism Value: A. thaliana
  misc_feature: MA Experiment 20001450 PARAMETER Experiment Name: At_Far-red-induction_P Parameter: Plant Line Value: Columbia
  misc_feature: MA Experiment 20001450 PARAMETER Experiment Name: At_Far-red-induction_P Parameter: Timepoint (hr) Value: 8
  misc_feature: MA Experiment 20001450 PARAMETER Experiment Name: At_Far-red-induction_P Parameter: Tissue Value: Whole Plant
  misc_feature: MA Experiment ID: 20001451 Result: Down-regulated in Transcription
  misc_feature: MA Experiment 20001451 PARAMETER Experiment Name: At_Far-red-induction_P Parameter: Age (day) Value: 7
  misc_feature: MA Experiment 20001451 PARAMETER Experiment Name: At_Far-red-induction_P Parameter: Light Value: Far-red vs. White
  misc_feature: MA Experiment 20001451 PARAMETER Experiment Name: At_Far-red-induction_P Parameter: Organism Value: A. thaliana
  misc_feature: MA Experiment 20001451 PARAMETER Experiment Name: At_Far-red-induction_P Parameter: Plant Line Value: Columbia
  misc_feature: MA Experiment 20001451 PARAMETER Experiment Name: At_Far-red-induction_P Parameter: Timepoint (hr) Value: 24
  misc_feature: MA Experiment 20001451 PARAMETER Experiment Name: At_Far-red-induction_P Parameter: Tissue Value: Whole Plant
  misc_feature: MA Experiment ID: 20001557 Result: Up-regulated in Transcription
  misc_feature: MA Experiment 20001557 PARAMETER Experiment Name: At_Drought_Soil_Dry_P Parameter: Age (day) Value: 27
  misc_feature: MA Experiment 20001557 PARAMETER Experiment Name: At_Drought_Soil_Dry_P Parameter: Organism Value: A. thaliana
  misc_feature: MA Experiment 20001557 PARAMETER Experiment Name: At_Drought_Soil_Dry_P Parameter: Plant Line Value: WS
  misc_feature: MA Experiment 20001557 PARAMETER Experiment Name: At_Drought_Soil_Dry_P Parameter: Post Timepoint (hr) Value: 3
  misc_feature: MA Experiment 20001557 PARAMETER Experiment Name: At_Drought_Soil_Dry_P Parameter: Post-Treatment Value: Re-Water vs. No Drought
  misc_feature: MA Experiment 20001557 PARAMETER Experiment Name: At_Drought_Soil_Dry_P Parameter: Timepoint (day) Value: 13
  misc_feature: MA Experiment 20001557 PARAMETER Experiment Name: At_Drought_Soil_Dry_P Parameter: Treatment Value: Drought vs. No Drought
  misc_feature: MA Experiment ID: 20001560 Result: Up-regulated in Transcription
  misc_feature: MA Experiment 20001560 PARAMETER Experiment Name: At_Drought_Soil_Dry_P Parameter: Age (day) Value: 28
  misc_feature: MA Experiment 20001560 PARAMETER Experiment Name: At_Drought_Soil_Dry_P Parameter: Organism Value: A. thaliana
  misc_feature: MA Experiment 20001560 PARAMETER Experiment Name: At_Drought_Soil_Dry_P Parameter: Plant Line Value: WS
  misc_feature: MA Experiment 20001560 PARAMETER Experiment Name: At_Drought_Soil_Dry_P Parameter: Post Timepoint (hr) Value: None
  misc_feature: MA Experiment 20001560 PARAMETER Experiment Name: At_Drought_Soil_Dry_P Parameter: Post-Treatment Value: None
  misc_feature: MA Experiment 20001560 PARAMETER Experiment Name: At_Drought_Soil_Dry_P Parameter: Timepoint (day) Value: 14
  misc_feature: MA Experiment 20001560 PARAMETER Experiment Name: At_Drought_Soil_Dry_P Parameter: Treatment Value: Drought vs. No Drought
  misc_feature: MA Experiment ID: 20001911 Result: Down-regulated in Transcription
  misc_feature: MA Experiment 20001911 PARAMETER Experiment Name: At_Drought_Reproduction_P Parameter: Age (day) Value: 40
  misc_feature: MA Experiment 20001911 PARAMETER Experiment Name: At_Drought_Reproduction_P Parameter: Organism Value: A. thaliana
  misc_feature: MA Experiment 20001911 PARAMETER Experiment Name: At_Drought_Reproduction_P Parameter: Plant Line Value: WS
  misc_feature: MA Experiment 20001911 PARAMETER Experiment Name: At_Drought_Reproduction_P Parameter: Timepoint (day) Value: 10
  misc_feature: MA Experiment 20001911 PARAMETER Experiment Name: At_Drought_Reproduction_P Parameter: Tissue Value: Flowers
  misc_feature: MA Experiment 20001911 PARAMETER Experiment Name: At_Drought_Reproduction_P Parameter: Treatment Value: Drought vs. No Drought
  misc_feature: Phenotype: FERTILITY Fertility-Reduced
  misc_feature: Phenotype: WHOLE PLANT Size-Small
  misc_feature: Phenotype: FERTILITY Fertility-Reduced
  misc_feature: Phenotype: WHOLE PLANT Size-Small
  misc_feature: Phenotype: FERTILITY Fertility-Reduced
  misc_feature: Phenotype: FERTILITY Fertility-Sterile

SEQ ID NO: 47144 - protein, 282 aa, Arabidopsis thaliana; identical to SEQ ID NO: 22572
  peptide (1)..(282): Ceres Seq. ID no. 15221238
  misc_feature (39)..(224): Pfam Name: ABC transporter Pfam Description: ABC transporter
  misc_feature (39)..(224): Pfam Name: ABC transporter Pfam Description: ABC transporter
  misc_feature (12)..(231): Homolog of NCBI NO: 21911381 NR Description: putative ABC transporter (ATP-binding protein)
  misc_feature (31)..(235): Homolog of NCBI NO: 23483625 NR Description: NBD-like protein [Plasmodium yoelii yoelii]
  misc_feature (90)..(255): Homolog of NCBI NO: 40738662 NR Description: hypothetical protein AN6512.2 [Aspergillus
  misc_feature (12)..(279): Homolog of NCBI NO: 14318491 NR Description: CCR4 associated factor; Caf16p [Saccharomyces
  misc_feature (35)..(265): Homolog of NCBI NO: 19115648 NR Description: probable ATP-dependent transporter
  misc_feature (12)..(231): Homolog of NCBI NO: 21911381 NR Description: putative ABC transporter (ATP-binding protein)
  misc_feature (90)..(255): Homolog of NCBI NO: 40738662 NR Description: hypothetical protein AN6512.2 [Aspergillus
  misc_feature (35)..(265): Homolog of NCBI NO: 19115648 NR Description: probable ATP-dependent transporter
  misc_feature (1)..(282): Homolog of NCBI NO: 15240093 NR Description: ABC transporter family protein [Arabidopsis
  misc_feature (1)..(282): Homolog of NCBI NO: 21592901 NR Description: NBD-like protein [Arabidopsis thaliana]
  misc_feature (1)..(282): Homolog of NCBI NO: 18379174 NR Description: ABC transporter family protein [Arabidopsis
  misc_feature (1)..(282): Homolog of NCBI NO: 25406749 NR Description: hypothetical protein [imported] - Arabidopsis
  misc_feature (10)..(265): Homolog of NCBI NO: 15241744 NR Description: ABC transporter family protein [Arabidopsis
  misc_feature (12)..(279): Homolog of NCBI NO: 14318491 NR Description: CCR4 associated factor; Caf16p [Saccharomyces
  misc_feature (31)..(235): Homolog of NCBI NO: 23483625 NR Description: NBD-like protein [Plasmodium yoelii yoelii]
  misc_feature (10)..(265): Homolog of NCBI NO: 15241744 NR Description: ABC transporter family protein [Arabidopsis
  misc_feature (1)..(282): Homolog of NCBI NO: 25406749 NR Description: hypothetical protein [imported] - Arabidopsis
  misc_feature (1)..(282): Homolog of NCBI NO: 18379174 NR Description: ABC transporter family protein [Arabidopsis
  misc_feature (1)..(282): Homolog of NCBI NO: 21592901 NR Description: NBD-like protein [Arabidopsis thaliana]
  misc_feature (1)..(282): Homolog of NCBI NO: 15240093 NR Description: ABC transporter family protein [Arabidopsis

SEQ ID NO: 47145 - protein, 265 aa, Arabidopsis thaliana; identical to SEQ ID NO: 22573
  peptide (1)..(265): Ceres Seq. ID no. 15221239
  misc_feature (22)..(207): Pfam Name: ABC transporter Pfam Description: ABC transporter
  misc_feature (22)..(207): Pfam Name: ABC transporter Pfam Description: ABC transporter
  misc_feature (1)..(214): Homolog of NCBI NO: 21911381 NR Description: putative ABC transporter (ATP-binding protein)
  misc_feature (14)..(218): Homolog of NCBI NO: 23483625 NR Description: NBD-like protein [Plasmodium yoelii yoelii]
  misc_feature (73)..(238): Homolog of NCBI NO: 40738662 NR Description: hypothetical protein AN6512.2 [Aspergillus
  misc_feature (1)..(262): Homolog of NCBI NO: 14318491 NR Description: CCR4 associated factor; Caf16p [Saccharomyces
  misc_feature (18)..(248): Homolog of NCBI NO: 19115648 NR Description: probable ATP-dependent transporter
  misc_feature (1)..(214): Homolog of NCBI NO: 21911381 NR Description: putative ABC transporter (ATP-binding protein)
  misc_feature (73)..(238): Homolog of NCBI NO: 40738662 NR Description: hypothetical protein AN6512.2 [Aspergillus
  misc_feature (18)..(248): Homolog of NCBI NO: 19115648 NR Description: probable ATP-dependent transporter
  misc_feature (1)..(265): Homolog of NCBI NO: 15240093 NR Description: ABC transporter family protein [Arabidopsis
  misc_feature (1)..(265): Homolog of NCBI NO: 21592901 NR Description: NBD-like protein [Arabidopsis thaliana]
  misc_feature (1)..(265): Homolog of NCBI NO: 18379174 NR Description: ABC transporter family protein [Arabidopsis
  misc_feature (1)..(265): Homolog of NCBI NO: 25406749 NR Description: hypothetical protein [imported] - Arabidopsis
  misc_feature (1)..(248): Homolog of NCBI NO: 15241744 NR Description: ABC transporter family protein [Arabidopsis
  misc_feature (1)..(262): Homolog of NCBI NO: 14318491 NR Description: CCR4 associated factor; Caf16p [Saccharomyces
  misc_feature (14)..(218): Homolog of NCBI NO: 23483625 NR Description: NBD-like protein [Plasmodium yoelii yoelii]
  misc_feature (1)..(248): Homolog of NCBI NO: 15241744 NR Description: ABC transporter family protein [Arabidopsis
  misc_feature (1)..(265): Homolog of NCBI NO: 25406749 NR Description: hypothetical protein [imported] - Arabidopsis
  misc_feature (1)..(265): Homolog of NCBI NO: 18379174 NR Description: ABC transporter family protein [Arabidopsis
  misc_feature (1)..(265): Homolog of NCBI NO: 21592901 NR Description: NBD-like protein [Arabidopsis thaliana]
  misc_feature (1)..(265): Homolog of NCBI NO: 15240093 NR Description: ABC transporter family protein [Arabidopsis

SEQ ID NO: 47146 - protein, 219 aa, Arabidopsis thaliana; identical to SEQ ID NO: 22574
  peptide (1)..(219): Ceres Seq. ID no. 15221240
  misc_feature (1)..(161): Pfam Name: ABC transporter Pfam Description: ABC transporter
  misc_feature (1)..(161): Pfam Name: ABC transporter Pfam Description: ABC transporter
  misc_feature (1)..(168): Homolog of NCBI NO: 21911381 NR Description: putative ABC transporter (ATP-binding protein)
  misc_feature (1)..(172): Homolog of NCBI NO: 23483625 NR Description: NBD-like protein [Plasmodium yoelii yoelii]
  misc_feature (27)..(192): Homolog of NCBI NO: 40738662 NR Description: hypothetical protein AN6512.2 [Aspergillus
  misc_feature (1)..(216): Homolog of NCBI NO: 14318491 NR Description: CCR4 associated factor; Caf16p [Saccharomyces
  misc_feature (1)..(202): Homolog of NCBI NO: 19115648 NR Description: probable ATP-dependent transporter
  misc_feature (1)..(168): Homolog of NCBI NO: 21911381 NR Description: putative ABC transporter (ATP-binding protein)
  misc_feature (27)..(192): Homolog of NCBI NO: 40738662 NR Description: hypothetical protein AN6512.2 [Aspergillus
  misc_feature (1)..(202): Homolog of NCBI NO: 19115648 NR Description: probable ATP-dependent transporter
  misc_feature (1)..(219): Homolog of NCBI NO: 15240093 NR Description: ABC transporter family protein [Arabidopsis
  misc_feature (1)..(219): Homolog of NCBI NO: 21592901 NR Description: NBD-like protein [Arabidopsis thaliana]
  misc_feature (1)..(219): Homolog of NCBI NO: 18379174 NR Description: ABC transporter family protein [Arabidopsis
  misc_feature (1)..(219): Homolog of NCBI NO: 25406749 NR Description: hypothetical protein [imported] - Arabidopsis
  misc_feature (1)..(202): Homolog of NCBI NO: 15241744 NR Description: ABC transporter family protein [Arabidopsis
  misc_feature (1)..(216): Homolog of NCBI NO: 14318491 NR Description: CCR4 associated factor; Caf16p [Saccharomyces
  misc_feature (1)..(172): Homolog of NCBI NO: 23483625 NR Description: NBD-like protein [Plasmodium yoelii yoelii]
  misc_feature (1)..(202): Homolog of NCBI NO: 15241744 NR Description: ABC transporter family protein [Arabidopsis
  misc_feature (1)..(219): Homolog of NCBI NO: 25406749 NR Description: hypothetical protein [imported] - Arabidopsis
  misc_feature (1)..(219): Homolog of NCBI NO: 18379174 NR Description: ABC transporter family protein [Arabidopsis
  misc_feature (1)..(219): Homolog of NCBI NO: 21592901 NR Description: NBD-like protein [Arabidopsis thaliana]
  misc_feature (1)..(219): Homolog of NCBI NO: 15240093 NR Description: ABC transporter family protein [Arabidopsis

SEQ ID NO: 47147 - DNA, 2230 bp, Arabidopsis thaliana
  misc_feature (1)..(2230): Ceres Seq. ID no. 14302945
  misc_feature: MA Experiment ID: 20000171 Result: Down-regulated in Transcription
  misc_feature: MA Experiment 20000171 PARAMETER Experiment Name: At_42deg_Heat_P Parameter: Age (day) Value: 14
  misc_feature: MA Experiment 20000171 PARAMETER Experiment Name: At_42deg_Heat_P Parameter: Organism Value: A. thaliana
  misc_feature: MA Experiment 20000171 PARAMETER Experiment Name: At_42deg_Heat_P Parameter: Plant Line Value: WS
  misc_feature: MA Experiment 20000171 PARAMETER Experiment Name: At_42deg_Heat_P Parameter: Temperature (deg C) Value: 42 vs. 22
  misc_feature: MA Experiment 20000171 PARAMETER Experiment Name: At_42deg_Heat_P Parameter: Timepoint (hr) Value: 1
  misc_feature: MA Experiment 20000171 PARAMETER Experiment Name: At_42deg_Heat_P Parameter: Tissue Value: Aerial
  misc_feature: MA Experiment ID: 20000184 Result: Up-regulated in Transcription
  misc_feature: MA Experiment 20000184 PARAMETER Experiment Name: At_Shoots__P Parameter: Age (day) Value: 7
  misc_feature: MA Experiment 20000184 PARAMETER Experiment Name: At_Shoots__P Parameter: Tissue Value: Shoots vs. Whole Plant
  misc_feature: MA Experiment ID: 20000185 Result: Down-regulated in Transcription
  misc_feature: MA Experiment 20000185 PARAMETER Experiment Name: At_Roots__P Parameter: Age (day) Value: 7 vs. 21
  misc_feature: MA Experiment 20000185 PARAMETER Experiment Name: At_Roots__P Parameter: Organism Value: A. thaliana
  misc_feature: MA Experiment 20000185 PARAMETER Experiment Name: At_Roots__P Parameter: Tissue Value: Roots vs. Whole Plant
  misc_feature: MA Experiment ID: 20000437 Result: Down-regulated in Transcription
  misc_feature: MA Experiment 20000437 PARAMETER Experiment Name: At_Drought_P Parameter: Age (day) Value: 8
  misc_feature: MA Experiment 20000437 PARAMETER Experiment Name: At_Drought_P Parameter: Organism Value: A. thaliana
  misc_feature: MA Experiment 20000437 PARAMETER Experiment Name: At_Drought_P Parameter: Plant Line Value: WS
  misc_feature: MA Experiment 20000437 PARAMETER Experiment Name: At_Drought_P Parameter: Timepoint (hr) Value: 24
  misc_feature: MA Experiment 20000437 PARAMETER Experiment Name: At_Drought_P Parameter: Tissue Value: Whole Plant
  misc_feature: MA Experiment 20000437 PARAMETER Experiment Name: At_Drought_P Parameter: Treatment Value: Drought vs. No Drought
  misc_feature: MA Experiment ID: 20001905 Result: Down-regulated in Transcription
  misc_feature: MA Experiment 20001905 PARAMETER Experiment Name: At_Drought_Reproduction_P Parameter: Age (day) Value: 40
  misc_feature: MA Experiment 20001905 PARAMETER Experiment Name: At_Drought_Reproduction_P Parameter: Organism Value: A. thaliana
  misc_feature: MA Experiment 20001905 PARAMETER Experiment Name: At_Drought_Reproduction_P Parameter: Plant Line Value: WS
  misc_feature: MA Experiment 20001905 PARAMETER Experiment Name: At_Drought_Reproduction_P Parameter: Timepoint (day) Value: 10
  misc_feature: MA Experiment 20001905 PARAMETER Experiment Name: At_Drought_Reproduction_P Parameter: Tissue Value: Rosettes
  misc_feature: MA Experiment 20001905 PARAMETER Experiment Name: At_Drought_Reproduction_P Parameter: Treatment Value: Drought vs. No Drought
ggtggtagtagcagtgaaaaacaaaagcaatccaatcccaaacccatttgctcttaagattcttcacatagagaagtcacatgttccttcttcttcttccttcatcatccccaaacacacacaaactaaaaaaaaggcaaaaccctagatccaagatcagacctaatctaatcgaaactcatagctgaaaaatgaagagagatcatcaccaattccaaggtcgattgtccaaccacgggacttcttcttcttcatcatcaatctctaaagataagatgatgatggtgaaaaaagaagaagacggtggaggtaacatggacgacgagcttctcgctgttttaggttacaaagttaggtcatcggagatggcggaggttgctttgaaactcgaacaattagagacgatgatgagtaatgttcaagaagatggtttatctcatctcgcgacggatactgttcattataatccgtcggagctttattcttggcttgataatatgctctctgagcttaatcctcctcctcttccggcgagttctaacggtttagatccggttcttccttcgccggagatttgtggttttccagcttcggattatgaccttaaagtcattcccggaaacgcgatttatcagtttccggcgattgattcttcgtcttcgtcgaataatcagaacaagcgtttgaaatcatgctcgagtcctgattctatggttacatcgacttcgacgggtacgcagattggtggagtcataggaacgacggtgacgacaaccaccacgacaacgacggcggcggctgagtcaactcgttctgttatcctggttgactcgcaagagaacggtgttcgtttagtccacgcgcttatggcttgtgcagaagcaatccagcagaacaatttgactctagcggaagctcttgtgaagcaaatcggatgcttagctgtgtctcaagccggagctatgagaaaagtggctacttacttcgccgaagctttagcgcggcggatctaccgtctctctccgccgcagaatcagatcgatcattgtctctccgatactcttcagatgcacttttacgagacttgtccttatcttaaattcgctcacttcacggcgaaccaagcgattctcgaagcttttgaaggtaagaagagagtacacgtcattgatttctcgatgaaccaaggtcttcaatggcctgcacttatgcaagctcttgcgcttcgagaaggaggtcctccaactttccggttaaccggaattggtccaccggcgccggataattctgatcatcttcatgaagttggttgtaaattagctcagcttgcggaggcgattcacgtagaattcgaataccgtggattcgttgctaacagcttagccgatctcgatgcttcgatgcttgagcttagaccgagcgatacggaagctgttgcggttaactctgtttttgagctacataagctcttaggtcgtcccggtgggatagagaaagttctcggcgttgtgaaacagattaaaccggtgattttcacggtggttgagcaagaatcgaaccataacggaccggttttcttagaccggtttactgaatcgttacattattattcgactctgtttgattcgttggaaggagttccgaatagtcaagacaaagtcatgtctgaagtttacttagggaaacagatttgtaatctggtggcttgtgaaggtcctgacagagtcgagagacacgaaacgttgagtcaatggggaaaccggtttggttcgtccggtttagcgccggcacatcttgggtctaacgcgtttaagcaagcgagtatgcttttgtctgtgtttaatagtggccaaggttatcgtgtggaggagagtaatggatgtttgatgttgggttggcacactcgcccactcattaccacctccgcttggaaactctcgacggcggcgcactgagtttgactcgaagcatacgacggtggtggagtcgagtcgagtgaatttgagattgagatcagtggaccggtgatgacatatgttcggaccaagacctaaaccgaactgaatcgaaccgttttgccttttgtttattttatttattttcgttcacttgtttaaaattcttatatatatcgttttggtaggtcattttataatttatgcctttttgggatcaatttttaataggctgagtttgtatttattaataaatatcttatgaattttaaaac

SEQ ID NO: 47148 - protein, 587 aa, Arabidopsis thaliana
  peptide (1)..(587): Ceres Seq. ID no. 14302946
  misc_feature (195)..(490): Pfam Name: GRAS family transcription factor Pfam Description: GRAS family transcription factor
  misc_feature (134)..(584): Homolog of NCBI NO: 2339980 NR Description: RGA2 protein [Arabidopsis thaliana]
  misc_feature (1)..(583): Homolog of NCBI NO: 20334379 NR Description: GAI-like protein 1 [Vitis vinifera]
  misc_feature (26)..(110): Homolog of NCBI NO: 2569938 NR Description: GAI [Arabidopsis thaliana]
  misc_feature (134)..(584): Homolog of NCBI NO: 2569938 NR Description: GAI [Arabidopsis thaliana]
  misc_feature (1)..(110): Homolog of NCBI NO: 15223951 NR Description: gibberellin response modulator (GAI/RGA2)
  misc_feature (134)..(584): Homolog of NCBI NO: 15223951 NR Description: gibberellin response modulator (GAI/RGA2)
  misc_feature (1)..(587): Homolog of NCBI NO: 15529230 NR Description: At2g01570/F2I9.19 [Arabidopsis thaliana]
  misc_feature (1)..(587): Homolog of NCBI NO: 2569940 NR Description: GRS protein [Arabidopsis thaliana]
  misc_feature (1)..(587): Homolog of NCBI NO: 15226311 NR Description: gibberellin response modulator (RGA1)
  misc_feature (1)..(587): Homolog of NCBI NO: 2339978 NR Description: RGA1 protein [Arabidopsis thaliana]
MKRDHHQFQGRLSNHGTSSSSSSISKDKMMMVKKEEDGGGNMDDELLAVLGYKVRSSEMAEVALKLEQLETMMSNVQEDGLSHLATDTVHYNPSELYSWLDNMLSELNPPPLPASSNGLDPVLPSPEICGFPASDYDLKVIPGNAIYQFPAIDSSSSSNNQNKRLKSCSSPDSMVTSTSTGTQIGGVIGTTVTTTTTTTTAAAESTRSVILVDSQENGVRLVHALMACAEAIQQNNLTLAEALVKQIGCLAVSQAGAMRKVATYFAEALARRIYRLSPPQNQIDHCLSDTLQMHFYETCPYLKFAHFTANQAILEAFEGKKRVHVIDFSMNQGLQWPALMQALALREGGPPTFRLTGIGPPAPDNSDHLHEVGCKLAQLAEAIHVEFEYRGFVANSLADLDASMLELRPSDTEAVAVNSVFELHKLLGRPGGIEKVLGVVKQIKPVIFTVVEQESNHNGPVFLDRFTESLHYYSTLFDSLEGVPNSQDKVMSEVYLGKQICNLVACEGPDRVERHETLSQWGNRFGSSGLAPAHLGSNAFKQASMLLSVFNSGQGYRVEESNGCLMLGWHTRPLITTSAWKLSTAAH

SEQ ID NO: 47149 - protein, 559 aa, Arabidopsis thaliana
  peptide (1)..(559): Ceres Seq. ID no. 14302947
  misc_feature (167)..(462): Pfam Name: GRAS family transcription factor Pfam Description: GRAS family transcription factor
  misc_feature (106)..(556): Homolog of NCBI NO: 2339980 NR Description: RGA2 protein [Arabidopsis thaliana]
  misc_feature (1)..(555): Homolog of NCBI NO: 20334379 NR Description: GAI-like protein 1 [Vitis vinifera]
  misc_feature (1)..(82): Homolog of NCBI NO: 2569938 NR Description: GAI [Arabidopsis thaliana]
  misc_feature (106)..(556): Homolog of NCBI NO: 2569938 NR Description: GAI [Arabidopsis thaliana]
  misc_feature (1)..(82): Homolog of NCBI NO: 15223951 NR Description: gibberellin response modulator (GAI/RGA2)
  misc_feature (106)..(556): Homolog of NCBI NO: 15223951 NR Description: gibberellin response modulator (GAI/RGA2)
  misc_feature (1)..(559): Homolog of NCBI NO: 15529230 NR Description: At2g01570/F2I9.19 [Arabidopsis thaliana]
  misc_feature (1)..(559): Homolog of NCBI NO: 2569940 NR Description: GRS protein [Arabidopsis thaliana]
  misc_feature (1)..(559): Homolog of NCBI NO: 15226311 NR Description: gibberellin response modulator (RGA1)
  misc_feature (1)..(559): Homolog of NCBI NO: 2339978 NR Description: RGA1 protein [Arabidopsis thaliana]
MMMVKKEEDGGGNMDDELLAVLGYKVRSSEMAEVALKLEQLETMMSNVQEDGLSHLATDTVHYNPSELYSWLDNMLSELNPPPLPASSNGLDPVLPSPEICGFPASDYDLKVIPGNAIYQFPAIDSSSSSNNQNKRLKSCSSPDSMVTSTSTGTQIGGVIGTTVTTTTTTTTAAAESTRSVILVDSQENGVRLVHALMACAEAIQQNNLTLAEALVKQIGCLAVSQAGAMRKVATYFAEALARRIYRLSPPQNQIDHCLSDTLQMHFYETCPYLKFAHFTANQAILEAFEGKKRVHVIDFSMNQGLQWPALMQALALREGGPPTFRLTGIGPPAPDNSDHLHEVGCKLAQLAEAIHVEFEYRGFVANSLADLDASMLELRPSDTEAVAVNSVFELHKLLGRPGGIEKVLGVVKQIKPVIFTVVEQESNHNGPVFLDRFTESLHYYSTLFDSLEGVPNSQDKVMSEVYLGKQICNLVACEGPDRVERHETLSQWGNRFGSSGLAPAHLGSNAFKQASMLLSVFNSGQGYRVEESNGCLMLGWHTRPLITTSAWKLSTAAH

SEQ ID NO: 47150 - protein, 558 aa, Arabidopsis thaliana
  peptide (1)..(558): Ceres Seq. ID no. 14302948
  misc_feature (166)..(461): Pfam Name: GRAS family transcription factor Pfam Description: GRAS family transcription factor
  misc_feature (105)..(555): Homolog of NCBI NO: 2339980 NR Description: RGA2 protein [Arabidopsis thaliana]
  misc_feature (1)..(554): Homolog of NCBI NO: 20334379 NR Description: GAI-like protein 1 [Vitis vinifera]
  misc_feature (1)..(81): Homolog of NCBI NO: 2569938 NR Description: GAI [Arabidopsis thaliana]
  misc_feature (105)..(555): Homolog of NCBI NO: 2569938 NR Description: GAI [Arabidopsis thaliana]
  misc_feature (1)..(81): Homolog of NCBI NO: 15223951 NR Description: gibberellin response modulator (GAI/RGA2)
  misc_feature (105)..(555): Homolog of NCBI NO: 15223951 NR Description: gibberellin response modulator (GAI/RGA2)
  misc_feature (1)..(558): Homolog of NCBI NO: 15529230 NR Description: At2g01570/F2I9.19 [Arabidopsis thaliana]
  misc_feature (1)..(558): Homolog of NCBI NO: 2569940 NR Description: GRS protein [Arabidopsis thaliana]
  misc_feature (1)..(558): Homolog of NCBI NO: 15226311 NR Description: gibberellin response modulator (RGA1)
  misc_feature (1)..(558): Homolog of NCBI NO: 2339978 NR Description: RGA1 protein [Arabidopsis thaliana]
MMVKKEEDGGGNMDDELLAVLGYKVRSSEMAEVALKLEQLETMMSNVQEDGLSHLATDTVHYNPSELYSWLDNMLSELNPPPLPASSNGLDPVLPSPEICGFPASDYDLKVIPGNAIYQFPAIDSSSSSNNQNKRLKSCSSPDSMVTSTSTGTQIGGVIGTTVTTTTTTTTAAAESTRSVILVDSQENGVRLVHALMACAEAIQQNNLTLAEALVKQIGCLAVSQAGAMRKVATYFAEALARRIYRLSPPQNQIDHCLSDTLQMHFYETCPYLKFAHFTANQAILEAFEGKKRVHVIDFSMNQGLQWPALMQALALREGGPPTFRLTGIGPPAPDNSDHLHEVGCKLAQLAEAIHVEFEYRGFVANSLADLDASMLELRPSDTEAVAVNSVFELHKLLGRPGGIEKVLGVVKQIKPVIFTVVEQESNHNGPVFLDRFTESLHYYSTLFDSLEGVPNSQDKVMSEVYLGKQICNLVACEGPDRVERHETLSQWGNRFGSSGLAPAHLGSNAFKQASMLLSVFNSGQGYRVEESNGCLMLGWHTRPLITTSAWKLSTAAH

SEQ ID NO: 47151 - DNA, 1662 bp, Arabidopsis thaliana
  misc_feature (1)..(1662): Ceres Seq. ID no. 13593528
  misc_feature: MA Experiment ID: 20000166 Result: Up-regulated in Transcription
  misc_feature: MA Experiment 20000166 PARAMETER Experiment Name: At_100uM_ABA_P Parameter: Age (day) Value: 14
  misc_feature: MA Experiment 20000166 PARAMETER Experiment Name: At_100uM_ABA_P Parameter: Organism Value: A. thaliana
  misc_feature: MA Experiment 20000166 PARAMETER Experiment Name: At_100uM_ABA_P Parameter: Plant Line Value: WS
  misc_feature: MA Experiment 20000166 PARAMETER Experiment Name: At_100uM_ABA_P Parameter: Timepoint (hr) Value: 1
  misc_feature: MA Experiment 20000166 PARAMETER Experiment Name: At_100uM_ABA_P Parameter: Tissue Value: Aerial
  misc_feature: MA Experiment 20000166 PARAMETER Experiment Name: At_100uM_ABA_P Parameter: Treatment Value: 100uM ABA vs. No Treatment
  misc_feature: MA Experiment ID: 20000169 Result: Up-regulated in Transcription
  misc_feature: MA Experiment 20000169 PARAMETER Experiment Name: At_100uM_ABA_P Parameter: Age (day) Value: 14
  misc_feature: MA Experiment 20000169 PARAMETER Experiment Name: At_100uM_ABA_P Parameter: Organism Value: A. thaliana
  misc_feature: MA Experiment 20000169 PARAMETER Experiment Name: At_100uM_ABA_P Parameter: Plant Line Value: WS
  misc_feature: MA Experiment 20000169 PARAMETER Experiment Name: At_100uM_ABA_P Parameter: Timepoint (hr) Value: 6
  misc_feature: MA Experiment 20000169 PARAMETER Experiment Name: At_100uM_ABA_P Parameter: Tissue Value: Aerial
  misc_feature: MA Experiment 20000169 PARAMETER Experiment Name: At_100uM_ABA_P Parameter: Treatment Value: 100uM ABA vs. No Treatment
  misc_feature: MA Experiment ID: 20000171 Result: Down-regulated in Transcription
  misc_feature: MA Experiment 20000171 PARAMETER Experiment Name: At_42deg_Heat_P Parameter: Age (day) Value: 14
  misc_feature: MA Experiment 20000171 PARAMETER Experiment Name: At_42deg_Heat_P Parameter: Organism Value: A. thaliana
  misc_feature: MA Experiment 20000171 PARAMETER Experiment Name: At_42deg_Heat_P Parameter: Plant Line Value: WS
  misc_feature: MA Experiment 20000171 PARAMETER Experiment Name: At_42deg_Heat_P Parameter: Temperature (deg C) Value: 42 vs. 22
  misc_feature: MA Experiment 20000171 PARAMETER Experiment Name: At_42deg_Heat_P Parameter: Timepoint (hr) Value: 1
  misc_feature: MA Experiment 20000171 PARAMETER Experiment Name: At_42deg_Heat_P Parameter: Tissue Value: Aerial
  misc_feature: MA Experiment ID: 20000173 Result: Up-regulated in Transcription
  misc_feature: MA Experiment 20000173 PARAMETER Experiment Name: At_42deg_Heat_P Parameter: Age (day) Value: 14
  misc_feature: MA Experiment 20000173 PARAMETER Experiment Name: At_42deg_Heat_P Parameter: Organism Value: A. thaliana
  misc_feature: MA Experiment 20000173 PARAMETER Experiment Name: At_42deg_Heat_P Parameter: Plant Line Value: WS
  misc_feature: MA Experiment 20000173 PARAMETER Experiment Name: At_42deg_Heat_P Parameter: Temperature (deg C) Value: 42 vs. 22
  misc_feature: MA Experiment 20000173 PARAMETER Experiment Name: At_42deg_Heat_P Parameter: Timepoint (hr) Value: 6
  misc_feature: MA Experiment 20000173 PARAMETER Experiment Name: At_42deg_Heat_P Parameter: Tissue Value: Aerial
  misc_feature: MA Experiment ID: 20000267 Result: Up-regulated in Transcription
  misc_feature: MA Experiment 20000267 PARAMETER Experiment Name: At_Drought_P Parameter: Age (day) Value: 7
  misc_feature: MA Experiment 20000267 PARAMETER Experiment Name: At_Drought_P Parameter: Organism Value: A. thaliana
  misc_feature: MA Experiment 20000267 PARAMETER Experiment Name: At_Drought_P Parameter: Plant Line Value: WS
  misc_feature: MA Experiment 20000267 PARAMETER Experiment Name: At_Drought_P Parameter: Timepoint (hr) Value: 6
  misc_feature: MA Experiment 20000267 PARAMETER Experiment Name: At_Drought_P Parameter: Tissue Value: Whole Plant
  misc_feature: MA Experiment 20000267 PARAMETER Experiment Name: At_Drought_P Parameter: Treatment Value: Drought vs. No Drought
  misc_feature: MA Experiment ID: 20000268 Result: Up-regulated in Transcription
  misc_feature: MA Experiment 20000268 PARAMETER Experiment Name: At_100mM_NaCl__P Parameter: Age (day) Value: 14
  misc_feature: MA Experiment 20000268 PARAMETER Experiment Name: At_100mM_NaCl__P Parameter: Organism Value: A. thaliana
  misc_feature: MA Experiment 20000268 PARAMETER Experiment Name: At_100mM_NaCl__P Parameter: Plant Line Value: WS
  misc_feature: MA Experiment 20000268 PARAMETER Experiment Name: At_100mM_NaCl__P Parameter: Timepoint (hr) Value: 6
  misc_feature: MA Experiment 20000268 PARAMETER Experiment Name: At_100mM_NaCl__P Parameter: Tissue Value: Whole Plant
  misc_feature: MA Experiment 20000268 PARAMETER Experiment Name: At_100mM_NaCl__P Parameter: Treatment Value: 100mM NaCl vs. No Treatment
  misc_feature: MA Experiment ID: 20000286 Result: Down-regulated in Transcription
  misc_feature: MA Experiment 20000286 PARAMETER Experiment Name: At_Open_Flower_P Parameter: Age (day) Value: 21
  misc_feature: MA Experiment 20000286 PARAMETER Experiment Name: At_Open_Flower_P Parameter: Plant Line Value: WS
  misc_feature: MA Experiment 20000286 PARAMETER Experiment Name: At_Open_Flower_P Parameter: Tissue Value: Half Open vs. Whole Plant
  misc_feature: MA Experiment ID: 20000436 Result: Up-regulated in Transcription
  misc_feature: MA Experiment 20000436 PARAMETER Experiment Name: At_Drought_P Parameter: Age (day) Value: 7
  misc_feature: MA Experiment 20000436 PARAMETER Experiment Name: At_Drought_P Parameter: Organism Value: A. thaliana
  misc_feature: MA Experiment 20000436 PARAMETER Experiment Name: At_Drought_P Parameter: Plant Line Value: WS
  misc_feature: MA Experiment 20000436 PARAMETER Experiment Name: At_Drought_P Parameter: Timepoint (hr) Value: 12
  misc_feature: MA Experiment 20000436 PARAMETER Experiment Name: At_Drought_P Parameter: Tissue Value: Whole Plant
  misc_feature: MA Experiment 20000436 PARAMETER Experiment Name: At_Drought_P Parameter: Treatment Value: Drought vs. No Drought
  misc_feature: MA Experiment ID: 20000437 Result: Up-regulated in Transcription
  misc_feature: MA Experiment 20000437 PARAMETER Experiment Name: At_Drought_P Parameter: Age (day) Value: 8
  misc_feature: MA Experiment 20000437 PARAMETER Experiment Name: At_Drought_P Parameter: Organism Value: A. thaliana
  misc_feature: MA Experiment 20000437 PARAMETER Experiment Name: At_Drought_P Parameter: Plant Line Value: WS
  misc_feature: MA Experiment 20000437 PARAMETER Experiment Name: At_Drought_P Parameter: Timepoint (hr) Value: 24
  misc_feature: MA Experiment 20000437 PARAMETER Experiment Name: At_Drought_P Parameter: Tissue Value: Whole Plant
  misc_feature: MA Experiment 20000437 PARAMETER Experiment Name: At_Drought_P Parameter: Treatment Value: Drought vs. No Drought
  misc_feature: MA Experiment ID: 20000453 Result: Up-regulated in Transcription
  misc_feature: MA Experiment 20000453 PARAMETER Experiment Name: At_100uM_ABA_P Parameter: Age (day) Value: 15
  misc_feature: MA Experiment 20000453 PARAMETER Experiment Name: At_100uM_ABA_P Parameter: Organism Value: A. thaliana
  misc_feature: MA Experiment 20000453 PARAMETER Experiment Name: At_100uM_ABA_P Parameter: Plant Line Value: WS
  misc_feature: MA Experiment 20000453 PARAMETER Experiment Name: At_100uM_ABA_P Parameter: Timepoint (hr) Value: 24
  misc_feature: MA Experiment 20000453 PARAMETER Experiment Name: At_100uM_ABA_P Parameter: Tissue Value: Aerial
  misc_feature: MA Experiment 20000453 PARAMETER Experiment Name: At_100uM_ABA_P Parameter: Treatment Value: 100uM ABA vs. No Treatment
  misc_feature: MA Experiment ID: 20000573 Result: Down-regulated in Transcription
  misc_feature: MA Experiment 20000573 PARAMETER Experiment Name: At_100uM_ABA_Mutants__P Parameter: Organism Value: A. thaliana
  misc_feature: MA Experiment 20000573 PARAMETER Experiment Name: At_100uM_ABA_Mutants__P Parameter: Plant Line Value: CS22 vs. Ler wt
  misc_feature: MA Experiment 20000573 PARAMETER Experiment Name: At_100uM_ABA_Mutants__P Parameter: Timepoint (hr) Value: N/A
  misc_feature: MA Experiment 20000573 PARAMETER Experiment Name: At_100uM_ABA_Mutants__P Parameter: Tissue Value: Whole Plant
  misc_feature: MA Experiment 20000573 PARAMETER Experiment Name: At_100uM_ABA_Mutants__P Parameter: Treatment Value: None
  misc_feature: MA Experiment ID: 20000574 Result: Down-regulated in Transcription
  misc_feature: MA Experiment 20000574 PARAMETER Experiment Name: At_100uM_ABA_Mutants__P Parameter: Organism Value: A. thaliana
  misc_feature: MA Experiment 20000574 PARAMETER Experiment Name: At_100uM_ABA_Mutants__P Parameter: Plant Line Value: CS23 vs. Ler wt
  misc_feature: MA Experiment 20000574 PARAMETER Experiment Name: At_100uM_ABA_Mutants__P Parameter: Timepoint (hr) Value: N/A
  misc_feature: MA Experiment 20000574 PARAMETER Experiment Name: At_100uM_ABA_Mutants__P Parameter: Tissue Value: Whole Plant
  misc_feature: MA Experiment 20000574 PARAMETER Experiment Name: At_100uM_ABA_Mutants__P Parameter: Treatment Value: None
  misc_feature: MA Experiment ID: 20001247 Result: Down-regulated in Transcription
  misc_feature: MA Experiment 20001247 PARAMETER Experiment Name: At_Far-red-induction_P Parameter: Age (day) Value: 7
  misc_feature: MA Experiment 20001247 PARAMETER Experiment Name: At_Far-red-induction_P Parameter: Light Value: Far-red vs. White
  misc_feature: MA Experiment 20001247 PARAMETER Experiment Name: At_Far-red-induction_P Parameter: Organism Value: A. thaliana
  misc_feature: MA Experiment 20001247 PARAMETER Experiment Name: At_Far-red-induction_P Parameter: Plant Line Value: Columbia
  misc_feature: MA Experiment 20001247 PARAMETER Experiment Name: At_Far-red-induction_P Parameter: Timepoint (hr) Value: 1
  misc_feature: MA Experiment 20001247 PARAMETER Experiment Name: At_Far-red-induction_P Parameter: Tissue Value: Whole Plant
  misc_feature: MA Experiment ID: 20001248 Result: Down-regulated in Transcription
  misc_feature: MA Experiment 20001248 PARAMETER Experiment Name: At_Far-red-induction_P Parameter: Age (day) Value: 7
  misc_feature: MA Experiment 20001248 PARAMETER Experiment Name: At_Far-red-induction_P Parameter: Light Value: Far-red vs. White
  misc_feature: MA Experiment 20001248 PARAMETER Experiment Name: At_Far-red-induction_P Parameter: Organism Value: A. thaliana
  misc_feature: MA Experiment 20001248 PARAMETER Experiment Name: At_Far-red-induction_P Parameter: Plant Line Value: Columbia
  misc_feature: MA Experiment 20001248 PARAMETER Experiment Name: At_Far-red-induction_P Parameter: Timepoint (hr) Value: 4
  misc_feature: MA Experiment 20001248 PARAMETER Experiment Name: At_Far-red-induction_P Parameter: Tissue Value: Whole Plant
  misc_feature: MA Experiment ID: 20001450 Result: Down-regulated in Transcription
  misc_feature: MA Experiment 20001450 PARAMETER Experiment Name: At_Far-red-induction_P Parameter: Age (day) Value: 7
  misc_feature: MA Experiment 20001450 PARAMETER Experiment Name: At_Far-red-induction_P Parameter: Light Value: Far-red vs. White
  misc_feature: MA Experiment 20001450 PARAMETER Experiment Name: At_Far-red-induction_P Parameter: Organism Value: A. thaliana
  misc_feature: MA Experiment 20001450 PARAMETER Experiment Name: At_Far-red-induction_P Parameter: Plant Line Value: Columbia
  misc_feature: MA Experiment 20001450 PARAMETER Experiment Name: At_Far-red-induction_P Parameter: Timepoint (hr) Value: 8
  misc_feature: MA Experiment 20001450 PARAMETER Experiment Name: At_Far-red-induction_P Parameter: Tissue Value: Whole Plant
  misc_feature: MA Experiment ID: 20001451 Result: Up-regulated in Transcription
  misc_feature: MA Experiment 20001451 PARAMETER Experiment Name: At_Far-red-induction_P Parameter: Age (day) Value: 7
  misc_feature: MA Experiment 20001451 PARAMETER Experiment Name: At_Far-red-induction_P Parameter: Light Value: Far-red vs. White
  misc_feature: MA Experiment 20001451 PARAMETER Experiment Name: At_Far-red-induction_P Parameter: Organism Value: A. thaliana
  misc_feature: MA Experiment 20001451 PARAMETER Experiment Name: At_Far-red-induction_P Parameter: Plant Line Value: Columbia
  misc_feature: MA Experiment 20001451 PARAMETER Experiment Name: At_Far-red-induction_P Parameter: Timepoint (hr) Value: 24
  misc_feature: MA Experiment 20001451 PARAMETER Experiment Name: At_Far-red-induction_P Parameter: Tissue Value: Whole Plant
  misc_feature: MA Experiment ID: 20001458 Result: Down-regulated in Transcription
  misc_feature: MA Experiment 20001458 PARAMETER Experiment Name: At_50mM_NH4NO3_L-to-H_P Parameter: Age (day) Value: Undefined
  misc_feature: MA Experiment 20001458 PARAMETER Experiment Name: At_50mM_NH4NO3_L-to-H_P Parameter: Organism Value: Undefined
  misc_feature: MA Experiment 20001458 PARAMETER Experiment Name: At_50mM_NH4NO3_L-to-H_P Parameter: Plant Line Value: Undefined
  misc_feature: MA Experiment 20001458 PARAMETER Experiment Name: At_50mM_NH4NO3_L-to-H_P Parameter: Timepoint (hr) Value: 2
  misc_feature: MA Experiment 20001458 PARAMETER Experiment Name: At_50mM_NH4NO3_L-to-H_P Parameter: Tissue Value: Siliques
  misc_feature: MA Experiment 20001458 PARAMETER Experiment Name: At_50mM_NH4NO3_L-to-H_P Parameter: Treatment Value: 50mM NH4NO3 vs. 100mM Manitol
  misc_feature: MA Experiment ID: 20001554 Result: Up-regulated in Transcription
  misc_feature: MA Experiment 20001554 PARAMETER Experiment Name: At_Drought_Soil_Dry_P Parameter: Age (day) Value: 21
  misc_feature: MA Experiment 20001554 PARAMETER Experiment Name: At_Drought_Soil_Dry_P Parameter: Organism Value: A. thaliana
  misc_feature: MA Experiment 20001554 PARAMETER Experiment Name: At_Drought_Soil_Dry_P Parameter: Plant Line Value: WS
  misc_feature: MA Experiment 20001554 PARAMETER Experiment Name: At_Drought_Soil_Dry_P Parameter: Post Timepoint (hr) Value: None
  misc_feature: MA Experiment 20001554 PARAMETER Experiment Name: At_Drought_Soil_Dry_P Parameter: Post-Treatment Value: None
  misc_feature: MA Experiment 20001554 PARAMETER Experiment Name: At_Drought_Soil_Dry_P Parameter: Timepoint (day) Value: 7
  misc_feature: MA Experiment 20001554 PARAMETER Experiment Name: At_Drought_Soil_Dry_P Parameter: Treatment Value: Drought vs. No Drought
  misc_feature: MA Experiment ID: 20001555 Result: Up-regulated in Transcription
  misc_feature: MA Experiment 20001555 PARAMETER Experiment Name: At_Drought_Soil_Dry_P Parameter: Age (day) Value: 24
  misc_feature: MA Experiment 20001555 PARAMETER Experiment Name: At_Drought_Soil_Dry_P Parameter: Organism Value: A. thaliana
  misc_feature: MA Experiment 20001555 PARAMETER Experiment Name: At_Drought_Soil_Dry_P Parameter: Plant Line Value: WS
  misc_feature: MA Experiment 20001555 PARAMETER Experiment Name: At_Drought_Soil_Dry_P Parameter: Post Timepoint (hr) Value: None
  misc_feature: MA Experiment 20001555 PARAMETER Experiment Name: At_Drought_Soil_Dry_P Parameter: Post-Treatment Value: None
  misc_feature: MA Experiment 20001555 PARAMETER Experiment Name: At_Drought_Soil_Dry_P Parameter: Timepoint (day) Value: 10
  misc_feature: MA Experiment 20001555 PARAMETER Experiment Name: At_Drought_Soil_Dry_P Parameter: Treatment Value: Drought vs. No Drought
  misc_feature: MA Experiment ID: 20001557 Result: Down-regulated in Transcription
  misc_feature: MA Experiment 20001557 PARAMETER Experiment Name: At_Drought_Soil_Dry_P Parameter: Age (day) Value: 27
  misc_feature: MA Experiment 20001557 PARAMETER Experiment Name: At_Drought_Soil_Dry_P Parameter: Organism Value: A. thaliana
  misc_feature: MA Experiment 20001557 PARAMETER Experiment Name: At_Drought_Soil_Dry_P Parameter: Plant Line Value: WS
  misc_feature: MA Experiment 20001557 PARAMETER Experiment Name: At_Drought_Soil_Dry_P Parameter: Post Timepoint (hr) Value: 3
  misc_feature: MA Experiment 20001557 PARAMETER Experiment Name: At_Drought_Soil_Dry_P Parameter: Post-Treatment Value: Re-Water vs. No Drought
  misc_feature: MA Experiment 20001557 PARAMETER Experiment Name: At_Drought_Soil_Dry_P Parameter: Timepoint (day) Value: 13
  misc_feature: MA Experiment 20001557 PARAMETER Experiment Name: At_Drought_Soil_Dry_P Parameter: Treatment Value: Drought vs. No Drought
  misc_feature: MA Experiment ID: 20001558 Result: Down-regulated in Transcription
  misc_feature: MA Experiment 20001558 PARAMETER Experiment Name: At_Drought_Soil_Dry_P Parameter: Age (day) Value: 27
  misc_feature: MA Experiment 20001558 PARAMETER Experiment Name: At_Drought_Soil_Dry_P Parameter: Organism Value: A. thaliana
  misc_feature: MA Experiment 20001558 PARAMETER Experiment Name: At_Drought_Soil_Dry_P Parameter: Plant Line Value: WS
  misc_feature: MA Experiment 20001558 PARAMETER Experiment Name: At_Drought_Soil_Dry_P Parameter: Post Timepoint (hr) Value: 6
  misc_feature: MA Experiment 20001558 PARAMETER Experiment Name: At_Drought_Soil_Dry_P Parameter: Post-Treatment Value: Re-Water vs. No Drought
  misc_feature: MA Experiment 20001558 PARAMETER Experiment Name: At_Drought_Soil_Dry_P Parameter: Timepoint (day) Value: 13
  misc_feature: MA Experiment 20001558 PARAMETER Experiment Name: At_Drought_Soil_Dry_P Parameter: Treatment Value: Drought vs. No Drought
  misc_feature: MA Experiment ID: 20001560 Result: Down-regulated in Transcription
  misc_feature: MA Experiment 20001560 PARAMETER Experiment Name: At_Drought_Soil_Dry_P Parameter: Age (day) Value: 28
  misc_feature: MA Experiment 20001560 PARAMETER Experiment Name: At_Drought_Soil_Dry_P Parameter: Organism Value: A. thaliana
  misc_feature: MA Experiment 20001560 PARAMETER Experiment Name: At_Drought_Soil_Dry_P Parameter: Plant Line Value: WS
  misc_feature: MA Experiment 20001560 PARAMETER Experiment Name: At_Drought_Soil_Dry_P Parameter: Post Timepoint (hr) Value: None
  misc_feature: MA Experiment 20001560 PARAMETER Experiment Name: At_Drought_Soil_Dry_P Parameter: Post-Treatment Value: None
  misc_feature: MA Experiment 20001560 PARAMETER Experiment Name: At_Drought_Soil_Dry_P Parameter: Timepoint (day) Value: 14
  misc_feature: MA Experiment 20001560 PARAMETER Experiment Name: At_Drought_Soil_Dry_P Parameter: Treatment Value: Drought vs. No Drought
  misc_feature: MA Experiment ID: 20001904 Result: Up-regulated in Transcription
  misc_feature: MA Experiment 20001904 PARAMETER Experiment Name: At_Drought_Reproduction_P Parameter: Age (day) Value: 37
  misc_feature: MA Experiment 20001904 PARAMETER Experiment Name: At_Drought_Reproduction_P Parameter: Organism Value: A. thaliana
  misc_feature: MA Experiment 20001904 PARAMETER Experiment Name: At_Drought_Reproduction_P Parameter: Plant Line Value: WS
  misc_feature: MA Experiment 20001904 PARAMETER Experiment Name: At_Drought_Reproduction_P Parameter: Timepoint (day) Value: 7
  misc_feature: MA Experiment 20001904 PARAMETER Experiment Name: At_Drought_Reproduction_P Parameter: Tissue Value: Rosettes
  misc_feature: MA Experiment 20001904 PARAMETER Experiment Name: At_Drought_Reproduction_P Parameter: Treatment Value: Drought vs. No Drought
  misc_feature: MA Experiment ID: 20001910 Result: Up-regulated in Transcription
  misc_feature: MA Experiment 20001910 PARAMETER Experiment Name: At_Drought_Reproduction_P Parameter: Age (day) Value: 37
  misc_feature: MA Experiment 20001910 PARAMETER Experiment Name: At_Drought_Reproduction_P Parameter: Organism Value: A. thaliana
  misc_feature: MA Experiment 20001910 PARAMETER Experiment Name: At_Drought_Reproduction_P Parameter: Plant Line Value: WS
  misc_feature: MA Experiment 20001910 PARAMETER Experiment Name: At_Drought_Reproduction_P Parameter: Timepoint (day) Value: 7
  misc_feature: MA Experiment 20001910 PARAMETER Experiment Name: At_Drought_Reproduction_P Parameter: Tissue Value: Flowers
  misc_feature: MA Experiment 20001910 PARAMETER Experiment Name: At_Drought_Reproduction_P Parameter: Treatment Value: Drought vs. No Drought
gattcatttgcacacttcttcttcttcttcctcatttctcttcctctcccatattccatggaattgctctacttcttcacctatgagagtaatatatcctcatgtactcaaaatactaatcaaacttcatgcttcaacaccaccttttcttaatcctccttcttcatcttcttcttccactatttcattttccctagtcggtgtaaatatcaaatggaggaagaacggcgagttctgttcggaaagtacgagatgggaaggttattaggcaaaggaaccttcgccaaagtctattacggcaaagagatcatcggcggcgagtgcgtcgcaatcaaagtcatcaacaaggatcaagtaatgaagagacctggaatgatggaacaaatcaaacgcgagatttcaatcatgaagctcgttcgtcatcccaacatagttgaattgaaagaagtcatggctacgaagaccaagatcttcttcgtcatggagttcgttaaaggcggcgagcttttctgcaaaatctctaaaggtaagttacacgaagacgctgctcgtagatatttccagcaattgatctcagccgttgattattgccatagtagaggcgtttctcatcgcgatctgaaacctgagaatcttcttttagatgagaatggagatttgaaaatctccgatttcggattatctgcgttaccggaacagattcttcaagacggattgcttcatacgcagtgtggaactccggcgtatgttgcgccggaggtattaaagaagaaaggatacgacggcgcgaaagctgatatctggtcgtgcggcgtcgttttgtatgttcttctcgccggatgtttgccgtttcaagatgagaatctgatgaatatgtatcggaagattttcagagcggattttgaatttccgccgtggttttctccggaagcgaggaggttgatttcgaaactcctcgttgtagatccagatcgacggatctcgattccggcgattatgagaacgccttggctccggaaaaacttcactccgccgttagctttcaaaatcgacgaaccgatttgttctcaaagcagcaaaaacaacgaagaagaagaagaagacggagattgtgaaaatcaaacagagccgatatcgccgaaattcttcaacgctttcgaattcatatcctcgatgtcttccggatttgacttatcgagcttgttcgagagcaagaggaaagtgcaatcggtgtttacgtcacggtcgtcggcgacggaggtaatggagaagatagaaacggttacgaaggagatgaacatgaaagtgaagagaacgaaggattttaaagtgaagatggaagggaaaacggaagggagaaaaggacggttgtcgatgacggcggaagtgtttgaagtagcgccggagatatcggtggtggagttttgcaaatcggcgggagatactttggagtacgataggttatacgaagaagaagtacggccggcgttaaacgacatcgtctggtcatggcacggtgataataataacacttcttccgaggattgttgaatcagtagtttttggttctgatttaaccggttatcggttaacgtagtataactaagaactgttacattgaacccaaattttctttggtttaataaaattttggttttactt

SEQ ID NO: 47152 - protein, 445 aa, Arabidopsis thaliana
  peptide (1)..(445): Ceres Seq. ID no. 13593529
  misc_feature (12)..(267): Pfam Name: Protein kinase domain Pfam Description: Protein kinase domain
  misc_feature (1)..(442): Homolog of NCBI NO: 34907870 NR Description: putative serine/threonine protein kinase
  misc_feature (1)..(436): Homolog of NCBI NO: 33146431 NR Description: putative Serine/threonine Kinase
  misc_feature (1)..(443): Homolog of NCBI NO: 8777339 NR Description: serine/threonine protein kinase [Arabidopsis
  misc_feature (1)..(437): Homolog of NCBI NO: 34903780 NR Description: unnamed protein product [Oryza sativa (japonica
  misc_feature (1)..(443): Homolog of NCBI NO: 15242509 NR Description: CBL-interacting protein kinase 20 [Arabidopsis
  misc_feature (1)..(438): Homolog of NCBI NO: 15224679 NR Description: CBL-interacting protein kinase 16 [Arabidopsis
  misc_feature (1)..(441): Homolog of NCBI NO: 18420882 NR Description: CBL-interacting protein kinase 25 [Arabidopsis
  misc_feature (1)..(441): Homolog of NCBI NO: 15215664 NR Description: AT5g25110/T11H3_120 [Arabidopsis thaliana]
  misc_feature (1)..(432): Homolog of NCBI NO: 24899813 NR Description: serine/threonine protein kinase-like protein
  misc_feature (1)..(445): Homolog of NCBI NO: 30683398 NR Description: CBL-interacting protein kinase 5 [Arabidopsis
MEEERRVLFGKYEMGRLLGKGTFAKVYYGKEIIGGECVAIKVINKDQVMKRPGMMEQIKREISIMKLVRHPNIVELKEVMATKTKIFFVMEFVKGGELFCKISKGKLHEDAARRYFQQLISAVDYCHSRGVSHRDLKPENLLLDENGDLKISDFGLSALPEQILQDGLLHTQCGTPAYVAPEVLKKKGYDGAKADIWSCGVVLYVLLAGCLPFQDENLMNMYRKIFRADFEFPPWFSPEARRLISKLLVVDPDRRISIPAIMRTPWLRKNFTPPLAFKIDEPICSQSSKNNEEEEEDGDCENQTEPISPKFFNAFEFISSMSSGFDLSSLFESKRKVQSVFTSRSSATEVMEKIETVTKEMNMKVKRTKDFKVKMEGKTEGRKGRLSMTAEVFEVAPEISVVEFCKSAGDTLEYDRLYEEEVRPALNDIVWSWHGDNNNTSSEDC

SEQ ID NO: 47153 - protein, 432 aa, Arabidopsis thaliana
  peptide (1)..(432): Ceres Seq. ID no. 13593530
  misc_feature (1)..(254): Pfam Name: Protein kinase domain Pfam Description: Protein kinase domain
  misc_feature (1)..(429): Homolog of NCBI NO: 34907870 NR Description: putative serine/threonine protein kinase
  misc_feature (1)..(423): Homolog of NCBI NO: 33146431 NR Description: putative Serine/threonine Kinase
  misc_feature (1)..(430): Homolog of NCBI NO: 8777339 NR Description: serine/threonine protein kinase [Arabidopsis
  misc_feature (1)..(424): Homolog of NCBI NO: 34903780 NR Description: unnamed protein product [Oryza sativa (japonica
  misc_feature (1)..(430): Homolog of NCBI NO: 15242509 NR Description: CBL-interacting protein kinase 20 [Arabidopsis
  misc_feature (1)..(425): Homolog of NCBI NO: 15224679 NR Description: CBL-interacting protein kinase 16 [Arabidopsis
  misc_feature (1)..(428): Homolog of NCBI NO: 18420882 NR Description: CBL-interacting protein kinase 25 [Arabidopsis
  misc_feature (1)..(428): Homolog of NCBI NO: 15215664 NR Description: AT5g25110/T11H3_120 [Arabidopsis thaliana]
  misc_feature (1)..(419): Homolog of NCBI NO: 24899813 NR Description: serine/threonine protein kinase-like protein
  misc_feature (1)..(432): Homolog of NCBI NO: 30683398 NR Description: CBL-interacting protein kinase 5 [Arabidopsis
MGRLLGKGTFAKVYYGKEIIGGECVAIKVINKDQVMKRPGMMEQIKREISIMKLVRHPNIVELKEVMATKTKIFFVMEFVKGGELFCKISKGKLHEDAARRYFQQLISAVDYCHSRGVSHRDLKPENLLLDENGDLKISDFGLSALPEQILQDGLLHTQCGTPAYVAPEVLKKKGYDGAKADIWSCGVVLYVLLAGCLPFQDENLMNMYRKIFRADFEFPPWFSPEARRLISKLLVVDPDRRISIPAIMRTPWLRKNFTPPLAFKIDEPICSQSSKNNEEEEEDGDCENQTEPISPKFFNAFEFISSMSSGFDLSSLFESKRKVQSVFTSRSSATEVMEKIETVTKEMNMKVKRTKDFKVKMEGKTEGRKGRLSMTAEVFEVAPEISVVEFCKSAGDTLEYDRLYEEEVRPALNDIVWSWHGDNNNTSSEDC

SEQ ID NO: 47154 - protein, 397 aa, Arabidopsis thaliana
  peptide (1)..(397): Ceres Seq. ID no. 13593531
  misc_feature (1)..(219): Pfam Name: Protein kinase domain Pfam Description: Protein kinase domain
  misc_feature (1)..(394): Homolog of NCBI NO: 34907870 NR Description: putative serine/threonine protein kinase
  misc_feature (1)..(388): Homolog of NCBI NO: 33146431 NR Description: putative Serine/threonine Kinase
  misc_feature (1)..(395): Homolog of NCBI NO: 8777339 NR Description: serine/threonine protein kinase [Arabidopsis
  misc_feature (1)..(389): Homolog of NCBI NO: 34903780 NR Description: unnamed protein product [Oryza sativa (japonica
  misc_feature (1)..(395): Homolog of NCBI NO: 15242509 NR Description: CBL-interacting protein kinase 20 [Arabidopsis
  misc_feature (1)..(390): Homolog of NCBI NO: 15224679 NR Description: CBL-interacting protein kinase 16 [Arabidopsis
  misc_feature (1)..(393): Homolog of NCBI NO: 18420882 NR Description: CBL-interacting protein kinase 25 [Arabidopsis
  misc_feature (1)..(393): Homolog of NCBI NO: 15215664 NR Description: AT5g25110/T11H3_120 [Arabidopsis thaliana]
  misc_feature (1)..(384): Homolog of NCBI NO: 24899813 NR Description: serine/threonine protein kinase-like protein
  misc_feature (1)..(397): Homolog of NCBI NO: 30683398 NR Description: CBL-interacting protein kinase 5 [Arabidopsis
MKRPGMMEQIKREISIMKLVRHPNIVELKEVMATKTKIFFVMEFVKGGELFCKISKGKLHEDAARRYFQQLISAVDYCHSRGVSHRDLKPENLLLDENGDLKISDFGLSALPEQILQDGLLHTQCGTPAYVAPEVLKKKGYDGAKADIWSCGVVLYVLLAGCLPFQDENLMNMYRKIFRADFEFPPWFSPEARRLISKLLVVDPDRRISIPAIMRTPWLRKNFTPPLAFKIDEPICSQSSKNNEEEEEDGDCENQTEPISPKFFNAFEFISSMSSGFDLSSLFESKRKVQSVFTSRSSATEVMEKIETVTKEMNMKVKRTKDFKVKMEGKTEGRKGRLSMTAEVFEVAPEISVVEFCKSAGDTLEYDRLYEEEVRPALNDIVWSWHGDNNNTSSEDC

SEQ ID NO: 47155 - DNA, 1710 bp, Arabidopsis thaliana
  misc_feature (1)..(1710): Ceres Seq. ID no. 13592321
  misc_feature: MA Experiment ID: 20000355 Result: Up-regulated in Transcription
  misc_feature: MA Experiment 20000355 PARAMETER Experiment Name: At_Siliques_Sub_P Parameter: Age (day) Value: 21
  misc_feature: MA Experiment 20000355 PARAMETER Experiment Name: At_Siliques_Sub_P Parameter: Organism Value: A. thaliana
  misc_feature: MA Experiment 20000355 PARAMETER Experiment Name: At_Siliques_Sub_P Parameter: Plant Line Value: WS
  misc_feature: MA Experiment 20000355 PARAMETER Experiment Name: At_Siliques_Sub_P Parameter: Tissue Value: Less Than 5mm Siliques vs. Whole Plant
  misc_feature: MA Experiment ID: 20000440 Result: Up-regulated in Transcription
  misc_feature: MA Experiment 20000440 PARAMETER Experiment Name: At_Closed-Flower__Sub_P Parameter: Tissue Value: Closed Flower vs. Whole Plant
gtctctctcacacactaacagaaagcacaaaaaacagagacaaaagaatggcgcgaaaatccctaattttcccggtgattttgctcgccgttcttctcttctctccgccgatttactccgccggtcacgattaccgcgacgctctccgtaaaagcattctcttcttcgaaggtcaacgttccggtaaactccctccagatcaacgcttaaaatggcgccgtgactcagcattacgcgacggttcctccgccggcgttgacttatccggtggttactacgacgccggagacaacatcaagttcggttttccgatggcgttcacaacaacgatgctttcatggagtataatcgatttcggtaaaaccatgggacctgagcttagaaacgccgtgaaagctgttaaatggggaacagattacctccttaaagcgacggcgattcccggagtagtcttcgtccaagtcggagacgcttactccgatcataactgttgggaaaggcctgaagatatggacactctccgtactgtttacaaaatcgatagagctcatcctggttctgacgtcgctggtgaaaccgcagccgctttagccgccgcttcaatcgtttttagaaaacgcgatcctgcttattccagacttctacttgaccgtgccactagggtattcgcgtttgctaacagatatcgcggcgcgtatagtaacagtctctaccacgcggtttgtcctttttactgtgatttcaacggttaccaggatgagttactgtggggagcggcatggctacacaaagcctcgaggaaacgagcgtacagagaattcattgtgaagaacgaggtcattcttaaggctggagataccattaatgagtttggttgggacaataagcatgctgggattaatgtcttaatctccaaggaagtgttaatgggaaaagcagagtattttgagtctttcaagcagaacgcagatgggtttatctgttctatattgcctggaatttctcacccccaagtccaatactctcgaggagggctactagtgaagactggagggagtaacatgcaacatgtaacatcactatctttcctcctattggcttactctaattatctgagccatgccaaaaaggttgtgccttgtggcgaattaactgcttccccatctctcctccgtcaaatcgccaagcgtcaggtggattacattctcggagacaacccgatgggactgtcttacatggttggatacggtcaaaagtttccacgtaggattcatcaccgtggtagctcggttccttcggtttcagcccatccaagccacatagggtgcaaagaaggctctcgctatttcctaagcccaaatcctaacccaaaccttttggttggtgctgtagtcggtggacctaatgtcactgatgcttttccggattcaagaccttactttcagcagtctgagcccacgacttatatcaatgcaccactagtgggccttctcggttacttctccgcccattctacttggcgatgagggagggccttattacttattactctctatcctattagaggtgtgctggaaactttaggccaccctaaaacccttttttttcttttttaatgttattgccactctttattttctactacttaaccaattgtattgtaagcccgtaattagtgaagaagagaaagagttatgtcggtgtctaaac

SEQ ID NO: 47156 - protein, 507 aa, Arabidopsis thaliana
  peptide (1)..(507): Ceres Seq. ID no. 13592322
  misc_feature (43)..(500): Pfam Name: Glycosyl hydrolase family 9 Pfam Description: Glycosyl hydrolase family 9
  misc_feature (43)..(500): Pfam Name: Glycosyl hydrolase family 9 Pfam Description: Glycosyl hydrolase family 9
  misc_feature (16)..(504): Homolog of NCBI NO: 16903351 NR Description: endo-beta-1,4-glucanase precursor [Nicotiana
  misc_feature (26)..(504): Homolog of NCBI NO: 7488978 NR Description: cellulase (EC 3.2.1.4) Cel2 precursor - tomato
  misc_feature (16)..(503): Homolog of NCBI NO: 3892180 NR Description: cellulase [Fragaria x ananassa]
  misc_feature (16)..(503): Homolog of NCBI NO: 4220423 NR Description: putative cellulase [Fragaria x ananassa]
  misc_feature (16)..(503): Homolog of NCBI NO: 4972234 NR Description: endo-beta-1,4-glucanase [Fragaria x ananassa]
  misc_feature (16)..(504): Homolog of NCBI NO: 16903351 NR Description: endo-beta-1,4-glucanase precursor [Nicotiana
  misc_feature (16)..(503): Homolog of NCBI NO: 3892180 NR Description: cellulase [Fragaria x ananassa]
  misc_feature (16)..(503): Homolog of NCBI NO: 4972234 NR Description: endo-beta-1,4-glucanase [Fragaria x ananassa]
  misc_feature (16)..(507): Homolog of NCBI NO: 15223222 NR Description: glycosyl hydrolase family 9
  misc_feature (16)..(507): Homolog of NCBI NO: 2440035 NR Description: endo-1,4-beta-glucanase [Arabidopsis thaliana]
  misc_feature (16)..(507): Homolog of NCBI NO: 2440033 NR Description: endo-1,4-beta-glucanase [Arabidopsis thaliana]
  misc_feature (16)..(503): Homolog of NCBI NO: 15220676 NR Description: glycosyl hydrolase family 9 [Arabidopsis
  misc_feature (16)..(503): Homolog of NCBI NO: 3549291 NR Description: endo-1,4-beta-glucanase precursor [Fragaria x
  misc_feature (16)..(503): Homolog of NCBI NO: 4220423 NR Description: putative cellulase [Fragaria x ananassa]
  misc_feature (26)..(504): Homolog of NCBI NO: 7488978 NR Description: cellulase (EC 3.2.1.4) Cel2 precursor - tomato
  misc_feature (16)..(503): Homolog of NCBI NO: 3549291 NR Description: endo-1,4-beta-glucanase precursor [Fragaria x
  misc_feature (16)..(503): Homolog of NCBI NO: 15220676 NR Description: glycosyl hydrolase family 9 [Arabidopsis
  misc_feature (16)..(507): Homolog of NCBI NO: 2440033 NR Description: endo-1,4-beta-glucanase [Arabidopsis thaliana]
  misc_feature (16)..(507): Homolog of NCBI NO: 2440035 NR Description: endo-1,4-beta-glucanase [Arabidopsis thaliana]
  misc_feature (16)..(507): Homolog of NCBI NO: 15223222 NR Description: glycosyl hydrolase family 9
LSHTLTESTKNRDKRMARKSLIFPVILLAVLLFSPPIYSAGHDYRDALRKSILFFEGQRSGKLPPDQRLKWRRDSALRDGSSAGVDLSGGYYDAGDNIKFGFPMAFTTTMLSWSIIDFGKTMGPELRNAVKAVKWGTDYLLKATAIPGVVFVQVGDAYSDHNCWERPEDMDTLRTVYKIDRAHPGSDVAGETAAALAAASIVFRKRDPAYSRLLLDRATRVFAFANRYRGAYSNSLYHAVCPFYCDFNGYQDELLWGAAWLHKASRKRAYREFIVKNEVILKAGDTINEFGWDNKHAGINVLISKEVLMGKAEYFESFKQNADGFICSILPGISHPQVQYSRGGLLVKTGGSNMQHVTSLSFLLLAYSNYLSHAKKVVPCGELTASPSLLRQIAKRQVDYILGDNPMGLSYMVGYGQKFPRRIHHRGSSVPSVSAHPSHIGCKEGSRYFLSPNPNPNLLVGAVVGGPNVTDAFPDSRPYFQQSEPTTYINAPLVGLLGYFSAHSTWR

SEQ ID NO: 47157 - protein, 492 aa, Arabidopsis thaliana
  peptide (1)..(492): Ceres Seq. ID no. 13592323
  misc_feature (28)..(485): Pfam Name: Glycosyl hydrolase family 9 Pfam Description: Glycosyl hydrolase family 9
  misc_feature (28)..(485): Pfam Name: Glycosyl hydrolase family 9 Pfam Description: Glycosyl hydrolase family 9
  misc_feature (1)..(489): Homolog of NCBI NO: 16903351 NR Description: endo-beta-1,4-glucanase precursor [Nicotiana
  misc_feature (11)..(489): Homolog of NCBI NO: 7488978 NR Description: cellulase (EC 3.2.1.4) Cel2 precursor - tomato
  misc_feature (1)..(488): Homolog of NCBI NO: 3892180 NR Description: cellulase [Fragaria x ananassa]
  misc_feature (1)..(488): Homolog of NCBI NO: 4220423 NR Description: putative cellulase [Fragaria x ananassa]
  misc_feature (1)..(488): Homolog of NCBI NO: 4972234 NR Description: endo-beta-1,4-glucanase [Fragaria x ananassa]
  misc_feature (1)..(489): Homolog of NCBI NO: 16903351 NR Description: endo-beta-1,4-glucanase precursor [Nicotiana
  misc_feature (1)..(488): Homolog of NCBI NO: 3892180 NR Description: cellulase [Fragaria x ananassa]
  misc_feature (1)..(488): Homolog of NCBI NO: 4972234 NR Description: endo-beta-1,4-glucanase [Fragaria x ananassa]
  misc_feature (1)..(492): Homolog of NCBI NO: 15223222 NR Description: glycosyl hydrolase family 9
  misc_feature (1)..(492): Homolog of NCBI NO: 2440035 NR Description: endo-1,4-beta-glucanase [Arabidopsis thaliana]
  misc_feature (1)..(492): Homolog of NCBI NO: 2440033 NR Description: endo-1,4-beta-glucanase [Arabidopsis thaliana]
  misc_feature (1)..(488): Homolog of NCBI NO: 15220676 NR Description: glycosyl hydrolase family 9 [Arabidopsis
  misc_feature (1)..(488): Homolog of NCBI NO: 3549291 NR Description: endo-1,4-beta-glucanase precursor [Fragaria x
  misc_feature (1)..(488): Homolog of NCBI NO: 4220423 NR Description: putative cellulase [Fragaria x ananassa]
  misc_feature (11)..(489): Homolog of NCBI NO: 7488978 NR Description: cellulase (EC 3.2.1.4) Cel2 precursor - tomato
  misc_feature (1)..(488): Homolog of NCBI NO: 3549291 NR Description: endo-1,4-beta-glucanase precursor [Fragaria x
  misc_feature (1)..(488): Homolog of NCBI NO: 15220676 NR Description: glycosyl hydrolase family 9 [Arabidopsis
  misc_feature (1)..(492): Homolog of NCBI NO: 2440033 NR Description: endo-1,4-beta-glucanase [Arabidopsis thaliana]
  misc_feature (1)..(492): Homolog of NCBI NO: 2440035 NR Description: endo-1,4-beta-glucanase [Arabidopsis thaliana]
  misc_feature (1)..(492): Homolog of NCBI NO: 15223222 NR Description: glycosyl hydrolase family 9
MARKSLIFPVILLAVLLFSPPIYSAGHDYRDALRKSILFFEGQRSGKLPPDQRLKWRRDSALRDGSSAGVDLSGGYYDAGDNIKFGFPMAFTTTMLSWSIIDFGKTMGPELRNAVKAVKWGTDYLLKATAIPGVVFVQVGDAYSDHNCWERPEDMDTLRTVYKIDRAHPGSDVAGETAAALAAASIVFRKRDPAYSRLLLDRATRVFAFANRYRGAYSNSLYHAVCPFYCDFNGYQDELLWGAAWLHKASRKRAYREFIVKNEVILKAGDTINEFGWDNKHAGINVLISKEVLMGKAEYFESFKQNADGFICSILPGISHPQVQYSRGGLLVKTGGSNMQHVTSLSFLLLAYSNYLSHAKKVVPCGELTASPSLLRQIAKRQVDYILGDNPMGLSYMVGYGQKFPRRIHHRGSSVPSVSAHPSHIGCKEGSRYFLSPNPNPNLLVGAVVGGPNVTDAFPDSRPYFQQSEPTTYINAPLVGLLGYFSAHSTWR

SEQ ID NO: 47158 - protein, 404 aa, Arabidopsis thaliana
  peptide (1)..(404): Ceres Seq. ID no. 13592324
  misc_feature (1)..(397): Pfam Name: Glycosyl hydrolase family 9 Pfam Description: Glycosyl hydrolase family 9
  misc_feature (1)..(397): Pfam Name: Glycosyl hydrolase family 9 Pfam Description: Glycosyl hydrolase family 9
  misc_feature (1)..(401): Homolog of NCBI NO: 16903351 NR Description: endo-beta-1,4-glucanase precursor [Nicotiana
  misc_feature (1)..(401): Homolog of NCBI NO: 7488978 NR Description: cellulase (EC 3.2.1.4) Cel2 precursor - tomato
  misc_feature (1)..(400): Homolog of NCBI NO: 3892180 NR Description: cellulase [Fragaria x ananassa]
  misc_feature (1)..(400): Homolog of NCBI NO: 4220423 NR Description: putative cellulase [Fragaria x ananassa]
  misc_feature (1)..(400): Homolog of NCBI NO: 4972234 NR Description: endo-beta-1,4-glucanase [Fragaria x ananassa]
  misc_feature (1)..(401): Homolog of NCBI NO: 16903351 NR Description: endo-beta-1,4-glucanase precursor [Nicotiana
  misc_feature (1)..(400): Homolog of NCBI NO: 3892180 NR Description: cellulase [Fragaria x ananassa]
  misc_feature (1)..(400): Homolog of NCBI NO: 4972234 NR Description: endo-beta-1,4-glucanase [Fragaria x ananassa]
  misc_feature (1)..(404): Homolog of NCBI NO: 15223222 NR Description: glycosyl hydrolase family 9
  misc_feature (1)..(404): Homolog of NCBI NO: 2440035 NR Description: endo-1,4-beta-glucanase [Arabidopsis thaliana]
  misc_feature (1)..(404): Homolog of NCBI NO: 2440033 NR Description: endo-1,4-beta-glucanase [Arabidopsis thaliana]
  misc_feature (1)..(400): Homolog of NCBI NO: 15220676 NR Description: glycosyl hydrolase family 9 [Arabidopsis
  misc_feature (1)..(400): Homolog of NCBI NO: 3549291 NR Description: endo-1,4-beta-glucanase precursor [Fragaria x
  misc_feature (1)..(400): Homolog of NCBI NO: 4220423 NR Description: putative cellulase [Fragaria x ananassa]
  misc_feature (1)..(401): Homolog of NCBI NO: 7488978 NR Description: cellulase (EC 3.2.1.4) Cel2 precursor - tomato
  misc_feature (1)..(400): Homolog of NCBI NO: 3549291 NR Description: endo-1,4-beta-glucanase precursor [Fragaria x
  misc_feature (1)..(400): Homolog of NCBI NO: 15220676 NR Description: glycosyl hydrolase family 9 [Arabidopsis
  misc_feature (1)..(404): Homolog of NCBI NO: 2440033 NR Description: endo-1,4-beta-glucanase [Arabidopsis thaliana]
  misc_feature (1)..(404): Homolog of NCBI NO: 2440035 NR Description: endo-1,4-beta-glucanase [Arabidopsis thaliana]
  misc_feature (1)..(404): Homolog of NCBI NO: 15223222 NR Description: glycosyl hydrolase family 9
MAFTTTMLSWSIIDFGKTMGPELRNAVKAVKWGTDYLLKATAIPGVVFVQVGDAYSDHNCWERPEDMDTLRTVYKIDRAHPGSDVAGETAAALAAASIVFRKRDPAYSRLLLDRATRVFAFANRYRGAYSNSLYHAVCPFYCDFNGYQDELLWGAAWLHKASRKRAYREFIVKNEVILKAGDTINEFGWDNKHAGINVLISKEVLMGKAEYFESFKQNADGFICSILPGISHPQVQYSRGGLLVKTGGSNMQHVTSLSFLLLAYSNYLSHAKKVVPCGELTASPSLLRQIAKRQVDYILGDNPMGLSYMVGYGQKFPRRIHHRGSSVPSVSAHPSHIGCKEGSRYFLSPNPNPNLLVGAVVGGPNVTDAFPDSRPYFQQSEPTTYINAPLVGLLGYFSAHSTWR

SEQ ID NO: 47159 - DNA, 1778 bp, Arabidopsis thaliana
  misc_feature (1)..(1778): Ceres Seq. ID no. 12739220
  misc_feature: MA Experiment ID: 108577 Result: Up-regulated in Transcription
  misc_feature: MA Experiment 108577 PARAMETER Experiment Name: At_42deg_Heat_cDNA_P Parameter: Temperature (deg C) Value: 42 vs. 22
  misc_feature: MA Experiment 108577 PARAMETER Experiment Name: At_42deg_Heat_cDNA_P Parameter: Timepoint (hr) Value: 6
  misc_feature: MA Experiment 108577 PARAMETER Experiment Name: At_42deg_Heat_cDNA_P Parameter: Tissue Value: Aerial
  misc_feature: MA Experiment ID: 20000069 Result: Down-regulated in Transcription
  misc_feature: MA Experiment 20000069 PARAMETER Experiment Name: At_100uM_ABA_Mutants_cDNA_P Parameter: Plant Line Value: CS23
  misc_feature: MA Experiment 20000069 PARAMETER Experiment Name: At_100uM_ABA_Mutants_cDNA_P Parameter: Timepoint (hr) Value: 6
  misc_feature: MA Experiment 20000069 PARAMETER Experiment Name: At_100uM_ABA_Mutants_cDNA_P Parameter: Tissue Value: Aerial
  misc_feature: MA Experiment 20000069 PARAMETER Experiment Name: At_100uM_ABA_Mutants_cDNA_P Parameter: Treatment Value: 100uM ABA vs. No Treatment
  misc_feature: MA Experiment ID: 20000087 Result: Down-regulated in Transcription
  misc_feature: MA Experiment 20000087 PARAMETER Experiment Name: At_100uM_ABA_Mutants_cDNA_P Parameter: Plant Line Value: WS
  misc_feature: MA Experiment 20000087 PARAMETER Experiment Name: At_100uM_ABA_Mutants_cDNA_P Parameter: Timepoint (hr) Value: 6
  misc_feature: MA Experiment 20000087 PARAMETER Experiment Name: At_100uM_ABA_Mutants_cDNA_P Parameter: Tissue Value: Aerial
  misc_feature: MA Experiment 20000087 PARAMETER Experiment Name: At_100uM_ABA_Mutants_cDNA_P Parameter: Treatment Value: 100uM ABA vs. No Treatment
  misc_feature: MA Experiment ID: 20000111 Result: Up-regulated in Transcription
  misc_feature: MA Experiment 20000111 PARAMETER Experiment Name: At_42deg_Heat_cDNA_P Parameter: Temperature (deg C) Value: 42 vs. 22
  misc_feature: MA Experiment 20000111 PARAMETER Experiment Name: At_42deg_Heat_cDNA_P Parameter: Timepoint (hr) Value: 6
  misc_feature: MA Experiment 20000111 PARAMETER Experiment Name: At_42deg_Heat_cDNA_P Parameter: Tissue Value: Aerial
  misc_feature: MA Experiment ID: 20000315 Result: Up-regulated in Transcription
  misc_feature: MA Experiment 20000315 PARAMETER Experiment Name: At_14day_Shoots-Roots_Sub_P Parameter: Age (day) Value: 14
  misc_feature: MA Experiment 20000315 PARAMETER Experiment Name: At_14day_Shoots-Roots_Sub_P Parameter: Organism Value: A. thaliana
  misc_feature: MA Experiment 20000315 PARAMETER Experiment Name: At_14day_Shoots-Roots_Sub_P Parameter: Plant Line Value: WS
  misc_feature: MA Experiment 20000315 PARAMETER Experiment Name: At_14day_Shoots-Roots_Sub_P Parameter: Tissue Value: Shoots vs. Whole Plant
  misc_feature: MA Experiment ID: 20000328 Result: Up-regulated in Transcription
  misc_feature: MA Experiment 20000328 PARAMETER Experiment Name: At_42deg_Heat_Sub_P Parameter: Age (day) Value: 14
  misc_feature: MA Experiment 20000328 PARAMETER Experiment Name: At_42deg_Heat_Sub_P Parameter: Organism Value: A. thaliana
  misc_feature: MA Experiment 20000328 PARAMETER Experiment Name: At_42deg_Heat_Sub_P Parameter: Plant Line Value: WS
  misc_feature: MA Experiment 20000328 PARAMETER Experiment Name: At_42deg_Heat_Sub_P Parameter: Temperature (deg C) Value: 42 vs. 22
  misc_feature: MA Experiment 20000328 PARAMETER Experiment Name: At_42deg_Heat_Sub_P Parameter: Timepoint (hr) Value: 6
  misc_feature: MA Experiment 20000328 PARAMETER Experiment Name: At_42deg_Heat_Sub_P Parameter: Tissue Value: Aerial
atttatttctctacttgtccacttttctacagccgcatcatccttctcccttgtgcgatatcgtttgcgtgagatttgtctgaaaagtagctaaccatgggtaaagagaagtttcacatcaacattgtggtcattggccacgtcgattctggaaagtcgacaaccactggacacttgatctacaagttgggtggtattgacaagcgtgtgatcgagaggttcgagaaggaggctgctgagatgaacaagaggtccttcaagtacgcatgggtgttggacaaacttaaggctgagcgtgagcgtggtatcaccattgacattgctctctggaagttcgagaccaccaagtactactgcactgtcattgatgctcctggtcatcgtgatttcatcaagaacatgatcactggtacctcccaggctgattgtgctgtccttatcattgactccaccactggtggttttgaggctggtatctccaaggatggtcagacccgtgagcacgctctccttgctttcacccttggtgtcaagcagatgatctgctgttgtaacaagatggatgccactacccccaagtactccaaggccaggtacgatgaaatcatcaaggaggtgtcttcctacttgaagaaggttggttacaaccccgacaaaatcccatttgtgcccatctctggatttgagggtgacaacatgattgagaggtccaccaaccttgactggtacaagggaccaactctccttgaggctcttgaccagatcaacgagcccaagaggccgtcagacaagccccttcgtctcccacttcaggatgtctacaagattggtggtattggaacggtgccagtgggacgtgttgagactggtatgatcaagcctggtatggttgtgacctttgctcccacaggattgaccactgaggtcaagtctgttgagatgcaccacgagtctcttcttgaggcacttccaggtgacaacgttgggttcaatgttaagaatgttgccgtgaaggatcttaagagagggtacgtcgcctccaactccaaggatgaccctgccaagggtgctgctaacttcacctcccaggtcatcatcatgaaccaccctggtcagattggtaacggttacgccccagtcttggattgccacacctctcacattgcagtcaagttctctgagatcttgaccaagattgacaggcgttctggtaaggagattgagaaggagcccaaattcttgaagaatggtgatgctggtatggtgaagatgactccaaccaagcccatggttgtggagaccttctctgagtacccaccacttggacgtttcgctgttagggacatgaggcagactgttgcagtcggtgttatcaagagtgttgacaagaaggacccaaccggagccaaggttaccaaggctgcagttaagaagggtgcaaagtgaactcgaatcctcaaaactctatccgcagatgaatcaaaaaacaatattagtttctttactttagtttggtatttggtcgcgtgttatagcttcgtttcttctccatcggaactctgttcccggaactgggttcttgatcggaggtggcggagctactttgcacctattttgcttttgaattgttatcaattttgaacctatttggagattcggttatatgatgtgattttccgaggatattctctctttttttgttgcgtgtatcacattcgaattcagtctcttggataacttgtggaaaaacttataacttcaagaaaaaccttataaac

SEQ ID NO: 47160 - protein, 449 aa, Arabidopsis thaliana; identical to SEQ ID NO: 27284
  peptide (1)..(449): Ceres Seq. ID no. 12739221
  misc_feature (5)..(227): Pfam Name: Elongation factor Tu GTP binding domain Pfam Description: Elongation factor Tu GTP binding domain
  misc_feature (1)..(449): Homolog of NCBI NO: 15081765 NR Description: At1g07930/T6D22_3 [Arabidopsis thaliana]
  misc_feature (1)..(449): Homolog of NCBI NO: 17064954 NR Description: putative elongation factor 1-a [Arabidopsis
  misc_feature (1)..(449): Homolog of NCBI NO: 18086389 NR Description: At1g07930/T6D22_3 [Arabidopsis thaliana]
  misc_feature (1)..(449): Homolog of NCBI NO: 23397097 NR Description: putative translation elongation factor eEF-1
  misc_feature (1)..(449): Homolog of NCBI NO: 13430510 NR Description: putative translation elongation factor eEF-1
  misc_feature (1)..(449): Homolog of NCBI NO: 13605682 NR Description: At1g07930/T6D22_3 [Arabidopsis thaliana]
  misc_feature (1)..(449): Homolog of NCBI NO: 99688 NR Description: translation elongation factor eEF-1 alpha chain
  misc_feature (1)..(449): Homolog of NCBI NO: 15239308 NR Description: elongation factor 1-alpha (EF-1-alpha)
  misc_feature (1)..(449): Homolog of NCBI NO: 25407012 NR Description: protein T6D22.2 [imported] - Arabidopsis thaliana
  misc_feature (1)..(449): Homolog of NCBI NO: 25407012 NR Description: protein T6D22.2 [imported] - Arabidopsis thaliana

SEQ ID NO: 47161 - protein, 401 aa, Arabidopsis thaliana; identical to SEQ ID NO: 21437
  peptide (1)..(401): Ceres Seq. ID no. 12739222
  misc_feature (1)..(179): Pfam Name: Elongation factor Tu GTP binding domain Pfam Description: Elongation factor Tu GTP binding domain
  misc_feature (1)..(401): Homolog of NCBI NO: 15081765 NR Description: At1g07930/T6D22_3 [Arabidopsis thaliana]
  misc_feature (1)..(401): Homolog of NCBI NO: 17064954 NR Description: putative elongation factor 1-a [Arabidopsis
  misc_feature (1)..(401): Homolog of NCBI NO: 18086389 NR Description: At1g07930/T6D22_3 [Arabidopsis thaliana]
  misc_feature (1)..(401): Homolog of NCBI NO: 23397097 NR Description: putative translation elongation factor eEF-1
  misc_feature (1)..(401): Homolog of NCBI NO: 13430510 NR Description: putative translation elongation factor eEF-1
  misc_feature (1)..(401): Homolog of NCBI NO: 13605682 NR Description: At1g07930/T6D22_3 [Arabidopsis thaliana]
  misc_feature (1)..(401): Homolog of NCBI NO: 99688 NR Description: translation elongation factor eEF-1 alpha chain
  misc_feature (1)..(401): Homolog of NCBI NO: 15239308 NR Description: elongation factor 1-alpha (EF-1-alpha)
  misc_feature (1)..(401): Homolog of NCBI NO: 25407012 NR Description: protein T6D22.2 [imported] - Arabidopsis thaliana
  misc_feature (1)..(401): Homolog of NCBI NO: 25407012 NR Description: protein T6D22.2 [imported] - Arabidopsis thaliana

SEQ ID NO: 47162 - protein, 348 aa, Arabidopsis thaliana; identical to SEQ ID NO: 21438
  peptide (1)..(348): Ceres Seq. ID no. 12739223
  misc_feature (1)..(126): Pfam Name: Elongation factor Tu GTP binding domain Pfam Description: Elongation factor Tu GTP binding domain
  misc_feature (1)..(348): Homolog of NCBI NO: 15081765 NR Description: At1g07930/T6D22_3 [Arabidopsis thaliana]
  misc_feature (1)..(348): Homolog of NCBI NO: 17064954 NR Description: putative elongation factor 1-a [Arabidopsis
  misc_feature (1)..(348): Homolog of NCBI NO: 18086389 NR Description: At1g07930/T6D22_3 [Arabidopsis thaliana]
  misc_feature (1)..(348): Homolog of NCBI NO: 23397097 NR Description: putative translation elongation factor eEF-1
  misc_feature (1)..(348): Homolog of NCBI NO: 13430510 NR Description: putative translation elongation factor eEF-1
  misc_feature (1)..(348): Homolog of NCBI NO: 13605682 NR Description: At1g07930/T6D22_3 [Arabidopsis thaliana]
  misc_feature (1)..(348): Homolog of NCBI NO: 99688 NR Description: translation elongation factor eEF-1 alpha chain
  misc_feature (1)..(348): Homolog of NCBI NO: 15239308 NR Description: elongation factor 1-alpha (EF-1-alpha)
  misc_feature (1)..(348): Homolog of NCBI NO: 25407012 NR Description: protein T6D22.2 [imported] - Arabidopsis thaliana
  misc_feature (1)..(348): Homolog of NCBI NO: 25407012 NR Description: protein T6D22.2 [imported] - Arabidopsis thaliana

SEQ ID NO: 47163 - DNA, 1921 bp, Arabidopsis thaliana; identical to SEQ ID NO: 44980
  misc_feature (1)..(1921): Ceres Seq. ID no. 12559858
  misc_feature: MA Experiment ID: 20000180 Result: Up-regulated in Transcription
  misc_feature: MA Experiment 20000180 PARAMETER Experiment Name: At_Germinating_Seeds_P Parameter: Age (hr) Value: 24 vs. 0
  misc_feature: MA Experiment 20000180 PARAMETER Experiment Name: At_Germinating_Seeds_P Parameter: Tissue Value: Germinating Seeds
  misc_feature: MA Experiment ID: 20000182 Result: Down-regulated in Transcription
  misc_feature: MA Experiment 20000182 PARAMETER Experiment Name: At_2mM_SA_P Parameter: Age (day) Value: 14
  misc_feature: MA Experiment 20000182 PARAMETER Experiment Name: At_2mM_SA_P Parameter: Organism Value: A. thaliana
  misc_feature: MA Experiment 20000182 PARAMETER Experiment Name: At_2mM_SA_P Parameter: Plant Line Value: WS
  misc_feature: MA Experiment 20000182 PARAMETER Experiment Name: At_2mM_SA_P Parameter: Timepoint (hr) Value: 6
  misc_feature: MA Experiment 20000182 PARAMETER Experiment Name: At_2mM_SA_P Parameter: Tissue Value: Aerial
  misc_feature: MA Experiment 20000182 PARAMETER Experiment Name: At_2mM_SA_P Parameter: Treatment Value: 2mM SA vs. No Treatment
  misc_feature: MA Experiment ID: 20000185 Result: Down-regulated in Transcription
  misc_feature: MA Experiment 20000185 PARAMETER Experiment Name: At_Roots__P Parameter: Age (day) Value: 7 vs. 21
  misc_feature: MA Experiment 20000185 PARAMETER Experiment Name: At_Roots__P Parameter: Organism Value: A. thaliana
  misc_feature: MA Experiment 20000185 PARAMETER Experiment Name: At_Roots__P Parameter: Tissue Value: Roots vs. Whole Plant
  misc_feature: MA Experiment ID: 20000227 Result: Down-regulated in Transcription
  misc_feature: MA Experiment 20000227 PARAMETER Experiment Name: At_Root-Tips-vs-Tops_P Parameter: Tissue Value: Root Tips vs. Root Tops
  misc_feature: MA Experiment ID: 20001248 Result: Down-regulated in Transcription
  misc_feature: MA Experiment 20001248 PARAMETER Experiment Name: At_Far-red-induction_P Parameter: Age (day) Value: 7
  misc_feature: MA Experiment 20001248 PARAMETER Experiment Name: At_Far-red-induction_P Parameter: Light Value: Far-red vs. White
  misc_feature: MA Experiment 20001248 PARAMETER Experiment Name: At_Far-red-induction_P Parameter: Organism Value: A. thaliana
  misc_feature: MA Experiment 20001248 PARAMETER Experiment Name: At_Far-red-induction_P Parameter: Plant Line Value: Columbia
  misc_feature: MA Experiment 20001248 PARAMETER Experiment Name: At_Far-red-induction_P Parameter: Timepoint (hr) Value: 4
  misc_feature: MA Experiment 20001248 PARAMETER Experiment Name: At_Far-red-induction_P Parameter: Tissue Value: Whole Plant
  misc_feature: MA Experiment ID: 20001450 Result: Down-regulated in Transcription
  misc_feature: MA Experiment 20001450 PARAMETER Experiment Name: At_Far-red-induction_P Parameter: Age (day) Value: 7
  misc_feature: MA Experiment 20001450 PARAMETER Experiment Name: At_Far-red-induction_P Parameter: Light Value: Far-red vs. White
  misc_feature: MA Experiment 20001450 PARAMETER Experiment Name: At_Far-red-induction_P Parameter: Organism Value: A. thaliana
  misc_feature: MA Experiment 20001450 PARAMETER Experiment Name: At_Far-red-induction_P Parameter: Plant Line Value: Columbia
  misc_feature: MA Experiment 20001450 PARAMETER Experiment Name: At_Far-red-induction_P Parameter: Timepoint (hr) Value: 8
  misc_feature: MA Experiment 20001450 PARAMETER Experiment Name: At_Far-red-induction_P Parameter: Tissue Value: Whole Plant

SEQ ID NO: 47164 - protein, 580 aa, Arabidopsis thaliana; identical to SEQ ID NO: 44981
  peptide (1)..(580): Ceres Seq. ID no. 12559859
  misc_feature (5)..(580): Homolog of NCBI NO: 7427576 NR Description: probable cytochrome P450 - Arabidopsis thaliana
  misc_feature (1)..(580): Homolog of NCBI NO: 30683137 NR Description: cytochrome p450, putative [Arabidopsis thaliana]
  misc_feature (5)..(580): Homolog of NCBI NO: 7427576 NR Description: probable cytochrome P450 - Arabidopsis thaliana
  misc_feature (1)..(580): Homolog of NCBI NO: 30683137 NR Description: cytochrome p450, putative [Arabidopsis thaliana]

SEQ ID NO: 47165 - protein, 576 aa, Arabidopsis thaliana; identical to SEQ ID NO: 44982
  peptide (1)..(576): Ceres Seq. ID no. 12559860
  misc_feature (1)..(576): Homolog of NCBI NO: 7427576 NR Description: probable cytochrome P450 - Arabidopsis thaliana
  misc_feature (1)..(576): Homolog of NCBI NO: 30683137 NR Description: cytochrome p450, putative [Arabidopsis thaliana]
  misc_feature (1)..(576): Homolog of NCBI NO: 7427576 NR Description: probable cytochrome P450 - Arabidopsis thaliana
  misc_feature (1)..(576): Homolog of NCBI NO: 30683137 NR Description: cytochrome p450, putative [Arabidopsis thaliana]

SEQ ID NO: 47166 - protein, 497 aa, Arabidopsis thaliana; identical to SEQ ID NO: 44983
  peptide (1)..(497): Ceres Seq. ID no. 12559861
  misc_feature (1)..(497): Homolog of NCBI NO: 7427576 NR Description: probable cytochrome P450 - Arabidopsis thaliana
  misc_feature (1)..(497): Homolog of NCBI NO: 30683137 NR Description: cytochrome p450, putative [Arabidopsis thaliana]
  misc_feature (1)..(497): Homolog of NCBI NO: 7427576 NR Description: probable cytochrome P450 - Arabidopsis thaliana
  misc_feature (1)..(497): Homolog of NCBI NO: 30683137 NR Description: cytochrome p450, putative [Arabidopsis thaliana]

SEQ ID NO: 47167 - DNA, 1163 bp, Arabidopsis thaliana
  misc_feature (1)..(1163): Ceres Seq. ID no. 13647718
  misc_feature: MA Experiment ID: 20000179 Result: Up-regulated in Transcription
  misc_feature: MA Experiment 20000179 PARAMETER Experiment Name: At_Germinating_Seeds_P Parameter: Age (hr) Value: 6 vs. 0
  misc_feature: MA Experiment 20000179 PARAMETER Experiment Name: At_Germinating_Seeds_P Parameter: Tissue Value: Germinating Seeds
  misc_feature: MA Experiment ID: 20000184 Result: Down-regulated in Transcription
  misc_feature: MA Experiment 20000184 PARAMETER Experiment Name: At_Shoots__P Parameter: Age (day) Value: 7
  misc_feature: MA Experiment 20000184 PARAMETER Experiment Name: At_Shoots__P Parameter: Tissue Value: Shoots vs. Whole Plant
  misc_feature: MA Experiment ID: 20000185 Result: Down-regulated in Transcription
  misc_feature: MA Experiment 20000185 PARAMETER Experiment Name: At_Roots__P Parameter: Age (day) Value: 7 vs. 21
  misc_feature: MA Experiment 20000185 PARAMETER Experiment Name: At_Roots__P Parameter: Organism Value: A. thaliana
  misc_feature: MA Experiment 20000185 PARAMETER Experiment Name: At_Roots__P Parameter: Tissue Value: Roots vs. Whole Plant
  misc_feature: MA Experiment ID: 20000213 Result: Up-regulated in Transcription
  misc_feature: MA Experiment 20000213 PARAMETER Experiment Name: At_4deg_Cold_P Parameter: Timepoint (hr) Value: 2
  misc_feature: MA Experiment ID: 20000234 Result: Down-regulated in Transcription
  misc_feature: MA Experiment 20000234 PARAMETER Experiment Name: At_Siliques_P Parameter: Age (day) Value: 21
  misc_feature: MA Experiment 20000234 PARAMETER Experiment Name: At_Siliques_P Parameter: Organism Value: A. thaliana
  misc_feature: MA Experiment 20000234 PARAMETER Experiment Name: At_Siliques_P Parameter: Plant Line Value: WS
  misc_feature: MA Experiment 20000234 PARAMETER Experiment Name: At_Siliques_P Parameter: Tissue Value: Less Than 5mm Siliques vs. Whole Plant
  misc_feature: MA Experiment ID: 20000235 Result: Down-regulated in Transcription
  misc_feature: MA Experiment 20000235 PARAMETER Experiment Name: At_Siliques_P Parameter: Age (day) Value: 21
  misc_feature: MA Experiment 20000235 PARAMETER Experiment Name: At_Siliques_P Parameter: Organism Value: A. thaliana
  misc_feature: MA Experiment 20000235 PARAMETER Experiment Name: At_Siliques_P Parameter: Plant Line Value: WS
  misc_feature: MA Experiment 20000235 PARAMETER Experiment Name: At_Siliques_P Parameter: Tissue Value: 5-10mm Siliques vs. Whole Plant
  misc_feature: MA Experiment ID: 20000264 Result: Down-regulated in Transcription
  misc_feature: MA Experiment 20000264 PARAMETER Experiment Name: At_Open_Flower_P Parameter: Age (day) Value: 21
  misc_feature: MA Experiment 20000264 PARAMETER Experiment Name: At_Open_Flower_P Parameter: Plant Line Value: WS
  misc_feature: MA Experiment 20000264 PARAMETER Experiment Name: At_Open_Flower_P Parameter: Tissue Value: Open Flower vs. Whole Plant
  misc_feature: MA Experiment ID: 20000265 Result: Down-regulated in Transcription
  misc_feature: MA Experiment 20000265 PARAMETER Experiment Name: At_Open_Flower_P Parameter: Age (day) Value: 21
  misc_feature: MA Experiment 20000265 PARAMETER Experiment Name: At_Open_Flower_P Parameter: Plant Line Value: WS
  misc_feature: MA Experiment 20000265 PARAMETER Experiment Name: At_Open_Flower_P Parameter: Tissue Value: Closed Flower vs. Whole Plant
  misc_feature: MA Experiment ID: 20000268 Result: Down-regulated in Transcription
  misc_feature: MA Experiment 20000268 PARAMETER Experiment Name: At_100mM_NaCl__P Parameter: Age (day) Value: 14
  misc_feature: MA Experiment 20000268 PARAMETER Experiment Name: At_100mM_NaCl__P Parameter: Organism Value: A. thaliana
  misc_feature: MA Experiment 20000268 PARAMETER Experiment Name: At_100mM_NaCl__P Parameter: Plant Line Value: WS
  misc_feature: MA Experiment 20000268 PARAMETER Experiment Name: At_100mM_NaCl__P Parameter: Timepoint (hr) Value: 6
  misc_feature: MA Experiment 20000268 PARAMETER Experiment Name: At_100mM_NaCl__P Parameter: Tissue Value: Whole Plant
  misc_feature: MA Experiment 20000268 PARAMETER Experiment Name: At_100mM_NaCl__P Parameter: Treatment Value: 100mM NaCl vs. No Treatment
  misc_feature: MA Experiment ID: 20000286 Result: Down-regulated in Transcription
  misc_feature: MA Experiment 20000286 PARAMETER Experiment Name: At_Open_Flower_P Parameter: Age (day) Value: 21
  misc_feature: MA Experiment 20000286 PARAMETER Experiment Name: At_Open_Flower_P Parameter: Plant Line Value: WS
  misc_feature: MA Experiment 20000286 PARAMETER Experiment Name: At_Open_Flower_P Parameter: Tissue Value: Half Open vs. Whole Plant
  misc_feature: MA Experiment ID: 20000437 Result: Up-regulated in Transcription
  misc_feature: MA Experiment 20000437 PARAMETER Experiment Name: At_Drought_P Parameter: Age (day) Value: 8
  misc_feature: MA Experiment 20000437 PARAMETER Experiment Name: At_Drought_P Parameter: Organism Value: A. thaliana
  misc_feature: MA Experiment 20000437 PARAMETER Experiment Name: At_Drought_P Parameter: Plant Line Value: WS
  misc_feature: MA Experiment 20000437 PARAMETER Experiment Name: At_Drought_P Parameter: Timepoint (hr) Value: 24
  misc_feature: MA Experiment 20000437 PARAMETER Experiment Name: At_Drought_P Parameter: Tissue Value: Whole Plant
  misc_feature: MA Experiment 20000437 PARAMETER Experiment Name: At_Drought_P Parameter: Treatment Value: Drought vs. No Drought
  misc_feature: MA Experiment ID: 20000438 Result: Down-regulated in Transcription
  misc_feature: MA Experiment 20000438 PARAMETER Experiment Name: At_Shoots__P Parameter: Age (day) Value: 14
  misc_feature: MA Experiment 20000438 PARAMETER Experiment Name: At_Shoots__P Parameter: Tissue Value: Shoots vs. Whole Plant
  misc_feature: MA Experiment ID: 20000439 Result: Down-regulated in Transcription
  misc_feature: MA Experiment 20000439 PARAMETER Experiment Name: At_Roots__P Parameter: Age (day) Value: 14 vs. 21
  misc_feature: MA Experiment 20000439 PARAMETER Experiment Name: At_Roots__P Parameter: Organism Value: A. thaliana
  misc_feature: MA Experiment 20000439 PARAMETER Experiment Name: At_Roots__P Parameter: Tissue Value: Roots vs. Whole Plant
  misc_feature: MA Experiment ID: 20000451 Result: Down-regulated in Transcription
  misc_feature: MA Experiment 20000451 PARAMETER Experiment Name: At_CS6879_Shoots-Roots_P Parameter: Age (day) Value: 14
  misc_feature: MA Experiment 20000451 PARAMETER Experiment Name: At_CS6879_Shoots-Roots_P Parameter: Organism Value: A. thaliana
  misc_feature: MA Experiment 20000451 PARAMETER Experiment Name: At_CS6879_Shoots-Roots_P Parameter: Plant Line Value: CS6879 vs. WS
  misc_feature: MA Experiment 20000451 PARAMETER Experiment Name: At_CS6879_Shoots-Roots_P Parameter: Tissue Value: Roots
  misc_feature: MA Experiment ID: 20000452 Result: Down-regulated in Transcription
  misc_feature: MA Experiment 20000452 PARAMETER Experiment Name: At_CS6879_Shoots-Roots_P Parameter: Age (day) Value: 14
  misc_feature: MA Experiment 20000452 PARAMETER Experiment Name: At_CS6879_Shoots-Roots_P Parameter: Organism Value: A. thaliana
  misc_feature: MA Experiment 20000452 PARAMETER Experiment Name: At_CS6879_Shoots-Roots_P Parameter: Plant Line Value: CS6879 vs. WS
  misc_feature: MA Experiment 20000452 PARAMETER Experiment Name: At_CS6879_Shoots-Roots_P Parameter: Tissue Value: Shoots
  misc_feature: MA Experiment ID: 20000606 Result: Up-regulated in Transcription
  misc_feature: MA Experiment 20000606 PARAMETER Experiment Name: At_CS8548_Mutant_P Parameter: Age (day) Value: 14
  misc_feature: MA Experiment 20000606 PARAMETER Experiment Name: At_CS8548_Mutant_P Parameter: Plant Line Value: CS8548 vs. wt
  misc_feature: MA Experiment 20000606 PARAMETER Experiment Name: At_CS8548_Mutant_P Parameter: Tissue Value: Whole Plant
  misc_feature: MA Experiment ID: 20001557 Result: Up-regulated in Transcription
  misc_feature: MA Experiment 20001557 PARAMETER Experiment Name: At_Drought_Soil_Dry_P Parameter: Age (day) Value: 27
  misc_feature: MA Experiment 20001557 PARAMETER Experiment Name: At_Drought_Soil_Dry_P Parameter: Organism Value: A. thaliana
  misc_feature: MA Experiment 20001557 PARAMETER Experiment Name: At_Drought_Soil_Dry_P Parameter: Plant Line Value: WS
  misc_feature: MA Experiment 20001557 PARAMETER Experiment Name: At_Drought_Soil_Dry_P Parameter: Post Timepoint (hr) Value: 3
  misc_feature: MA Experiment 20001557 PARAMETER Experiment Name: At_Drought_Soil_Dry_P Parameter: Post-Treatment Value: Re-Water vs. No Drought
  misc_feature: MA Experiment 20001557 PARAMETER Experiment Name: At_Drought_Soil_Dry_P Parameter: Timepoint (day) Value: 13
  misc_feature: MA Experiment 20001557 PARAMETER Experiment Name: At_Drought_Soil_Dry_P Parameter: Treatment Value: Drought vs. No Drought
  misc_feature: MA Experiment ID: 20001910 Result: Down-regulated in Transcription
  misc_feature: MA Experiment 20001910 PARAMETER Experiment Name: At_Drought_Reproduction_P Parameter: Age (day) Value: 37
  misc_feature: MA Experiment 20001910 PARAMETER Experiment Name: At_Drought_Reproduction_P Parameter: Organism Value: A. thaliana
  misc_feature: MA Experiment 20001910 PARAMETER Experiment Name: At_Drought_Reproduction_P Parameter: Plant Line Value: WS
  misc_feature: MA Experiment 20001910 PARAMETER Experiment Name: At_Drought_Reproduction_P Parameter: Timepoint (day) Value: 7
  misc_feature: MA Experiment 20001910 PARAMETER Experiment Name: At_Drought_Reproduction_P Parameter: Tissue Value: Flowers
  misc_feature: MA Experiment 20001910 PARAMETER Experiment Name: At_Drought_Reproduction_P Parameter: Treatment Value: Drought vs. No Drought
gaccgtacacacatccccatacgaacactcacaatcgttaaaaagaagagaagagaagagagagaaagcttaaatcggaaaaaatggtttcgtggatgatgacaaccaaggcggtgctaatctcaagcggcgtcgccaccgtggctctgttactgaaactctctgttccggtagctgttgatttctccgtgtcacgagctccgatcttgtggagctccttgttgtcatggctgaaaccaccgtatctttacgttgttaccaacggaattatcatcactatcgttgcttcttctaagtattaccgaagtcaccatgaccgtgatgaagaagatgagatcgtcgtgtacggtggtggaggttataagatccagacggaggagccgattgtgaatcaacatcaagcttctccgaggattctggaggttaaggatttggatactggtgcgcattttggtttcgttgtggcgaatctggaggctgaggaactggaatcagaggcggttacggcggttgtgtttgacgatgaggaggaggagaagaagattatagatagcgcggcgacggcggaggatgaaattgaagaggagcttaagagtgtgattatggttgagaattcagatctggttgaatccgatgtcataccgccgccgatgatgatcgaatcggagaatcttcctccgattgagaagcctctcgttacttcaaggttcggtcaccggaaattgatgaaagcaagtcaagaaggtggaagagctttgagagtgacgaagccgaagaagaacgagacgttggagaatacgtggaagatgataacggaagggaaatcaacgccgttgactagacagttataccggagatctgacacgtttggacgtggagattccgggggagttgacggtgaggtgaaaccggtttataagaagtcggatacgtttagggacaggactaattattatcagttggcggagacggcgaaggtgaggaaagagccgtcgctgagtcaggaagagttgaatcggcgagttgaggcgtttataaagaagtttaatgaggagatgaagttgcagagaatggagtctctcagacagtacaaagagataactagccgtggggtttagttaactgtttttattttctggttaaaatttttttattggcttttt

SEQ ID NO: 47168 - protein, 344 aa, Arabidopsis thaliana
  peptide (1)..(344): Ceres Seq. ID no. 15219468
  misc_feature (9)..(338): Pfam Name: Cotton fibre expressed protein Pfam Description: Cotton fibre expressed protein
  misc_feature (137)..(250): Homolog of NCBI NO: 7484718 NR Description: fiber protein 3 [imported] - upland cotton
  misc_feature (9)..(339): Homolog of NCBI NO: 25373437 NR Description: hypothetical protein [imported] - Arabidopsis
  misc_feature (193)..(344): Homolog of NCBI NO: 21593266 NR Description: unknown [Arabidopsis thaliana]
  misc_feature (193)..(344): Homolog of NCBI NO: 18391249 NR Description: expressed protein [Arabidopsis thaliana]
  misc_feature (1)..(183): Homolog of NCBI NO: 21593266 NR Description: unknown [Arabidopsis thaliana]
  misc_feature (1)..(183): Homolog of NCBI NO: 18391249 NR Description: expressed protein [Arabidopsis thaliana]
  misc_feature (193)..(339): Homolog of NCBI NO: 15220323 NR Description: hypothetical protein [Arabidopsis thaliana]
  misc_feature (9)..(176): Homolog of NCBI NO: 15220323 NR Description: hypothetical protein [Arabidopsis thaliana]
  misc_feature (6)..(344): Homolog of NCBI NO: 25373438 NR Description: hypothetical protein F11P17.2 [imported] -
  misc_feature (1)..(344): Homolog of NCBI NO: 30696552 NR Description: cotton fiber expressed protein -related
MVSWMMTTKAVLISSGVATVALLLKLSVPVAVDFSVSRAPILWSSLLSWLKPPYLYVVTNGIIITIVASSKYYRSHHDRDEEDEIVVYGGGGYKIQTEEPIVNQHQASPRILEVKDLDTGAHFGFVVANLEAEELESEAVTAVVFDDEEEEKKIIDSAATAEDEIEEELKSVIMVENSDLVESDVIPPPMMIESENLPPIEKPLVTSRFGHRKLMKASQEGGRALRVTKPKKNETLENTWKMITEGKSTPLTRQLYRRSDTFGRGDSGGVDGEVKPVYKKSDTFRDRTNYYQLAETAKVRKEPSLSQEELNRRVEAFIKKFNEEMKLQRMESLRQYKEITSRGV

SEQ ID NO: 47169 - protein, 340 aa, Arabidopsis thaliana
  peptide (1)..(340): Ceres Seq. ID no. 15219469
  misc_feature (5)..(334): Pfam Name: Cotton fibre expressed protein Pfam Description: Cotton fibre expressed protein
  misc_feature (133)..(246): Homolog of NCBI NO: 7484718 NR Description: fiber protein 3 [imported] - upland cotton
  misc_feature (5)..(335): Homolog of NCBI NO: 25373437 NR Description: hypothetical protein [imported] - Arabidopsis
  misc_feature (189)..(340): Homolog of NCBI NO: 21593266 NR Description: unknown [Arabidopsis thaliana]
  misc_feature (189)..(340): Homolog of NCBI NO: 18391249 NR Description: expressed protein [Arabidopsis thaliana]
  misc_feature (1)..(179): Homolog of NCBI NO: 21593266 NR Description: unknown [Arabidopsis thaliana]
  misc_feature (1)..(179): Homolog of NCBI NO: 18391249 NR Description: expressed protein [Arabidopsis thaliana]
  misc_feature (189)..(335): Homolog of NCBI NO: 15220323 NR Description: hypothetical protein [Arabidopsis thaliana]
  misc_feature (5)..(172): Homolog of NCBI NO: 15220323 NR Description: hypothetical protein [Arabidopsis thaliana]
  misc_feature (2)..(340): Homolog of NCBI NO: 25373438 NR Description: hypothetical protein F11P17.2 [imported] -
  misc_feature (1)..(340): Homolog of NCBI NO: 30696552 NR Description: cotton fiber expressed protein -related
MMTTKAVLISSGVATVALLLKLSVPVAVDFSVSRAPILWSSLLSWLKPPYLYVVTNGIIITIVASSKYYRSHHDRDEEDEIVVYGGGGYKIQTEEPIVNQHQASPRILEVKDLDTGAHFGFVVANLEAEELESEAVTAVVFDDEEEEKKIIDSAATAEDEIEEELKSVIMVENSDLVESDVIPPPMMIESENLPPIEKPLVTSRFGHRKLMKASQEGGRALRVTKPKKNETLENTWKMITEGKSTPLTRQLYRRSDTFGRGDSGGVDGEVKPVYKKSDTFRDRTNYYQLAETAKVRKEPSLSQEELNRRVEAFIKKFNEEMKLQRMESLRQYKEITSRGV

SEQ ID NO: 47170 - protein, 339 aa, Arabidopsis thaliana
  peptide (1)..(339): Ceres Seq. ID no. 15219470
  misc_feature (4)..(333): Pfam Name: Cotton fibre expressed protein Pfam Description: Cotton fibre expressed protein
  misc_feature (132)..(245): Homolog of NCBI NO: 7484718 NR Description: fiber protein 3 [imported] - upland cotton
  misc_feature (4)..(334): Homolog of NCBI NO: 25373437 NR Description: hypothetical protein [imported] - Arabidopsis
  misc_feature (188)..(339): Homolog of NCBI NO: 21593266 NR Description: unknown [Arabidopsis thaliana]
  misc_feature (188)..(339): Homolog of NCBI NO: 18391249 NR Description: expressed protein [Arabidopsis thaliana]
  misc_feature (1)..(178): Homolog of NCBI NO: 21593266 NR Description: unknown [Arabidopsis thaliana]
  misc_feature (1)..(178): Homolog of NCBI NO: 18391249 NR Description: expressed protein [Arabidopsis thaliana]
  misc_feature (188)..(334): Homolog of NCBI NO: 15220323 NR Description: hypothetical protein [Arabidopsis thaliana]
  misc_feature (4)..(171): Homolog of NCBI NO: 15220323 NR Description: hypothetical protein [Arabidopsis thaliana]
  misc_feature (1)..(339): Homolog of NCBI NO: 25373438 NR Description: hypothetical protein F11P17.2 [imported] -
  misc_feature (1)..(339): Homolog of NCBI NO: 30696552 NR Description: cotton fiber expressed protein -related
MTTKAVLISSGVATVALLLKLSVPVAVDFSVSRAPILWSSLLSWLKPPYLYVVTNGIIITIVASSKYYRSHHDRDEEDEIVVYGGGGYKIQTEEPIVNQHQASPRILEVKDLDTGAHFGFVVANLEAEELESEAVTAVVFDDEEEEKKIIDSAATAEDEIEEELKSVIMVENSDLVESDVIPPPMMIESENLPPIEKPLVTSRFGHRKLMKASQEGGRALRVTKPKKNETLENTWKMITEGKSTPLTRQLYRRSDTFGRGDSGGVDGEVKPVYKKSDTFRDRTNYYQLAETAKVRKEPSLSQEELNRRVEAFIKKFNEEMKLQRMESLRQYKEITSRGV

SEQ ID NO: 47171 - DNA, 946 bp, Arabidopsis thaliana; identical to SEQ ID NO: 35423
  misc_feature (1)..(946): Ceres Seq. ID no. 13592449
  misc_feature: MA Experiment ID: 20000180 Result: Down-regulated in Transcription
  misc_feature: MA Experiment 20000180 PARAMETER Experiment Name: At_Germinating_Seeds_P Parameter: Age (hr) Value: 24 vs. 0
  misc_feature: MA Experiment 20000180 PARAMETER Experiment Name: At_Germinating_Seeds_P Parameter: Tissue Value: Germinating Seeds
  misc_feature: MA Experiment ID: 20000184 Result: Down-regulated in Transcription
  misc_feature: MA Experiment 20000184 PARAMETER Experiment Name: At_Shoots__P Parameter: Age (day) Value: 7
  misc_feature: MA Experiment 20000184 PARAMETER Experiment Name: At_Shoots__P Parameter: Tissue Value: Shoots vs. Whole Plant
  misc_feature: MA Experiment ID: 20000234 Result: Up-regulated in Transcription
  misc_feature: MA Experiment 20000234 PARAMETER Experiment Name: At_Siliques_P Parameter: Age (day) Value: 21
  misc_feature: MA Experiment 20000234 PARAMETER Experiment Name: At_Siliques_P Parameter: Organism Value: A. thaliana
  misc_feature: MA Experiment 20000234 PARAMETER Experiment Name: At_Siliques_P Parameter: Plant Line Value: WS
  misc_feature: MA Experiment 20000234 PARAMETER Experiment Name: At_Siliques_P Parameter: Tissue Value: Less Than 5mm Siliques vs. Whole Plant
  misc_feature: MA Experiment ID: 20000265 Result: Up-regulated in Transcription
  misc_feature: MA Experiment 20000265 PARAMETER Experiment Name: At_Open_Flower_P Parameter: Age (day) Value: 21
  misc_feature: MA Experiment 20000265 PARAMETER Experiment Name: At_Open_Flower_P Parameter: Plant Line Value: WS
  misc_feature: MA Experiment 20000265 PARAMETER Experiment Name: At_Open_Flower_P Parameter: Tissue Value: Closed Flower vs. Whole Plant
  misc_feature: MA Experiment ID: 20000437 Result: Up-regulated in Transcription
  misc_feature: MA Experiment 20000437 PARAMETER Experiment Name: At_Drought_P Parameter: Age (day) Value: 8
  misc_feature: MA Experiment 20000437 PARAMETER Experiment Name: At_Drought_P Parameter: Organism Value: A. thaliana
  misc_feature: MA Experiment 20000437 PARAMETER Experiment Name: At_Drought_P Parameter: Plant Line Value: WS
  misc_feature: MA Experiment 20000437 PARAMETER Experiment Name: At_Drought_P Parameter: Timepoint (hr) Value: 24
  misc_feature: MA Experiment 20000437 PARAMETER Experiment Name: At_Drought_P Parameter: Tissue Value: Whole Plant
  misc_feature: MA Experiment 20000437 PARAMETER Experiment Name: At_Drought_P Parameter: Treatment Value: Drought vs. No Drought
  misc_feature: MA Experiment ID: 20000495 Result: Up-regulated in Transcription
  misc_feature: MA Experiment 20000495 PARAMETER Experiment Name: At_Guard_Cells_P Parameter: Harvest Date Value: 8/2/2002
  misc_feature: MA Experiment 20000495 PARAMETER Experiment Name: At_Guard_Cells_P Parameter: Organism Value: A. thaliana
  misc_feature: MA Experiment 20000495 PARAMETER Experiment Name: At_Guard_Cells_P Parameter: Tissue Value: Guard Cells vs. Leaves
  misc_feature: MA Experiment ID: 20001451 Result: Down-regulated in Transcription
  misc_feature: MA Experiment 20001451 PARAMETER Experiment Name: At_Far-red-induction_P Parameter: Age (day) Value: 7
  misc_feature: MA Experiment 20001451 PARAMETER Experiment Name: At_Far-red-induction_P Parameter: Light Value: Far-red vs. White
  misc_feature: MA Experiment 20001451 PARAMETER Experiment Name: At_Far-red-induction_P Parameter: Organism Value: A. thaliana
  misc_feature: MA Experiment 20001451 PARAMETER Experiment Name: At_Far-red-induction_P Parameter: Plant Line Value: Columbia
  misc_feature: MA Experiment 20001451 PARAMETER Experiment Name: At_Far-red-induction_P Parameter: Timepoint (hr) Value: 24
  misc_feature: MA Experiment 20001451 PARAMETER Experiment Name: At_Far-red-induction_P Parameter: Tissue Value: Whole Plant

SEQ ID NO: 47172 - protein, 209 aa, Arabidopsis thaliana; identical to SEQ ID NO: 35424
  peptide (1)..(209): Ceres Seq. ID no. 13592450
  misc_feature (11)..(168): Homolog of NCBI NO: 21554630 NR Description: unknown [Arabidopsis thaliana]
  misc_feature (11)..(167): Homolog of NCBI NO: 18391509 NR Description: expressed protein [Arabidopsis thaliana]
  misc_feature (5)..(184): Homolog of NCBI NO: 38016521 NR Description: fiber protein Fb34 [Gossypium barbadense]
  misc_feature (8)..(184): Homolog of NCBI NO: 34394069 NR Description: unknown protein [Oryza sativa (japonica
  misc_feature (6)..(183): Homolog of NCBI NO: 38344206 NR Description: OSJNBa0064G10.22 [Oryza sativa (japonica
  misc_feature (1)..(32): Homolog of NCBI NO: 24413945 NR Description: contains ESTs
  misc_feature (79)..(208): Homolog of NCBI NO: 24413945 NR Description: contains ESTs
  misc_feature (1)..(208): Homolog of NCBI NO: 34897938 NR Description: ESTs AU082454(S3638),D41267(S3638) correspond to region of the predicted gene.~Similar to Arabidopsis thaliana DNA
  misc_feature (31)..(209): Homolog of NCBI NO: 10177066 NR Description: dbj|BAA92731.1~gene_id:MKP11.6~similar to unknown
  misc_feature (1)..(209): Homolog of NCBI NO: 18418215 NR Description: expressed protein [Arabidopsis thaliana]
  misc_feature (11)..(168): Homolog of NCBI NO: 21554630 NR Description: unknown [Arabidopsis thaliana]
  misc_feature (11)..(167): Homolog of NCBI NO: 18391509 NR Description: expressed protein [Arabidopsis thaliana]
  misc_feature (5)..(184): Homolog of NCBI NO: 38016521 NR Description: fiber protein Fb34 [Gossypium barbadense]
  misc_feature (8)..(184): Homolog of NCBI NO: 34394069 NR Description: unknown protein [Oryza sativa (japonica
  misc_feature (6)..(183): Homolog of NCBI NO: 38344206 NR Description: OSJNBa0064G10.22 [Oryza sativa (japonica
  misc_feature (1)..(32): Homolog of NCBI NO: 24413945 NR Description: contains ESTs
  misc_feature (79)..(208): Homolog of NCBI NO: 24413945 NR Description: contains ESTs
  misc_feature (1)..(208): Homolog of NCBI NO: 34897938 NR Description: ESTs AU082454(S3638),D41267(S3638) correspond to region of the predicted gene.~Similar to Arabidopsis thaliana DNA
  misc_feature (31)..(209): Homolog of NCBI NO: 10177066 NR Description: dbj|BAA92731.1~gene_id:MKP11.6~similar to unknown
  misc_feature (1)..(209): Homolog of NCBI NO: 18418215 NR Description: expressed protein [Arabidopsis thaliana]

SEQ ID NO: 47173 - protein, 202 aa, Arabidopsis thaliana; identical to SEQ ID NO: 35425
  peptide (1)..(202): Ceres Seq. ID no. 13592451
  misc_feature (4)..(161): Homolog of NCBI NO: 21554630 NR Description: unknown [Arabidopsis thaliana]
  misc_feature (4)..(160): Homolog of NCBI NO: 18391509 NR Description: expressed protein [Arabidopsis thaliana]
  misc_feature (1)..(177): Homolog of NCBI NO: 38016521 NR Description: fiber protein Fb34 [Gossypium barbadense]
  misc_feature (1)..(177): Homolog of NCBI NO: 34394069 NR Description: unknown protein [Oryza sativa (japonica
  misc_feature (1)..(176): Homolog of NCBI NO: 38344206 NR Description: OSJNBa0064G10.22 [Oryza sativa (japonica
  misc_feature (1)..(25): Homolog of NCBI NO: 24413945 NR Description: contains ESTs
  misc_feature (72)..(201): Homolog of NCBI NO: 24413945 NR Description: contains ESTs
  misc_feature (1)..(201): Homolog of NCBI NO: 34897938 NR Description: ESTs AU082454(S3638),D41267(S3638) correspond to region of the predicted gene.~Similar to Arabidopsis thaliana DNA
  misc_feature (24)..(202): Homolog of NCBI NO: 10177066 NR Description: dbj|BAA92731.1~gene_id:MKP11.6~similar to unknown
  misc_feature (1)..(202): Homolog of NCBI NO: 18418215 NR Description: expressed protein [Arabidopsis thaliana]
  misc_feature (4)..(161): Homolog of NCBI NO: 21554630 NR Description: unknown [Arabidopsis thaliana]
  misc_feature (4)..(160): Homolog of NCBI NO: 18391509 NR Description: expressed protein [Arabidopsis thaliana]
  misc_feature (1)..(177): Homolog of NCBI NO: 38016521 NR Description: fiber protein Fb34 [Gossypium barbadense]
  misc_feature (1)..(177): Homolog of NCBI NO: 34394069 NR Description: unknown protein [Oryza sativa (japonica
  misc_feature (1)..(176): Homolog of NCBI NO: 38344206 NR Description: OSJNBa0064G10.22 [Oryza sativa (japonica
  misc_feature (1)..(25): Homolog of NCBI NO: 24413945 NR Description: contains ESTs
  misc_feature (72)..(201): Homolog of NCBI NO: 24413945 NR Description: contains ESTs
  misc_feature (1)..(201): Homolog of NCBI NO: 34897938 NR Description: ESTs AU082454(S3638),D41267(S3638) correspond to region of the predicted gene.~Similar to Arabidopsis thaliana DNA
  misc_feature (24)..(202): Homolog of NCBI NO: 10177066 NR Description: dbj|BAA92731.1~gene_id:MKP11.6~similar to unknown
  misc_feature (1)..(202): Homolog of NCBI NO: 18418215 NR Description: expressed protein [Arabidopsis thaliana]

SEQ ID NO: 47174 - protein, 144 aa, Arabidopsis thaliana; identical to SEQ ID NO: 35426
  peptide (1)..(144): Ceres Seq. ID no. 13592452
  misc_feature (1)..(103): Homolog of NCBI NO: 18407003 NR Description: expressed protein [Arabidopsis thaliana]
  misc_feature (1)..(103): Homolog of NCBI NO: 21554630 NR Description: unknown [Arabidopsis thaliana]
  misc_feature (1)..(102): Homolog of NCBI NO: 18391509 NR Description: expressed protein [Arabidopsis thaliana]
  misc_feature (1)..(119): Homolog of NCBI NO: 38016521 NR Description: fiber protein Fb34 [Gossypium barbadense]
  misc_feature (1)..(119): Homolog of NCBI NO: 34394069 NR Description: unknown protein [Oryza sativa (japonica
  misc_feature (1)..(118): Homolog of NCBI NO: 38344206 NR Description: OSJNBa0064G10.22 [Oryza sativa (japonica
  misc_feature (14)..(143): Homolog of NCBI NO: 24413945 NR Description: contains ESTs
  misc_feature (1)..(143): Homolog of NCBI NO: 34897938 NR Description: ESTs AU082454(S3638),D41267(S3638) correspond to region of the predicted gene.~Similar to Arabidopsis thaliana DNA
  misc_feature (1)..(144): Homolog of NCBI NO: 10177066 NR Description: dbj|BAA92731.1~gene_id:MKP11.6~similar to unknown
  misc_feature (1)..(144): Homolog of NCBI NO: 18418215 NR Description: expressed protein [Arabidopsis thaliana]
  misc_feature (1)..(103): Homolog of NCBI NO: 18407003 NR Description: expressed protein [Arabidopsis thaliana]
  misc_feature (1)..(103): Homolog of NCBI NO: 21554630 NR Description: unknown [Arabidopsis thaliana]
  misc_feature (1)..(102): Homolog of NCBI NO: 18391509 NR Description: expressed protein [Arabidopsis thaliana]
  misc_feature (1)..(119): Homolog of NCBI NO: 38016521 NR Description: fiber protein Fb34 [Gossypium barbadense]
  misc_feature (1)..(119): Homolog of NCBI NO: 34394069 NR Description: unknown protein [Oryza sativa (japonica
  misc_feature (1)..(118): Homolog of NCBI NO: 38344206 NR Description: OSJNBa0064G10.22 [Oryza sativa (japonica
  misc_feature (14)..(143): Homolog of NCBI NO: 24413945 NR Description: contains ESTs
  misc_feature (1)..(143): Homolog of NCBI NO: 34897938 NR Description: ESTs AU082454(S3638),D41267(S3638) correspond to region of the predicted gene.~Similar to Arabidopsis thaliana DNA
  misc_feature (1)..(144): Homolog of NCBI NO: 10177066 NR Description: dbj|BAA92731.1~gene_id:MKP11.6~similar to unknown
  misc_feature (1)..(144): Homolog of NCBI NO: 18418215 NR Description: expressed protein [Arabidopsis thaliana]

SEQ ID NO: 47175 - DNA, 1754 bp, Arabidopsis thaliana
  misc_feature (1)..(1754): Ceres Seq. ID no. 13592461
  misc_feature: MA Experiment ID: 20000180 Result: Up-regulated in Transcription
  misc_feature: MA Experiment 20000180 PARAMETER Experiment Name: At_Germinating_Seeds_P Parameter: Age (hr) Value: 24 vs. 0
  misc_feature: MA Experiment 20000180 PARAMETER Experiment Name: At_Germinating_Seeds_P Parameter: Tissue Value: Germinating Seeds
  misc_feature: MA Experiment ID: 20000437 Result: Down-regulated in Transcription
  misc_feature: MA Experiment 20000437 PARAMETER Experiment Name: At_Drought_P Parameter: Age (day) Value: 8
  misc_feature: MA Experiment 20000437 PARAMETER Experiment Name: At_Drought_P Parameter: Organism Value: A. thaliana
  misc_feature: MA Experiment 20000437 PARAMETER Experiment Name: At_Drought_P Parameter: Plant Line Value: WS
  misc_feature: MA Experiment 20000437 PARAMETER Experiment Name: At_Drought_P Parameter: Timepoint (hr) Value: 24
  misc_feature: MA Experiment 20000437 PARAMETER Experiment Name: At_Drought_P Parameter: Tissue Value: Whole Plant
  misc_feature: MA Experiment 20000437 PARAMETER Experiment Name: At_Drought_P Parameter: Treatment Value: Drought vs. No Drought
  misc_feature: MA Experiment ID: 20001450 Result: Down-regulated in Transcription
  misc_feature: MA Experiment 20001450 PARAMETER Experiment Name: At_Far-red-induction_P Parameter: Age (day) Value: 7
  misc_feature: MA Experiment 20001450 PARAMETER Experiment Name: At_Far-red-induction_P Parameter: Light Value: Far-red vs. White
  misc_feature: MA Experiment 20001450 PARAMETER Experiment Name: At_Far-red-induction_P Parameter: Organism Value: A. thaliana
  misc_feature: MA Experiment 20001450 PARAMETER Experiment Name: At_Far-red-induction_P Parameter: Plant Line Value: Columbia
  misc_feature: MA Experiment 20001450 PARAMETER Experiment Name: At_Far-red-induction_P Parameter: Timepoint (hr) Value: 8
  misc_feature: MA Experiment 20001450 PARAMETER Experiment Name: At_Far-red-induction_P Parameter: Tissue Value: Whole Plant
  misc_feature: MA Experiment ID: 20001555 Result: Down-regulated in Transcription
  misc_feature: MA Experiment 20001555 PARAMETER Experiment Name: At_Drought_Soil_Dry_P Parameter: Age (day) Value: 24
  misc_feature: MA Experiment 20001555 PARAMETER Experiment Name: At_Drought_Soil_Dry_P Parameter: Organism Value: A. thaliana
  misc_feature: MA Experiment 20001555 PARAMETER Experiment Name: At_Drought_Soil_Dry_P Parameter: Plant Line Value: WS
  misc_feature: MA Experiment 20001555 PARAMETER Experiment Name: At_Drought_Soil_Dry_P Parameter: Post Timepoint (hr) Value: None
  misc_feature: MA Experiment 20001555 PARAMETER Experiment Name: At_Drought_Soil_Dry_P Parameter: Post-Treatment Value: None
  misc_feature: MA Experiment 20001555 PARAMETER Experiment Name: At_Drought_Soil_Dry_P Parameter: Timepoint (day) Value: 10
  misc_feature: MA Experiment 20001555 PARAMETER Experiment Name: At_Drought_Soil_Dry_P Parameter: Treatment Value: Drought vs. No Drought
  misc_feature: MA Experiment ID: 20001904 Result: Down-regulated in Transcription
  misc_feature: MA Experiment 20001904 PARAMETER Experiment Name: At_Drought_Reproduction_P Parameter: Age (day) Value: 37
  misc_feature: MA Experiment 20001904 PARAMETER Experiment Name: At_Drought_Reproduction_P Parameter: Organism Value: A. thaliana
  misc_feature: MA Experiment 20001904 PARAMETER Experiment Name: At_Drought_Reproduction_P Parameter: Plant Line Value: WS
  misc_feature: MA Experiment 20001904 PARAMETER Experiment Name: At_Drought_Reproduction_P Parameter: Timepoint (day) Value: 7
  misc_feature: MA Experiment 20001904 PARAMETER Experiment Name: At_Drought_Reproduction_P Parameter: Tissue Value: Rosettes
  misc_feature: MA Experiment 20001904 PARAMETER Experiment Name: At_Drought_Reproduction_P Parameter: Treatment Value: Drought vs. No Drought
  misc_feature: MA Experiment ID: 20001906 Result: Down-regulated in Transcription
  misc_feature: MA Experiment 20001906 PARAMETER Experiment Name: At_Drought_Reproduction_P Parameter: Age (day) Value: 35
  misc_feature: MA Experiment 20001906 PARAMETER Experiment Name: At_Drought_Reproduction_P Parameter: Organism Value: A. thaliana
  misc_feature: MA Experiment 20001906 PARAMETER Experiment Name: At_Drought_Reproduction_P Parameter: Plant Line Value: WS
  misc_feature: MA Experiment 20001906 PARAMETER Experiment Name: At_Drought_Reproduction_P Parameter: Timepoint (day) Value: 5
  misc_feature: MA Experiment 20001906 PARAMETER Experiment Name: At_Drought_Reproduction_P Parameter: Tissue Value: Siliques
  misc_feature: MA Experiment 20001906 PARAMETER Experiment Name: At_Drought_Reproduction_P Parameter: Treatment Value: Drought vs. No Drought
gatgatctttgtgaatgtgggcaacgattgtaagcagagggaaggcgaagaattatgataacctctcatcaacgataagacaaaatccataaactagtaatatcatccaatcctctcacttcttccttattccctcactttcactctcactatctgttgacttcacatggcttccaccgccgcaactgcagctctttcgatcatcaaatccaccggtggcgccgccgttacacgctcctcccgcgcctcctttggacacattccctccacatctgtctccgcacgtcgccttggcttctccgccgtcgttgactctcgtttctcggtccacgtggcgtccaaggtccactccgtgcgcggaaagggcgccaggggagtgattacgatggcgaagaagagtgttggagatctgaattctgtagatttgaaggggaagaaggtgtttgttagagctgatctcaatgtacctctcgatgacaaccagaatatcactgacgacactagaatcagagccgccattcccaccatcaagtttttgattgagaatggtgctaaggtcatcctctccactcatttgggaaggccaaagggtgtcactccaaagttcagcttggctcctcttgttcccagattatcagagctccttggtattgaggtcgtgaaagctgatgattgtattggtccagaagtggaaaccttggtggcttcccttcctgaaggtggagttttgcttcttgagaacgtgaggttttacaaggaggaagagaagaacgaacctgattttgctaagaagcttgcttctctagctgacctttatgtcaacgatgcgttcgggactgctcacagagcccatgcttcaacagagggagtcactaagttcttgaagccatcagttgctggtttccttttgcaaaaggagttggactaccttgttggtgcggtttcaaacccaaagagaccatttgctgccattgtgggaggttccaaggtctcatctaagattggagttatcgaatcgcttcttgagaaatgtgacatccttctgcttggtggtggaatgatctttacattctacaaggcgcaaggtctttccgttggctcctcccttgttgaagaagacaagcttgaattggctacaacactccttgccaaggctaaggccagaggagtctctctgttgttaccaacagatgttgtgattgctgacaagttcgctcctgatgccaacagcaagattgtgccagcatcagccattcctgatgggtggatgggattggacatcggtccagactcggtgaaaacattcaacgaagctctggataccacgcagacagtcatttggaatggaccaatgggagttttcgagtttgaaaagtttgcaaaaggaactgaggcggtagcgaataaactagcagagctaagcaaaaagggagtgacaacgataataggaggaggagactcggtggcagcagtggagaaagtgggagtagcaggagtcatgagtcacatctccacaggtggtggtgccagtttggagctcttggaaggcaaagtgcttcccggtgtcgtcgctcttgatgaagcaacgccagtcactgtttaacaacatctctttattacacctgaagggacccccctaaatgagtttcttcttcttattctgttgtaaatcaaagtctttgttgtaccatcaaatccatagagaggagggactctttttgtctcaaataaaatcaaatacagtgacattcgtt

SEQ ID NO: 47176 - protein, 478 aa, Arabidopsis thaliana
  peptide (1)..(478): Ceres Seq. ID no. 13592462
  misc_feature (75)..(474): Pfam Name: Phosphoglycerate kinase Pfam Description: Phosphoglycerate kinase
  misc_feature (75)..(474): Pfam Name: Phosphoglycerate kinase Pfam Description: Phosphoglycerate kinase
  misc_feature (52)..(462): Homolog of NCBI NO: 282833 NR Description: phosphoglycerate kinase (EC 2.7.2.3) - spinach
  misc_feature (52)..(478): Homolog of NCBI NO: 1346698 NR Description: Phosphoglycerate kinase, chloroplast precursor
  misc_feature (80)..(478): Homolog of NCBI NO: 2129669 NR Description: phosphoglycerate kinase (EC 2.7.2.3) OBP44 -
  misc_feature (1)..(472): Homolog of NCBI NO: 129915 NR Description: Phosphoglycerate kinase, chloroplast precursor
  misc_feature (1)..(478): Homolog of NCBI NO: 7434544 NR Description: phosphoglycerate kinase (EC 2.7.2.3) precursor,
  misc_feature (52)..(462): Homolog of NCBI NO: 282833 NR Description: phosphoglycerate kinase (EC 2.7.2.3) - spinach
  misc_feature (80)..(478): Homolog of NCBI NO: 2129669 NR Description: phosphoglycerate kinase (EC 2.7.2.3) OBP44 -
  misc_feature (1)..(478): Homolog of NCBI NO: 7434544 NR Description: phosphoglycerate kinase (EC 2.7.2.3) precursor,
  misc_feature (1)..(478): Homolog of NCBI NO: 15223484 NR Description: phosphoglycerate kinase -related [Arabidopsis
  misc_feature (1)..(478): Homolog of NCBI NO: 12644295 NR Description: PHOSPHOGLYCERATE KINASE, CHLOROPLAST PRECURSOR
  misc_feature (1)..(478): Homolog of NCBI NO: 15230595 NR Description: phosphoglycerate kinase -related [Arabidopsis
  misc_feature (1)..(478): Homolog of NCBI NO: 3738261 NR Description: chloroplast phosphoglycerate kinase [Populus
  misc_feature (1)..(478): Homolog of NCBI NO: 2499497 NR Description: Phosphoglycerate kinase, chloroplast precursor
  misc_feature (1)..(472): Homolog of NCBI NO: 129915 NR Description: Phosphoglycerate kinase, chloroplast precursor
  misc_feature (52)..(478): Homolog of NCBI NO: 1346698 NR Description: Phosphoglycerate kinase, chloroplast precursor
  misc_feature (1)..(478): Homolog of NCBI NO: 2499497 NR Description: Phosphoglycerate kinase, chloroplast precursor
  misc_feature (1)..(478): Homolog of NCBI NO: 3738261 NR Description: chloroplast phosphoglycerate kinase [Populus
  misc_feature (1)..(478): Homolog of NCBI NO: 15230595 NR Description: phosphoglycerate kinase -related [Arabidopsis
  misc_feature (1)..(478): Homolog of NCBI NO: 12644295 NR Description: PHOSPHOGLYCERATE KINASE, CHLOROPLAST PRECURSOR
  misc_feature (1)..(478): Homolog of NCBI NO: 15223484 NR Description: phosphoglycerate kinase -related [Arabidopsis
MASTAATAALSIIKSTGGAAVTRSSRASFGHIPSTSVSARRLGFSAVVDSRFSVHVASKVHSVRGKGARGVITMAKKSVGDLNSVDLKGKKVFVRADLNVPLDDNQNITDDTRIRAAIPTIKFLIENGAKVILSTHLGRPKGVTPKFSLAPLVPRLSELLGIEVVKADDCIGPEVETLVASLPEGGVLLLENVRFYKEEEKNEPDFAKKLASLADLYVNDAFGTAHRAHASTEGVTKFLKPSVAGFLLQKELDYLVGAVSNPKRPFAAIVGGSKVSSKIGVIESLLEKCDILLLGGGMIFTFYKAQGLSVGSSLVEEDKLELATTLLAKAKARGVSLLLPTDVVIADKFAPDANSKIVPASAIPDGWMGLDIGPDSVKTFNEALDTTQTVIWNGPMGVFEFEKFAKGTEAVANKLAELSKKGVTTIIGGGDSVAAVEKVGVAGVMSHISTGGGASLELLEGKVLPGVVALDEATPVTV

SEQ ID NO: 47177 - protein, 405 aa, Arabidopsis thaliana
  peptide (1)..(405): Ceres Seq. ID no. 13592463
  misc_feature (2)..(401): Pfam Name: Phosphoglycerate kinase Pfam Description: Phosphoglycerate kinase
  misc_feature (2)..(401): Pfam Name: Phosphoglycerate kinase Pfam Description: Phosphoglycerate kinase
  misc_feature (1)..(389): Homolog of NCBI NO: 282833 NR Description: phosphoglycerate kinase (EC 2.7.2.3) - spinach
  misc_feature (1)..(405): Homolog of NCBI NO: 1346698 NR Description: Phosphoglycerate kinase, chloroplast precursor
  misc_feature (7)..(405): Homolog of NCBI NO: 2129669 NR Description: phosphoglycerate kinase (EC 2.7.2.3) OBP44 -
  misc_feature (1)..(399): Homolog of NCBI NO: 129915 NR Description: Phosphoglycerate kinase, chloroplast precursor
  misc_feature (1)..(405): Homolog of NCBI NO: 7434544 NR Description: phosphoglycerate kinase (EC 2.7.2.3) precursor,
  misc_feature (1)..(389): Homolog of NCBI NO: 282833 NR Description: phosphoglycerate kinase (EC 2.7.2.3) - spinach
  misc_feature (7)..(405): Homolog of NCBI NO: 2129669 NR Description: phosphoglycerate kinase (EC 2.7.2.3) OBP44 -
  misc_feature (1)..(405): Homolog of NCBI NO: 7434544 NR Description: phosphoglycerate kinase (EC 2.7.2.3) precursor,
  misc_feature (1)..(405): Homolog of NCBI NO: 15223484 NR Description: phosphoglycerate kinase -related [Arabidopsis
  misc_feature (1)..(405): Homolog of NCBI NO: 12644295 NR Description: PHOSPHOGLYCERATE KINASE, CHLOROPLAST PRECURSOR
  misc_feature (1)..(405): Homolog of NCBI NO: 15230595 NR Description: phosphoglycerate kinase -related [Arabidopsis
  misc_feature (1)..(405): Homolog of NCBI NO: 3738261 NR Description: chloroplast phosphoglycerate kinase [Populus
  misc_feature (1)..(405): Homolog of NCBI NO: 2499497 NR Description: Phosphoglycerate kinase, chloroplast precursor
  misc_feature (1)..(399): Homolog of NCBI NO: 129915 NR Description: Phosphoglycerate kinase, chloroplast precursor
  misc_feature (1)..(405): Homolog of NCBI NO: 1346698 NR Description: Phosphoglycerate kinase, chloroplast precursor
  misc_feature (1)..(405): Homolog of NCBI NO: 2499497 NR Description: Phosphoglycerate kinase, chloroplast precursor
  misc_feature (1)..(405): Homolog of NCBI NO: 3738261 NR Description: chloroplast phosphoglycerate kinase [Populus
  misc_feature (1)..(405): Homolog of NCBI NO: 15230595 NR Description: phosphoglycerate kinase -related [Arabidopsis
  misc_feature (1)..(405): Homolog of NCBI NO: 12644295 NR Description: PHOSPHOGLYCERATE KINASE, CHLOROPLAST PRECURSOR
  misc_feature (1)..(405): Homolog of NCBI NO: 15223484 NR Description: phosphoglycerate kinase -related [Arabidopsis
MAKKSVGDLNSVDLKGKKVFVRADLNVPLDDNQNITDDTRIRAAIPTIKFLIENGAKVILSTHLGRPKGVTPKFSLAPLVPRLSELLGIEVVKADDCIGPEVETLVASLPEGGVLLLENVRFYKEEEKNEPDFAKKLASLADLYVNDAFGTAHRAHASTEGVTKFLKPSVAGFLLQKELDYLVGAVSNPKRPFAAIVGGSKVSSKIGVIESLLEKCDILLLGGGMIFTFYKAQGLSVGSSLVEEDKLELATTLLAKAKARGVSLLLPTDVVIADKFAPDANSKIVPASAIPDGWMGLDIGPDSVKTFNEALDTTQTVIWNGPMGVFEFEKFAKGTEAVANKLAELSKKGVTTIIGGGDSVAAVEKVGVAGVMSHISTGGGASLELLEGKVLPGVVALDEATPVTV

SEQ ID NO: 47178 - DNA, 2367 bp, Arabidopsis thaliana; identical to SEQ ID NO: 45792
  misc_feature (1)..(2367): Ceres Seq. ID no. 13600852
  misc_feature: MA Experiment ID: 20000307 Result: Down-regulated in Transcription
  misc_feature: MA Experiment 20000307 PARAMETER Experiment Name: At_Germinating_Seeds_Sub_P Parameter: Age (hr) Value: 24 vs. 0
  misc_feature: MA Experiment 20000307 PARAMETER Experiment Name: At_Germinating_Seeds_Sub_P Parameter: Organism Value: A. thaliana
  misc_feature: MA Experiment 20000307 PARAMETER Experiment Name: At_Germinating_Seeds_Sub_P Parameter: Plant Line Value: WS
  misc_feature: MA Experiment 20000307 PARAMETER Experiment Name: At_Germinating_Seeds_Sub_P Parameter: Tissue Value: Germinating Seeds
  misc_feature: MA Experiment ID: 20000328 Result: Up-regulated in Transcription
  misc_feature: MA Experiment 20000328 PARAMETER Experiment Name: At_42deg_Heat_Sub_P Parameter: Age (day) Value: 14
  misc_feature: MA Experiment 20000328 PARAMETER Experiment Name: At_42deg_Heat_Sub_P Parameter: Organism Value: A. thaliana
  misc_feature: MA Experiment 20000328 PARAMETER Experiment Name: At_42deg_Heat_Sub_P Parameter: Plant Line Value: WS
  misc_feature: MA Experiment 20000328 PARAMETER Experiment Name: At_42deg_Heat_Sub_P Parameter: Temperature (deg C) Value: 42 vs. 22
  misc_feature: MA Experiment 20000328 PARAMETER Experiment Name: At_42deg_Heat_Sub_P Parameter: Timepoint (hr) Value: 6
  misc_feature: MA Experiment 20000328 PARAMETER Experiment Name: At_42deg_Heat_Sub_P Parameter: Tissue Value: Aerial
  misc_feature: MA Experiment ID: 20001807 Result: Up-regulated in Transcription
  misc_feature: MA Experiment 20001807 PARAMETER Experiment Name: At_50mM_NH4NO3_L-to-H_Sub_P Parameter: Timepoint (hr) Value: 6
  misc_feature: MA Experiment 20001807 PARAMETER Experiment Name: At_50mM_NH4NO3_L-to-H_Sub_P Parameter: Tissue Value: Leaf
  misc_feature: MA Experiment 20001807 PARAMETER Experiment Name: At_50mM_NH4NO3_L-to-H_Sub_P Parameter: Treatment Value: 50mM NH4NO3 vs 100mM Mannitol

SEQ ID NO: 47179 - protein, 682 aa, Arabidopsis thaliana; identical to SEQ ID NO: 45793
  peptide (1)..(682): Ceres Seq. ID no. 13600853
  misc_feature (54)..(648): Pfam Name: Hsp70 protein Pfam Description: Hsp70 protein
  misc_feature (54)..(648): Pfam Name: Hsp70 protein Pfam Description: Hsp70 protein
  misc_feature (54)..(648): Pfam Name: Hsp70 protein Pfam Description: Hsp70 protein
  misc_feature (17)..(656): Homolog of NCBI NO: 31790767 NR Description: heat shock protein 70 precursor [Neocallimastix
  misc_feature (1)..(673): Homolog of NCBI NO: 34878657 NR Description: similar to grp75 [Rattus norvegicus]
  misc_feature (1)..(676): Homolog of NCBI NO: 585273 NR Description: Heat shock 70 kDa protein, mitochondrial
  misc_feature (42)..(676): Homolog of NCBI NO: 27476086 NR Description: Putative heat shock 70 KD protein, mitochondrial
  misc_feature (7)..(677): Homolog of NCBI NO: 7441881 NR Description: dnaK-type molecular chaperone HSC70-10,
  misc_feature (17)..(656): Homolog of NCBI NO: 31790767 NR Description: heat shock protein 70 precursor [Neocallimastix
  misc_feature (1)..(676): Homolog of NCBI NO: 585273 NR Description: Heat shock 70 kDa protein, mitochondrial
  misc_feature (7)..(677): Homolog of NCBI NO: 7441881 NR Description: dnaK-type molecular chaperone HSC70-10,
  misc_feature (42)..(676): Homolog of NCBI NO: 27476086 NR Description: Putative heat shock 70 KD protein, mitochondrial
  misc_feature (1)..(676): Homolog of NCBI NO: 585273 NR Description: Heat shock 70 kDa protein, mitochondrial
  misc_feature (1)..(673): Homolog of NCBI NO: 34878657 NR Description: similar to grp75 [Rattus norvegicus]
  misc_feature (17)..(656): Homolog of NCBI NO: 31790767 NR Description: heat shock protein 70 precursor [Neocallimastix
  misc_feature (3)..(676): Homolog of NCBI NO: 7441844 NR Description: dnaK-type molecular chaperone PHSP1 precursor,
  misc_feature (3)..(676): Homolog of NCBI NO: 585272 NR Description: HEAT SHOCK 70 KD PROTEIN, MITOCHONDRIAL PRECURSOR
  misc_feature (5)..(676): Homolog of NCBI NO: 399940 NR Description: HEAT SHOCK 70 KD PROTEIN, MITOCHONDRIAL PRECURSOR
  misc_feature (1)..(676): Homolog of NCBI NO: 15242459 NR Description: heat shock protein mtHsc70-2 (Hsc70-5)
  misc_feature (7)..(677): Homolog of NCBI NO: 7441879 NR Description: dnaK-type molecular chaperone HSC70-11,
  misc_feature (3)..(676): Homolog of NCBI NO: 7441844 NR Description: dnaK-type molecular chaperone PHSP1 precursor,
  misc_feature (3)..(676): Homolog of NCBI NO: 585272 NR Description: HEAT SHOCK 70 KD PROTEIN, MITOCHONDRIAL PRECURSOR
  misc_feature (5)..(676): Homolog of NCBI NO: 399940 NR Description: HEAT SHOCK 70 KD PROTEIN, MITOCHONDRIAL PRECURSOR
  misc_feature (1)..(676): Homolog of NCBI NO: 15242459 NR Description: heat shock protein mtHsc70-2 (Hsc70-5)
  misc_feature (7)..(677): Homolog of NCBI NO: 7441879 NR Description: dnaK-type molecular chaperone HSC70-11,
  misc_feature (7)..(677): Homolog of NCBI NO: 7441881 NR Description: dnaK-type molecular chaperone HSC70-10,
  misc_feature (42)..(676): Homolog of NCBI NO: 27476086 NR Description: Putative heat shock 70 KD protein, mitochondrial
  misc_feature (1)..(673): Homolog of NCBI NO: 34878657 NR Description: similar to grp75 [Rattus norvegicus]
  misc_feature (7)..(677): Homolog of NCBI NO: 7441879 NR Description: dnaK-type molecular chaperone HSC70-11,
  misc_feature (1)..(676): Homolog of NCBI NO: 15242459 NR Description: heat shock protein mtHsc70-2 (Hsc70-5)
  misc_feature (5)..(676): Homolog of NCBI NO: 399940 NR Description: HEAT SHOCK 70 KD PROTEIN, MITOCHONDRIAL PRECURSOR
  misc_feature (3)..(676): Homolog of NCBI NO: 585272 NR Description: HEAT SHOCK 70 KD PROTEIN, MITOCHONDRIAL PRECURSOR
  misc_feature (3)..(676): Homolog of NCBI NO: 7441844 NR Description: dnaK-type molecular chaperone PHSP1 precursor,

SEQ ID NO: 47180 - protein, 666 aa, Arabidopsis thaliana; identical to SEQ ID NO: 45794
  peptide (1)..(666): Ceres Seq. ID no. 13600854
  misc_feature (38)..(632): Pfam Name: Hsp70 protein Pfam Description: Hsp70 protein
  misc_feature (38)..(632): Pfam Name: Hsp70 protein Pfam Description: Hsp70 protein
  misc_feature (38)..(632): Pfam Name: Hsp70 protein Pfam Description: Hsp70 protein
  misc_feature (1)..(640): Homolog of NCBI NO: 31790767 NR Description: heat shock protein 70 precursor [Neocallimastix
  misc_feature (1)..(657): Homolog of NCBI NO: 34878657 NR Description: similar to grp75 [Rattus norvegicus]
  misc_feature (1)..(660): Homolog of NCBI NO: 585273 NR Description: Heat shock 70 kDa protein, mitochondrial
  misc_feature (26)..(660): Homolog of NCBI NO: 27476086 NR Description: Putative heat shock 70 KD protein, mitochondrial
  misc_feature (1)..(661): Homolog of NCBI NO: 7441881 NR Description: dnaK-type molecular chaperone HSC70-10,
  misc_feature (1)..(640): Homolog of NCBI NO: 31790767 NR Description: heat shock protein 70 precursor [Neocallimastix
  misc_feature (1)..(660): Homolog of NCBI NO: 585273 NR Description: Heat shock 70 kDa protein, mitochondrial
  misc_feature (1)..(661): Homolog of NCBI NO: 7441881 NR Description: dnaK-type molecular chaperone HSC70-10,
  misc_feature (26)..(660): Homolog of NCBI NO: 27476086 NR Description: Putative heat shock 70 KD protein, mitochondrial
  misc_feature (1)..(660): Homolog of NCBI NO: 585273 NR Description: Heat shock 70 kDa protein, mitochondrial
  misc_feature (1)..(657): Homolog of NCBI NO: 34878657 NR Description: similar to grp75 [Rattus norvegicus]
  misc_feature (1)..(640): Homolog of NCBI NO: 31790767 NR Description: heat shock protein 70 precursor [Neocallimastix
  misc_feature (1)..(660): Homolog of NCBI NO: 7441844 NR Description: dnaK-type molecular chaperone PHSP1 precursor,
  misc_feature (1)..(660): Homolog of NCBI NO: 585272 NR Description: HEAT SHOCK 70 KD PROTEIN, MITOCHONDRIAL PRECURSOR
  misc_feature (1)..(660): Homolog of NCBI NO: 399940 NR Description: HEAT SHOCK 70 KD PROTEIN, MITOCHONDRIAL PRECURSOR
  misc_feature (1)..(660): Homolog of NCBI NO: 15242459 NR Description: heat shock protein mtHsc70-2 (Hsc70-5)
  misc_feature (1)..(661): Homolog of NCBI NO: 7441879 NR Description: dnaK-type molecular chaperone HSC70-11,
  misc_feature (1)..(660): Homolog of NCBI NO: 7441844 NR Description: dnaK-type molecular chaperone PHSP1 precursor,
  misc_feature (1)..(660): Homolog of NCBI NO: 585272 NR Description: HEAT SHOCK 70 KD PROTEIN, MITOCHONDRIAL PRECURSOR
  misc_feature (1)..(660): Homolog of NCBI NO: 399940 NR Description: HEAT SHOCK 70 KD PROTEIN, MITOCHONDRIAL PRECURSOR
  misc_feature (1)..(660): Homolog of NCBI NO: 15242459 NR Description: heat shock protein mtHsc70-2 (Hsc70-5)
  misc_feature (1)..(661): Homolog of NCBI NO: 7441879 NR Description: dnaK-type molecular chaperone HSC70-11,
  misc_feature (1)..(661): Homolog of NCBI NO: 7441881 NR Description: dnaK-type molecular chaperone HSC70-10,
  misc_feature (26)..(660): Homolog of NCBI NO: 27476086 NR Description: Putative heat shock 70 KD protein, mitochondrial
  misc_feature (1)..(657): Homolog of NCBI NO: 34878657 NR Description: similar to grp75 [Rattus norvegicus]
  misc_feature (1)..(661): Homolog of NCBI NO: 7441879 NR Description: dnaK-type molecular chaperone HSC70-11,
  misc_feature (1)..(660): Homolog of NCBI NO: 15242459 NR Description: heat shock protein mtHsc70-2 (Hsc70-5)
  misc_feature (1)..(660): Homolog of NCBI NO: 399940 NR Description: HEAT SHOCK 70 KD PROTEIN, MITOCHONDRIAL PRECURSOR
  misc_feature (1)..(660): Homolog of NCBI NO: 585272 NR Description: HEAT SHOCK 70 KD PROTEIN, MITOCHONDRIAL PRECURSOR
  misc_feature (1)..(660): Homolog of NCBI NO: 7441844 NR Description: dnaK-type molecular chaperone PHSP1 precursor,

SEQ ID NO: 47181 - protein, 649 aa, Arabidopsis thaliana; identical to SEQ ID NO: 45795
  peptide (1)..(649): Ceres Seq. ID no. 13600855
  misc_feature (21)..(615): Pfam Name: Hsp70 protein Pfam Description: Hsp70 protein
  misc_feature (21)..(615): Pfam Name: Hsp70 protein Pfam Description: Hsp70 protein
  misc_feature (21)..(615): Pfam Name: Hsp70 protein Pfam Description: Hsp70 protein
  misc_feature (1)..(623): Homolog of NCBI NO: 31790767 NR Description: heat shock protein 70 precursor [Neocallimastix
  misc_feature (1)..(640): Homolog of NCBI NO: 34878657 NR Description: similar to grp75 [Rattus norvegicus]
  misc_feature (1)..(643): Homolog of NCBI NO: 585273 NR Description: Heat shock 70 kDa protein, mitochondrial
  misc_feature (9)..(643): Homolog of NCBI NO: 27476086 NR Description: Putative heat shock 70 KD protein, mitochondrial
  misc_feature (1)..(644): Homolog of NCBI NO: 7441881 NR Description: dnaK-type molecular chaperone HSC70-10,
  misc_feature (1)..(623): Homolog of NCBI NO: 31790767 NR Description: heat shock protein 70 precursor [Neocallimastix
  misc_feature (1)..(643): Homolog of NCBI NO: 585273 NR Description: Heat shock 70 kDa protein, mitochondrial
  misc_feature (1)..(644): Homolog of NCBI NO: 7441881 NR Description: dnaK-type molecular chaperone HSC70-10,
  misc_feature (9)..(643): Homolog of NCBI NO: 27476086 NR Description: Putative heat shock 70 KD protein, mitochondrial
  misc_feature (1)..(643): Homolog of NCBI NO: 585273 NR Description: Heat shock 70 kDa protein, mitochondrial
  misc_feature (1)..(640): Homolog of NCBI NO: 34878657 NR Description: similar to grp75 [Rattus norvegicus]
  misc_feature (1)..(623): Homolog of NCBI NO: 31790767 NR Description: heat shock protein 70 precursor [Neocallimastix
  misc_feature (1)..(643): Homolog of NCBI NO: 7441844 NR Description: dnaK-type molecular chaperone PHSP1 precursor,
  misc_feature (1)..(643): Homolog of NCBI NO: 585272 NR Description: HEAT SHOCK 70 KD PROTEIN, MITOCHONDRIAL PRECURSOR
  misc_feature (1)..(643): Homolog of NCBI NO: 399940 NR Description: HEAT SHOCK 70 KD PROTEIN, MITOCHONDRIAL PRECURSOR
  misc_feature (1)..(643): Homolog of NCBI NO: 15242459 NR Description: heat shock protein mtHsc70-2 (Hsc70-5)
  misc_feature (1)..(644): Homolog of NCBI NO: 7441879 NR Description: dnaK-type molecular chaperone HSC70-11,
  misc_feature (1)..(643): Homolog of NCBI NO: 7441844 NR Description: dnaK-type molecular chaperone PHSP1 precursor,
  misc_feature (1)..(643): Homolog of NCBI NO: 585272 NR Description: HEAT SHOCK 70 KD PROTEIN, MITOCHONDRIAL PRECURSOR
  misc_feature (1)..(643): Homolog of NCBI NO: 399940 NR Description: HEAT SHOCK 70 KD PROTEIN, MITOCHONDRIAL PRECURSOR
  misc_feature (1)..(643): Homolog of NCBI NO: 15242459 NR Description: heat shock protein mtHsc70-2 (Hsc70-5)
  misc_feature (1)..(644): Homolog of NCBI NO: 7441879 NR Description: dnaK-type molecular chaperone HSC70-11,
  misc_feature (1)..(644): Homolog of NCBI NO: 7441881 NR Description: dnaK-type molecular chaperone HSC70-10,
  misc_feature (9)..(643): Homolog of NCBI NO: 27476086 NR Description: Putative heat shock 70 KD protein, mitochondrial
  misc_feature (1)..(640): Homolog of NCBI NO: 34878657 NR Description: similar to grp75 [Rattus norvegicus]
  misc_feature (1)..(644): Homolog of NCBI NO: 7441879 NR Description: dnaK-type molecular chaperone HSC70-11,
  misc_feature (1)..(643): Homolog of NCBI NO: 15242459 NR Description: heat shock protein mtHsc70-2 (Hsc70-5)
  misc_feature (1)..(643): Homolog of NCBI NO: 399940 NR Description: HEAT SHOCK 70 KD PROTEIN, MITOCHONDRIAL PRECURSOR
  misc_feature (1)..(643): Homolog of NCBI NO: 585272 NR Description: HEAT SHOCK 70 KD PROTEIN, MITOCHONDRIAL PRECURSOR
  misc_feature (1)..(643): Homolog of NCBI NO: 7441844 NR Description: dnaK-type molecular chaperone PHSP1 precursor,

SEQ ID NO: 47182 - DNA, 2842 bp, Arabidopsis thaliana
  misc_feature (1)..(2842): Ceres Seq. ID no. 13593295
  misc_feature: MA Experiment ID: 20000182 Result: Down-regulated in Transcription
  misc_feature: MA Experiment 20000182 PARAMETER Experiment Name: At_2mM_SA_P Parameter: Age (day) Value: 14
  misc_feature: MA Experiment 20000182 PARAMETER Experiment Name: At_2mM_SA_P Parameter: Organism Value: A. thaliana
  misc_feature: MA Experiment 20000182 PARAMETER Experiment Name: At_2mM_SA_P Parameter: Plant Line Value: WS
  misc_feature: MA Experiment 20000182 PARAMETER Experiment Name: At_2mM_SA_P Parameter: Timepoint (hr) Value: 6
  misc_feature: MA Experiment 20000182 PARAMETER Experiment Name: At_2mM_SA_P Parameter: Tissue Value: Aerial
  misc_feature: MA Experiment 20000182 PARAMETER Experiment Name: At_2mM_SA_P Parameter: Treatment Value: 2mM SA vs. No Treatment
atgggtgtgggaggcaatttctgggatttgctgagaccatatgctcagcaacaaggctttgattttctcagaaacaaacgagtcgctgttgatctctccttctggatcgttcagcatgaaaccgctgttaagggtttcgtccttaaacctcacctccgactcactttcttccgtactatcaacctcttctcaaagtttggagcgtacccggtttttgtggttgatggaacaccatcacctttgaaatctcaggcgagaatctccaggtttttccgttcttctggaattgatacttgtaatctacctgtgattaaagatggtgtctcggttgagagaaacaagctgttttctgaatgggttagggaatgtgtggagctactcgaattgctcggtattccggtgctgaaagctaatggtgaggctgaagctctctgtgcacagttaaacagccaaggttttgtggatgcttgcattactcctgatagtgatgctttcctttttggtgctatgtgcgtgatcaaagacatcaagcctaattcaagagaaccttttgaatgctaccatatgtcacatatcgagtctggcctcggtttgaagcggaaacacttgattgctatttctctattggtgggaaacgattatgattcaggcggtgttcttgggattggtgtggataaagcactgcgcattgttcgtgagttttctgaagaccaagtacttgaaagactacaggacattggaaatgggttgcaacctgcagttcctggtggaatcaaatccggggatgatggtgaagaattccgctcagagatgaaaaaaagatctcctcactgttcccgttgtggacacctgggcagcaagagaactcattttaagtcctcttgtgagcactgcggttgtgatagtggttgcattaaaaaaccattagggtttagatgtgaatgctccttttgttccaaggatcgagatttaagggaacaaaagaaaaccaatgattggtggatcaaagtctgcgataagattgctctagcgccagagtttcccaacagaaagattattgaactttatctatccgatggtttgatgacaggagatggatcgtcaatgtcttggggaactcctgatactggaatgctagtggatctcatggtgcaaaatgataatggtgactgcttcttgctaactgatgaatgcataggacttgttcagtctgctttccctgatgaaacagagcattttctacatgagaagaaactgagagagtcgaaaaagaagaatgtttctgaagaagaaacagcaacaccaagagcaacaacaatgggtgtacaaagaagcattaccgatttctaccgttcagcgaagaaagcagcagcaggtcaaagtatagagacaggcgggagttcaaaagcttctgcggaaaagaagagacaggcaacttctactagtagtagtaaccttacaaagtcggtcaggcgtcgtctcttagagagcagaagaagtttattggtcttatcggaaatgatgaatgcggtaataacatcagccaccatcaactgcaactctctgtcgccgtcatggacatgcggagacaattcgccgtcaaagcttctgttgggggaaatatctgccgcgttatcacgacggaggaccgtgaaggtgtcatgcggcaagagcagcccagatgattaccactcaaccctcaaatcactcaattctcgtggtcggtttcccagaaagtccctcggccagcattacatgttgaattcggacatcaacgaccagctagcctctgcggctgatgtgaaagaaggagattttgtattagagattggtcctgggactggttctttaaccaatgtccttatcaatttaggtgctacagttcttgccatcgaaaaggatcctcatatggttgatttggtgagcgaacgatttgctggttctgacaagttcaaggttttgcaagaggattttgtcaagtgtcacatccgttctcacatgctctccattttagagactagaaggttatcacatccagattctgctcttgcaaaggttgtttccaatttacctttcaatataagtactgatgttgtgaagcttctacttcctatgggtgatatcttctcaaaagttgttctcttactccaggacgaggcagcattgcgattggttgaaccagcactgcgaacatctgaataccgtcccatcaacattttgatcaacttctattctgaaccggaatacaatttcagagttcctagggaaaacttcttccctcagcccaaggttgatgctgctgtcgtaacattcaagctgaagcatccgagggactatcctgatgtttcctccaccaaaaatttcttctctttggtgaattctgcattcaatgggaagaggaaaatgttgagaaagtccctccagcacatatcatcatctcctgatatcgaaaaagcactaggagttgctggtcttccagccacttcaaggcctgaagagcttaccttggatgactttgtcaagttgcataacgtaatcgccagagaataagaccaacgagaaggaccatcagtatccatgttttgtcggctttagagttatacgaagccacctgaaaacagaacagtgacggcaacaagacgaggaagatacaacgttgcagtgcaagctgttgattgccgaaagacgaatgtgaccaatatccatacagtcaggaatcagggagtaagtagaatacagtcccaatctggtttgttattgttagaatttttctgtctatgagatgatctttgtaaattgttgattttgtaataccaaaccgacaaatagtctttacaatcac

SEQ ID NO: 47183 - protein, 849 aa, Arabidopsis thaliana
  peptide (1)..(849): Ceres Seq. ID no. 13593296
  misc_feature (1)..(96): Pfam Name: XPG N-terminal domain Pfam Description: XPG N-terminal domain
  misc_feature (1)..(304): Homolog of NCBI NO: 24658219 NR Description: CG10670-PA [Drosophila melanogaster]
  misc_feature (1)..(304): Homolog of NCBI NO: 5679043 NR Description: GM10765p [Drosophila melanogaster]
  misc_feature (557)..(847): Homolog of NCBI NO: 33242431 NR Description: dimethyladenosine transferase [Chlamydophila
  misc_feature (557)..(847): Homolog of NCBI NO: 29840068 NR Description: dimethyladenosine transferase [Chlamydophila
  misc_feature (763)..(849): Homolog of NCBI NO: 25518459 NR Description: hypothetical protein T1N6.27 [imported] -
  misc_feature (324)..(495): Homolog of NCBI NO: 15223502 NR Description: hypothetical protein [Arabidopsis thaliana]
  misc_feature (507)..(745): Homolog of NCBI NO: 25518538 NR Description: hypothetical protein F22M8.1 - Arabidopsis
  misc_feature (507)..(849): Homolog of NCBI NO: 15220982 NR Description: dimethyladenosine transferase -related
  misc_feature (1)..(384): Homolog of NCBI NO: 15223502 NR Description: hypothetical protein [Arabidopsis thaliana]
  misc_feature (1)..(495): Homolog of NCBI NO: 25513625 NR Description: F22M8.2 protein - Arabidopsis thaliana
MGVGGNFWDLLRPYAQQQGFDFLRNKRVAVDLSFWIVQHETAVKGFVLKPHLRLTFFRTINLFSKFGAYPVFVVDGTPSPLKSQARISRFFRSSGIDTCNLPVIKDGVSVERNKLFSEWVRECVELLELLGIPVLKANGEAEALCAQLNSQGFVDACITPDSDAFLFGAMCVIKDIKPNSREPFECYHMSHIESGLGLKRKHLIAISLLVGNDYDSGGVLGIGVDKALRIVREFSEDQVLERLQDIGNGLQPAVPGGIKSGDDGEEFRSEMKKRSPHCSRCGHLGSKRTHFKSSCEHCGCDSGCIKKPLGFRCECSFCSKDRDLREQKKTNDWWIKVCDKIALAPEFPNRKIIELYLSDGLMTGDGSSMSWGTPDTGMLVDLMVQNDNGDCFLLTDECIGLVQSAFPDETEHFLHEKKLRESKKKNVSEEETATPRATTMGVQRSITDFYRSAKKAAAGQSIETGGSSKASAEKKRQATSTSSSNLTKSVRRRLLESRRSLLVLSEMMNAVITSATINCNSLSPSWTCGDNSPSKLLLGEISAALSRRRTVKVSCGKSSPDDYHSTLKSLNSRGRFPRKSLGQHYMLNSDINDQLASAADVKEGDFVLEIGPGTGSLTNVLINLGATVLAIEKDPHMVDLVSERFAGSDKFKVLQEDFVKCHIRSHMLSILETRRLSHPDSALAKVVSNLPFNISTDVVKLLLPMGDIFSKVVLLLQDEAALRLVEPALRTSEYRPINILINFYSEPEYNFRVPRENFFPQPKVDAAVVTFKLKHPRDYPDVSSTKNFFSLVNSAFNGKRKMLRKSLQHISSSPDIEKALGVAGLPATSRPEELTLDDFVKLHNVIARE

SEQ ID NO: 47184 - protein, 680 aa, Arabidopsis thaliana
  peptide (1)..(680): Ceres Seq. ID no. 13593297
  misc_feature (1)..(135): Homolog of NCBI NO: 24658219 NR Description: CG10670-PA [Drosophila melanogaster]
  misc_feature (1)..(135): Homolog of NCBI NO: 5679043 NR Description: GM10765p [Drosophila melanogaster]
  misc_feature (388)..(678): Homolog of NCBI NO: 33242431 NR Description: dimethyladenosine transferase [Chlamydophila
  misc_feature (388)..(678): Homolog of NCBI NO: 29840068 NR Description: dimethyladenosine transferase [Chlamydophila
  misc_feature (594)..(680): Homolog of NCBI NO: 25518459 NR Description: hypothetical protein T1N6.27 [imported] -
  misc_feature (155)..(326): Homolog of NCBI NO: 15223502 NR Description: hypothetical protein [Arabidopsis thaliana]
  misc_feature (338)..(576): Homolog of NCBI NO: 25518538 NR Description: hypothetical protein F22M8.1 - Arabidopsis
  misc_feature (338)..(680): Homolog of NCBI NO: 15220982 NR Description: dimethyladenosine transferase -related
  misc_feature (1)..(215): Homolog of NCBI NO: 15223502 NR Description: hypothetical protein [Arabidopsis thaliana]
  misc_feature (1)..(326): Homolog of NCBI NO: 25513625 NR Description: F22M8.2 protein - Arabidopsis thaliana
MCVIKDIKPNSREPFECYHMSHIESGLGLKRKHLIAISLLVGNDYDSGGVLGIGVDKALRIVREFSEDQVLERLQDIGNGLQPAVPGGIKSGDDGEEFRSEMKKRSPHCSRCGHLGSKRTHFKSSCEHCGCDSGCIKKPLGFRCECSFCSKDRDLREQKKTNDWWIKVCDKIALAPEFPNRKIIELYLSDGLMTGDGSSMSWGTPDTGMLVDLMVQNDNGDCFLLTDECIGLVQSAFPDETEHFLHEKKLRESKKKNVSEEETATPRATTMGVQRSITDFYRSAKKAAAGQSIETGGSSKASAEKKRQATSTSSSNLTKSVRRRLLESRRSLLVLSEMMNAVITSATINCNSLSPSWTCGDNSPSKLLLGEISAALSRRRTVKVSCGKSSPDDYHSTLKSLNSRGRFPRKSLGQHYMLNSDINDQLASAADVKEGDFVLEIGPGTGSLTNVLINLGATVLAIEKDPHMVDLVSERFAGSDKFKVLQEDFVKCHIRSHMLSILETRRLSHPDSALAKVVSNLPFNISTDVVKLLLPMGDIFSKVVLLLQDEAALRLVEPALRTSEYRPINILINFYSEPEYNFRVPRENFFPQPKVDAAVVTFKLKHPRDYPDVSSTKNFFSLVNSAFNGKRKMLRKSLQHISSSPDIEKALGVAGLPATSRPEELTLDDFVKLHNVIARE

SEQ ID NO: 47185 - protein, 661 aa, Arabidopsis thaliana
  peptide (1)..(661): Ceres Seq. ID no. 13593298
  misc_feature (1)..(116): Homolog of NCBI NO: 24658219 NR Description: CG10670-PA [Drosophila melanogaster]
  misc_feature (1)..(116): Homolog of NCBI NO: 5679043 NR Description: GM10765p [Drosophila melanogaster]
  misc_feature (369)..(659): Homolog of NCBI NO: 33242431 NR Description: dimethyladenosine transferase [Chlamydophila
  misc_feature (369)..(659): Homolog of NCBI NO: 29840068 NR Description: dimethyladenosine transferase [Chlamydophila
  misc_feature (575)..(661): Homolog of NCBI NO: 25518459 NR Description: hypothetical protein T1N6.27 [imported] -
  misc_feature (136)..(307): Homolog of NCBI NO: 15223502 NR Description: hypothetical protein [Arabidopsis thaliana]
  misc_feature (319)..(557): Homolog of NCBI NO: 25518538 NR Description: hypothetical protein F22M8.1 - Arabidopsis
  misc_feature (319)..(661): Homolog of NCBI NO: 15220982 NR Description: dimethyladenosine transferase -related
  misc_feature (1)..(196): Homolog of NCBI NO: 15223502 NR Description: hypothetical protein [Arabidopsis thaliana]
  misc_feature (1)..(307): Homolog of NCBI NO: 25513625 NR Description: F22M8.2 protein - Arabidopsis thaliana
MSHIESGLGLKRKHLIAISLLVGNDYDSGGVLGIGVDKALRIVREFSEDQVLERLQDIGNGLQPAVPGGIKSGDDGEEFRSEMKKRSPHCSRCGHLGSKRTHFKSSCEHCGCDSGCIKKPLGFRCECSFCSKDRDLREQKKTNDWWIKVCDKIALAPEFPNRKIIELYLSDGLMTGDGSSMSWGTPDTGMLVDLMVQNDNGDCFLLTDECIGLVQSAFPDETEHFLHEKKLRESKKKNVSEEETATPRATTMGVQRSITDFYRSAKKAAAGQSIETGGSSKASAEKKRQATSTSSSNLTKSVRRRLLESRRSLLVLSEMMNAVITSATINCNSLSPSWTCGDNSPSKLLLGEISAALSRRRTVKVSCGKSSPDDYHSTLKSLNSRGRFPRKSLGQHYMLNSDINDQLASAADVKEGDFVLEIGPGTGSLTNVLINLGATVLAIEKDPHMVDLVSERFAGSDKFKVLQEDFVKCHIRSHMLSILETRRLSHPDSALAKVVSNLPFNISTDVVKLLLPMGDIFSKVVLLLQDEAALRLVEPALRTSEYRPINILINFYSEPEYNFRVPRENFFPQPKVDAAVVTFKLKHPRDYPDVSSTKNFFSLVNSAFNGKRKMLRKSLQHISSSPDIEKALGVAGLPATSRPEELTLDDFVKLHNVIARE

SEQ ID NO: 47186 - DNA, 1064 bp, Arabidopsis thaliana
  misc_feature (1)..(1064): Ceres Seq. ID no. 13588510
  misc_feature: MA Experiment ID: 20000227 Result: Up-regulated in Transcription
  misc_feature: MA Experiment 20000227 PARAMETER Experiment Name: At_Root-Tips-vs-Tops_P Parameter: Tissue Value: Root Tips vs. Root Tops
  misc_feature: MA Experiment ID: 20000234 Result: Up-regulated in Transcription
  misc_feature: MA Experiment 20000234 PARAMETER Experiment Name: At_Siliques_P Parameter: Age (day) Value: 21
  misc_feature: MA Experiment 20000234 PARAMETER Experiment Name: At_Siliques_P Parameter: Organism Value: A. thaliana
  misc_feature: MA Experiment 20000234 PARAMETER Experiment Name: At_Siliques_P Parameter: Plant Line Value: WS
  misc_feature: MA Experiment 20000234 PARAMETER Experiment Name: At_Siliques_P Parameter: Tissue Value: Less Than 5mm Siliques vs. Whole Plant
  misc_feature: MA Experiment ID: 20000235 Result: Up-regulated in Transcription
  misc_feature: MA Experiment 20000235 PARAMETER Experiment Name: At_Siliques_P Parameter: Age (day) Value: 21
  misc_feature: MA Experiment 20000235 PARAMETER Experiment Name: At_Siliques_P Parameter: Organism Value: A. thaliana
  misc_feature: MA Experiment 20000235 PARAMETER Experiment Name: At_Siliques_P Parameter: Plant Line Value: WS
  misc_feature: MA Experiment 20000235 PARAMETER Experiment Name: At_Siliques_P Parameter: Tissue Value: 5-10mm Siliques vs. Whole Plant
  misc_feature: MA Experiment ID: 20000265 Result: Up-regulated in Transcription
  misc_feature: MA Experiment 20000265 PARAMETER Experiment Name: At_Open_Flower_P Parameter: Age (day) Value: 21
  misc_feature: MA Experiment 20000265 PARAMETER Experiment Name: At_Open_Flower_P Parameter: Plant Line Value: WS
  misc_feature: MA Experiment 20000265 PARAMETER Experiment Name: At_Open_Flower_P Parameter: Tissue Value: Closed Flower vs. Whole Plant
  misc_feature: MA Experiment ID: 20000286 Result: Up-regulated in Transcription
  misc_feature: MA Experiment 20000286 PARAMETER Experiment Name: At_Open_Flower_P Parameter: Age (day) Value: 21
  misc_feature: MA Experiment 20000286 PARAMETER Experiment Name: At_Open_Flower_P Parameter: Plant Line Value: WS
  misc_feature: MA Experiment 20000286 PARAMETER Experiment Name: At_Open_Flower_P Parameter: Tissue Value: Half Open vs. Whole Plant
  misc_feature: MA Experiment ID: 20000308 Result: Up-regulated in Transcription
  misc_feature: MA Experiment 20000308 PARAMETER Experiment Name: At_100mM_NaCl__P Parameter: Age (day) Value: 17
  misc_feature: MA Experiment 20000308 PARAMETER Experiment Name: At_100mM_NaCl__P Parameter: Organism Value: A. thaliana
  misc_feature: MA Experiment 20000308 PARAMETER Experiment Name: At_100mM_NaCl__P Parameter: Plant Line Value: WS
  misc_feature: MA Experiment 20000308 PARAMETER Experiment Name: At_100mM_NaCl__P Parameter: Timepoint (hr) Value: 72
  misc_feature: MA Experiment 20000308 PARAMETER Experiment Name: At_100mM_NaCl__P Parameter: Tissue Value: Whole Plant
  misc_feature: MA Experiment 20000308 PARAMETER Experiment Name: At_100mM_NaCl__P Parameter: Treatment Value: 100mM NaCl vs. No Treatment
  misc_feature: MA Experiment ID: 20000437 Result: Up-regulated in Transcription
  misc_feature: MA Experiment 20000437 PARAMETER Experiment Name: At_Drought_P Parameter: Age (day) Value: 8
  misc_feature: MA Experiment 20000437 PARAMETER Experiment Name: At_Drought_P Parameter: Organism Value: A. thaliana
  misc_feature: MA Experiment 20000437 PARAMETER Experiment Name: At_Drought_P Parameter: Plant Line Value: WS
  misc_feature: MA Experiment 20000437 PARAMETER Experiment Name: At_Drought_P Parameter: Timepoint (hr) Value: 24
  misc_feature: MA Experiment 20000437 PARAMETER Experiment Name: At_Drought_P Parameter: Tissue Value: Whole Plant
  misc_feature: MA Experiment 20000437 PARAMETER Experiment Name: At_Drought_P Parameter: Treatment Value: Drought vs. No Drought
  misc_feature: MA Experiment ID: 20000438 Result: Down-regulated in Transcription
  misc_feature: MA Experiment 20000438 PARAMETER Experiment Name: At_Shoots__P Parameter: Age (day) Value: 14
  misc_feature: MA Experiment 20000438 PARAMETER Experiment Name: At_Shoots__P Parameter: Tissue Value: Shoots vs. Whole Plant
  misc_feature: MA Experiment ID: 20001247 Result: Down-regulated in Transcription
  misc_feature: MA Experiment 20001247 PARAMETER Experiment Name: At_Far-red-induction_P Parameter: Age (day) Value: 7
  misc_feature: MA Experiment 20001247 PARAMETER Experiment Name: At_Far-red-induction_P Parameter: Light Value: Far-red vs. White
  misc_feature: MA Experiment 20001247 PARAMETER Experiment Name: At_Far-red-induction_P Parameter: Organism Value: A. thaliana
  misc_feature: MA Experiment 20001247 PARAMETER Experiment Name: At_Far-red-induction_P Parameter: Plant Line Value: Columbia
  misc_feature: MA Experiment 20001247 PARAMETER Experiment Name: At_Far-red-induction_P Parameter: Timepoint (hr) Value: 1
  misc_feature: MA Experiment 20001247 PARAMETER Experiment Name: At_Far-red-induction_P Parameter: Tissue Value: Whole Plant
  misc_feature: MA Experiment ID: 20001450 Result: Down-regulated in Transcription
  misc_feature: MA Experiment 20001450 PARAMETER Experiment Name: At_Far-red-induction_P Parameter: Age (day) Value: 7
  misc_feature: MA Experiment 20001450 PARAMETER Experiment Name: At_Far-red-induction_P Parameter: Light Value: Far-red vs. White
  misc_feature: MA Experiment 20001450 PARAMETER Experiment Name: At_Far-red-induction_P Parameter: Organism Value: A. thaliana
  misc_feature: MA Experiment 20001450 PARAMETER Experiment Name: At_Far-red-induction_P Parameter: Plant Line Value: Columbia
  misc_feature: MA Experiment 20001450 PARAMETER Experiment Name: At_Far-red-induction_P Parameter: Timepoint (hr) Value: 8
  misc_feature: MA Experiment 20001450 PARAMETER Experiment Name: At_Far-red-induction_P Parameter: Tissue Value: Whole Plant
  misc_feature: MA Experiment ID: 20001557 Result: Up-regulated in Transcription
  misc_feature: MA Experiment 20001557 PARAMETER Experiment Name: At_Drought_Soil_Dry_P Parameter: Age (day) Value: 27
  misc_feature: MA Experiment 20001557 PARAMETER Experiment Name: At_Drought_Soil_Dry_P Parameter: Organism Value: A. thaliana
  misc_feature: MA Experiment 20001557 PARAMETER Experiment Name: At_Drought_Soil_Dry_P Parameter: Plant Line Value: WS
  misc_feature: MA Experiment 20001557 PARAMETER Experiment Name: At_Drought_Soil_Dry_P Parameter: Post Timepoint (hr) Value: 3
  misc_feature: MA Experiment 20001557 PARAMETER Experiment Name: At_Drought_Soil_Dry_P Parameter: Post-Treatment Value: Re-Water vs. No Drought
  misc_feature: MA Experiment 20001557 PARAMETER Experiment Name: At_Drought_Soil_Dry_P Parameter: Timepoint (day) Value: 13
  misc_feature: MA Experiment 20001557 PARAMETER Experiment Name: At_Drought_Soil_Dry_P Parameter: Treatment Value: Drought vs. No Drought
  misc_feature: MA Experiment ID: 20001558 Result: Up-regulated in Transcription
  misc_feature: MA Experiment 20001558 PARAMETER Experiment Name: At_Drought_Soil_Dry_P Parameter: Age (day) Value: 27
  misc_feature: MA Experiment 20001558 PARAMETER Experiment Name: At_Drought_Soil_Dry_P Parameter: Organism Value: A. thaliana
  misc_feature: MA Experiment 20001558 PARAMETER Experiment Name: At_Drought_Soil_Dry_P Parameter: Plant Line Value: WS
  misc_feature: MA Experiment 20001558 PARAMETER Experiment Name: At_Drought_Soil_Dry_P Parameter: Post Timepoint (hr) Value: 6
  misc_feature: MA Experiment 20001558 PARAMETER Experiment Name: At_Drought_Soil_Dry_P Parameter: Post-Treatment Value: Re-Water vs. No Drought
  misc_feature: MA Experiment 20001558 PARAMETER Experiment Name: At_Drought_Soil_Dry_P Parameter: Timepoint (day) Value: 13
  misc_feature: MA Experiment 20001558 PARAMETER Experiment Name: At_Drought_Soil_Dry_P Parameter: Treatment Value: Drought vs. No Drought
  misc_feature: MA Experiment ID: 20001560 Result: Up-regulated in Transcription
  misc_feature: MA Experiment 20001560 PARAMETER Experiment Name: At_Drought_Soil_Dry_P Parameter: Age (day) Value: 28
  misc_feature: MA Experiment 20001560 PARAMETER Experiment Name: At_Drought_Soil_Dry_P Parameter: Organism Value: A. thaliana
  misc_feature: MA Experiment 20001560 PARAMETER Experiment Name: At_Drought_Soil_Dry_P Parameter: Plant Line Value: WS
  misc_feature: MA Experiment 20001560 PARAMETER Experiment Name: At_Drought_Soil_Dry_P Parameter: Post Timepoint (hr) Value: None
  misc_feature: MA Experiment 20001560 PARAMETER Experiment Name: At_Drought_Soil_Dry_P Parameter: Post-Treatment Value: None
  misc_feature: MA Experiment 20001560 PARAMETER Experiment Name: At_Drought_Soil_Dry_P Parameter: Timepoint (day) Value: 14
  misc_feature: MA Experiment 20001560 PARAMETER Experiment Name: At_Drought_Soil_Dry_P Parameter: Treatment Value: Drought vs. No Drought
  misc_feature: MA Experiment ID: 20001905 Result: Up-regulated in Transcription
  misc_feature: MA Experiment 20001905 PARAMETER Experiment Name: At_Drought_Reproduction_P Parameter: Age (day) Value: 40
  misc_feature: MA Experiment 20001905 PARAMETER Experiment Name: At_Drought_Reproduction_P Parameter: Organism Value: A. thaliana
  misc_feature: MA Experiment 20001905 PARAMETER Experiment Name: At_Drought_Reproduction_P Parameter: Plant Line Value: WS
  misc_feature: MA Experiment 20001905 PARAMETER Experiment Name: At_Drought_Reproduction_P Parameter: Timepoint (day) Value: 10
  misc_feature: MA Experiment 20001905 PARAMETER Experiment Name: At_Drought_Reproduction_P Parameter: Tissue Value: Rosettes
  misc_feature: MA Experiment 20001905 PARAMETER Experiment Name: At_Drought_Reproduction_P Parameter: Treatment Value: Drought vs. No Drought
ggagatatttcacatccttttctctcttatttgtttctgagattctcttcttgttgttgtagccatggacaacgaaggcataggtctttacccgcttcatcgttgcaaaaccattcacctggtgagacatgctcaagggattcataatgtggctggtgaaaaagatcacagtgcttactcttcggaggattactttgatgctcatcttacccctcttggttggcaacaggttgataatctaaggaaccatgttcgtgcagctcaactcttaaacaaggttgaacttgtcattgtttcccctatgcttagaactatacaaacagctgttggtgcttttggaggagaagaagatactaatggagcggatgcaacaccgttaatggtggctaatgctgggagcagcgatcgtcctgcgatttctagcttaaatagtcctcctttccttgctgttgagctttgcagggaaactatgggtgatcatccttgtgacaggcgaagaagcgtcactgagtacaaggctctctttcccgctattgatttctcaattattgaaaccgacaatgatgttctgtggaagccgagtccaagagagagccttgaagaagttgcagccagaggtgtagagttcatcaaatggatatggacaaggaaagagaaggagatcgcaattgtatctcacagtggcttcttgcacggtctcttgagttctttcgggaaggattgttgcgatgacctaaagaaagagttgtctatacatttgagcaactgtgagcttcgctcaatggttatcgtggatcgagggaacctggggactgactctgcagagaccacaaactatcctgggaaggttcctgaaggacttgataatcctagtggctaaatggctgaagagtaagagagagaattctgagatagtttttctttctaaaataaataaattacatgatgtttccattggactagaatctggcattttcagttatttgatgaacattagtgttggtatgtagccatgtaggttgactctgctgctacatgaatttattgtatgattgttattatcc

SEQ ID NO: 47187 - protein, 271 aa, Arabidopsis thaliana
  peptide (1)..(271): Ceres Seq. ID no. 13588511
  misc_feature (15)..(254): Pfam Name: Phosphoglycerate mutase family Pfam Description: Phosphoglycerate mutase family
  misc_feature (1)..(271): Homolog of NCBI NO: 15227803 NR Description: expressed protein [Arabidopsis thaliana]
MDNEGIGLYPLHRCKTIHLVRHAQGIHNVAGEKDHSAYSSEDYFDAHLTPLGWQQVDNLRNHVRAAQLLNKVELVIVSPMLRTIQTAVGAFGGEEDTNGADATPLMVANAGSSDRPAISSLNSPPFLAVELCRETMGDHPCDRRRSVTEYKALFPAIDFSIIETDNDVLWKPSPRESLEEVAARGVEFIKWIWTRKEKEIAIVSHSGFLHGLLSSFGKDCCDDLKKELSIHLSNCELRSMVIVDRGNLGTDSAETTNYPGKVPEGLDNPSG

SEQ ID NO: 47188 - protein, 192 aa, Arabidopsis thaliana
  peptide (1)..(192): Ceres Seq. ID no. 13588512
  misc_feature (1)..(175): Pfam Name: Phosphoglycerate mutase family Pfam Description: Phosphoglycerate mutase family
  misc_feature (1)..(192): Homolog of NCBI NO: 15227803 NR Description: expressed protein [Arabidopsis thaliana]
MLRTIQTAVGAFGGEEDTNGADATPLMVANAGSSDRPAISSLNSPPFLAVELCRETMGDHPCDRRRSVTEYKALFPAIDFSIIETDNDVLWKPSPRESLEEVAARGVEFIKWIWTRKEKEIAIVSHSGFLHGLLSSFGKDCCDDLKKELSIHLSNCELRSMVIVDRGNLGTDSAETTNYPGKVPEGLDNPSG

SEQ ID NO: 47189 - protein, 166 aa, Arabidopsis thaliana
  peptide (1)..(166): Ceres Seq. ID no. 13588513
  misc_feature (1)..(149): Pfam Name: Phosphoglycerate mutase family Pfam Description: Phosphoglycerate mutase family
  misc_feature (1)..(166): Homolog of NCBI NO: 15227803 NR Description: expressed protein [Arabidopsis thaliana]
MVANAGSSDRPAISSLNSPPFLAVELCRETMGDHPCDRRRSVTEYKALFPAIDFSIIETDNDVLWKPSPRESLEEVAARGVEFIKWIWTRKEKEIAIVSHSGFLHGLLSSFGKDCCDDLKKELSIHLSNCELRSMVIVDRGNLGTDSAETTNYPGKVPEGLDNPSG

SEQ ID NO: 47190 - DNA, 1509 bp, Arabidopsis thaliana; identical to SEQ ID NO: 36168
  misc_feature (1)..(1509): Ceres Seq. ID no. 12602368
  misc_feature: MA Experiment ID: 108434 Result: Down-regulated in Transcription
  misc_feature: MA Experiment 108434 PARAMETER Experiment Name: At_Root_Tips_cDNA_P Parameter: Tissue Value: Root Tips
  misc_feature: MA Experiment ID: 108464 Result: Up-regulated in Transcription
  misc_feature: MA Experiment 108464 PARAMETER Experiment Name: At_Germinating_Seeds_cDNA_P Parameter: Age (day) Value: 4 vs. 0
  misc_feature: MA Experiment 108464 PARAMETER Experiment Name: At_Germinating_Seeds_cDNA_P Parameter: Tissue Value: Germinating Seeds
  misc_feature: MA Experiment ID: 108574 Result: Up-regulated in Transcription
  misc_feature: MA Experiment 108574 PARAMETER Experiment Name: At_Wounding__cDNA_P Parameter: Timepoint (hr) Value: 1
  misc_feature: MA Experiment 108574 PARAMETER Experiment Name: At_Wounding__cDNA_P Parameter: Tissue Value: Aerial
  misc_feature: MA Experiment 108574 PARAMETER Experiment Name: At_Wounding__cDNA_P Parameter: Treatment Value: Wounding vs. No Wounding
  misc_feature: MA Experiment ID: 108595 Result: Up-regulated in Transcription
  misc_feature: MA Experiment 108595 PARAMETER Experiment Name: At_Ler-pi_Ovule_cDNA_P Parameter: Plant Line Value: null

SEQ ID NO: 47191 - protein, 341 aa, Arabidopsis thaliana; identical to SEQ ID NO: 36169
  peptide (1)..(341): Ceres Seq. ID no. 12602369
  misc_feature (135)..(239): Pfam Name: CRAL/TRIO domain Pfam Description: CRAL/TRIO domain
  misc_feature (135)..(239): Pfam Name: CRAL/TRIO domain Pfam Description: CRAL/TRIO domain
  misc_feature (1)..(341): Homolog of NCBI NO: 15238794 NR Description: putative protein; protein id: At5g47730.1
  misc_feature (1)..(341): Homolog of NCBI NO: 15238794 NR Description: putative protein; protein id: At5g47730.1

SEQ ID NO: 47192 - protein, 326 aa, Arabidopsis thaliana; identical to SEQ ID NO: 36170
  peptide (1)..(326): Ceres Seq. ID no. 12602370
  misc_feature (120)..(224): Pfam Name: CRAL/TRIO domain Pfam Description: CRAL/TRIO domain
  misc_feature (120)..(224): Pfam Name: CRAL/TRIO domain Pfam Description: CRAL/TRIO domain
  misc_feature (1)..(326): Homolog of NCBI NO: 15238794 NR Description: putative protein; protein id: At5g47730.1
  misc_feature (1)..(326): Homolog of NCBI NO: 15238794 NR Description: putative protein; protein id: At5g47730.1

SEQ ID NO: 47193 - protein, 286 aa, Arabidopsis thaliana; identical to SEQ ID NO: 36171
  peptide (1)..(286): Ceres Seq. ID no. 12602371
  misc_feature (80)..(184): Pfam Name: CRAL/TRIO domain Pfam Description: CRAL/TRIO domain
  misc_feature (80)..(184): Pfam Name: CRAL/TRIO domain Pfam Description: CRAL/TRIO domain
  misc_feature (1)..(286): Homolog of NCBI NO: 15238794 NR Description: putative protein; protein id: At5g47730.1
  misc_feature (1)..(286): Homolog of NCBI NO: 15238794 NR Description: putative protein; protein id: At5g47730.1

SEQ ID NO: 47194 - DNA, 6117 bp, Arabidopsis thaliana; identical to SEQ ID NO: 40078
  misc_feature (1)..(6117): Ceres Seq. ID no. 12639310
  misc_feature: MA Experiment ID: 108576 Result: Up-regulated in Transcription
  misc_feature: MA Experiment 108576 PARAMETER Experiment Name: At_42deg_Heat_cDNA_P Parameter: Temperature (deg C) Value: 42 vs. 22
  misc_feature: MA Experiment 108576 PARAMETER Experiment Name: At_42deg_Heat_cDNA_P Parameter: Timepoint (hr) Value: 1
  misc_feature: MA Experiment 108576 PARAMETER Experiment Name: At_42deg_Heat_cDNA_P Parameter: Tissue Value: Aerial
  misc_feature: MA Experiment ID: 108595 Result: Up-regulated in Transcription
  misc_feature: MA Experiment 108595 PARAMETER Experiment Name: At_Ler-pi_Ovule_cDNA_P Parameter: Plant Line Value: null
  misc_feature: MA Experiment ID: 20000171 Result: Down-regulated in Transcription
  misc_feature: MA Experiment 20000171 PARAMETER Experiment Name: At_42deg_Heat_P Parameter: Age (day) Value: 14
  misc_feature: MA Experiment 20000171 PARAMETER Experiment Name: At_42deg_Heat_P Parameter: Organism Value: A. thaliana
  misc_feature: MA Experiment 20000171 PARAMETER Experiment Name: At_42deg_Heat_P Parameter: Plant Line Value: WS
  misc_feature: MA Experiment 20000171 PARAMETER Experiment Name: At_42deg_Heat_P Parameter: Temperature (deg C) Value: 42 vs. 22
  misc_feature: MA Experiment 20000171 PARAMETER Experiment Name: At_42deg_Heat_P Parameter: Timepoint (hr) Value: 1
  misc_feature: MA Experiment 20000171 PARAMETER Experiment Name: At_42deg_Heat_P Parameter: Tissue Value: Aerial
  misc_feature: MA Experiment ID: 20000173 Result: Down-regulated in Transcription
  misc_feature: MA Experiment 20000173 PARAMETER Experiment Name: At_42deg_Heat_P Parameter: Age (day) Value: 14
  misc_feature: MA Experiment 20000173 PARAMETER Experiment Name: At_42deg_Heat_P Parameter: Organism Value: A. thaliana
  misc_feature: MA Experiment 20000173 PARAMETER Experiment Name: At_42deg_Heat_P Parameter: Plant Line Value: WS
  misc_feature: MA Experiment 20000173 PARAMETER Experiment Name: At_42deg_Heat_P Parameter: Temperature (deg C) Value: 42 vs. 22
  misc_feature: MA Experiment 20000173 PARAMETER Experiment Name: At_42deg_Heat_P Parameter: Timepoint (hr) Value: 6
  misc_feature: MA Experiment 20000173 PARAMETER Experiment Name: At_42deg_Heat_P Parameter: Tissue Value: Aerial
  misc_feature: MA Experiment ID: 20000182 Result: Up-regulated in Transcription
  misc_feature: MA Experiment 20000182 PARAMETER Experiment Name: At_2mM_SA_P Parameter: Age (day) Value: 14
  misc_feature: MA Experiment 20000182 PARAMETER Experiment Name: At_2mM_SA_P Parameter: Organism Value: A. thaliana
  misc_feature: MA Experiment 20000182 PARAMETER Experiment Name: At_2mM_SA_P Parameter: Plant Line Value: WS
  misc_feature: MA Experiment 20000182 PARAMETER Experiment Name: At_2mM_SA_P Parameter: Timepoint (hr) Value: 6
  misc_feature: MA Experiment 20000182 PARAMETER Experiment Name: At_2mM_SA_P Parameter: Tissue Value: Aerial
  misc_feature: MA Experiment 20000182 PARAMETER Experiment Name: At_2mM_SA_P Parameter: Treatment Value: 2mM SA vs. No Treatment
  misc_feature: MA Experiment ID: 20000184 Result: Down-regulated in Transcription
  misc_feature: MA Experiment 20000184 PARAMETER Experiment Name: At_Shoots__P Parameter: Age (day) Value: 7
  misc_feature: MA Experiment 20000184 PARAMETER Experiment Name: At_Shoots__P Parameter: Tissue Value: Shoots vs. Whole Plant
  misc_feature: MA Experiment ID: 20000234 Result: Down-regulated in Transcription
  misc_feature: MA Experiment 20000234 PARAMETER Experiment Name: At_Siliques_P Parameter: Age (day) Value: 21
  misc_feature: MA Experiment 20000234 PARAMETER Experiment Name: At_Siliques_P Parameter: Organism Value: A. thaliana
  misc_feature: MA Experiment 20000234 PARAMETER Experiment Name: At_Siliques_P Parameter: Plant Line Value: WS
  misc_feature: MA Experiment 20000234 PARAMETER Experiment Name: At_Siliques_P Parameter: Tissue Value: Less Than 5mm Siliques vs. Whole Plant
  misc_feature: MA Experiment ID: 20000235 Result: Down-regulated in Transcription
  misc_feature: MA Experiment 20000235 PARAMETER Experiment Name: At_Siliques_P Parameter: Age (day) Value: 21
  misc_feature: MA Experiment 20000235 PARAMETER Experiment Name: At_Siliques_P Parameter: Organism Value: A. thaliana
  misc_feature: MA Experiment 20000235 PARAMETER Experiment Name: At_Siliques_P Parameter: Plant Line Value: WS
  misc_feature: MA Experiment 20000235 PARAMETER Experiment Name: At_Siliques_P Parameter: Tissue Value: 5-10mm Siliques vs. Whole Plant
  misc_feature: MA Experiment ID: 20000264 Result: Down-regulated in Transcription
  misc_feature: MA Experiment 20000264 PARAMETER Experiment Name: At_Open_Flower_P Parameter: Age (day) Value: 21
  misc_feature: MA Experiment 20000264 PARAMETER Experiment Name: At_Open_Flower_P Parameter: Plant Line Value: WS
  misc_feature: MA Experiment 20000264 PARAMETER Experiment Name: At_Open_Flower_P Parameter: Tissue Value: Open Flower vs. Whole Plant
  misc_feature: MA Experiment ID: 20000265 Result: Down-regulated in Transcription
  misc_feature: MA Experiment 20000265 PARAMETER Experiment Name: At_Open_Flower_P Parameter: Age (day) Value: 21
  misc_feature: MA Experiment 20000265 PARAMETER Experiment Name: At_Open_Flower_P Parameter: Plant Line Value: WS
  misc_feature: MA Experiment 20000265 PARAMETER Experiment Name: At_Open_Flower_P Parameter: Tissue Value: Closed Flower vs. Whole Plant
  misc_feature: MA Experiment ID: 20000438 Result: Down-regulated in Transcription
  misc_feature: MA Experiment 20000438 PARAMETER Experiment Name: At_Shoots__P Parameter: Age (day) Value: 14
  misc_feature: MA Experiment 20000438 PARAMETER Experiment Name: At_Shoots__P Parameter: Tissue Value: Shoots vs. Whole Plant
  misc_feature: MA Experiment ID: 20000794 Result: Down-regulated in Transcription
  misc_feature: MA Experiment 20000794 PARAMETER Experiment Name: At_Petals_P Parameter: Age (day) Value: 23-25 days
  misc_feature: MA Experiment 20000794 PARAMETER Experiment Name: At_Petals_P Parameter: Plant Line Value: WS
  misc_feature: MA Experiment 20000794 PARAMETER Experiment Name: At_Petals_P Parameter: Tissue Value: Petals vs. Whole plant
  misc_feature: MA Experiment ID: 20001451 Result: Down-regulated in Transcription
  misc_feature: MA Experiment 20001451 PARAMETER Experiment Name: At_Far-red-induction_P Parameter: Age (day) Value: 7
  misc_feature: MA Experiment 20001451 PARAMETER Experiment Name: At_Far-red-induction_P Parameter: Light Value: Far-red vs. White
  misc_feature: MA Experiment 20001451 PARAMETER Experiment Name: At_Far-red-induction_P Parameter: Organism Value: A. thaliana
  misc_feature: MA Experiment 20001451 PARAMETER Experiment Name: At_Far-red-induction_P Parameter: Plant Line Value: Columbia
  misc_feature: MA Experiment 20001451 PARAMETER Experiment Name: At_Far-red-induction_P Parameter: Timepoint (hr) Value: 24
  misc_feature: MA Experiment 20001451 PARAMETER Experiment Name: At_Far-red-induction_P Parameter: Tissue Value: Whole Plant

SEQ ID NO: 47195 - protein, 1916 aa, Arabidopsis thaliana; identical to SEQ ID NO: 40079
  peptide (1)..(1916): Ceres Seq. ID no. 12639311
  misc_feature (1420)..(1502): Pfam Name: C2 domain Pfam Description: C2 domain
  misc_feature (1420)..(1502): Pfam Name: C2 domain Pfam Description: C2 domain
  misc_feature (438)..(873): Homolog of NCBI NO: 15223228 NR Description: unknown protein
  misc_feature (154)..(290): Homolog of NCBI NO: 30686389 NR Description: expressed protein [Arabidopsis thaliana]
  misc_feature (154)..(290): Homolog of NCBI NO: 25408371 NR Description: hypothetical protein At2g35330 [imported] -
  misc_feature (547)..(879): Homolog of NCBI NO: 30686389 NR Description: expressed protein [Arabidopsis thaliana]
  misc_feature (547)..(879): Homolog of NCBI NO: 25408371 NR Description: hypothetical protein At2g35330 [imported] -
  misc_feature (438)..(873): Homolog of NCBI NO: 15223228 NR Description: unknown protein
  misc_feature (154)..(290): Homolog of NCBI NO: 25408371 NR Description: hypothetical protein At2g35330 [imported] -
  misc_feature (547)..(879): Homolog of NCBI NO: 25408371 NR Description: hypothetical protein At2g35330 [imported] -
  misc_feature (884)..(1905): Homolog of NCBI NO: 15240629 NR Description: putative protein
  misc_feature (884)..(1896): Homolog of NCBI NO: 38344486 NR Description: OSJNBa0022H21.21 [Oryza sativa (japonica
  misc_feature (60)..(811): Homolog of NCBI NO: 15236231 NR Description: putative protein; protein id: At4g03000.1
  misc_feature (547)..(879): Homolog of NCBI NO: 22531056 NR Description: unknown protein [Arabidopsis thaliana]
  misc_feature (154)..(290): Homolog of NCBI NO: 22531056 NR Description: unknown protein [Arabidopsis thaliana]
  misc_feature (547)..(879): Homolog of NCBI NO: 30686389 NR Description: expressed protein [Arabidopsis thaliana]
  misc_feature (154)..(290): Homolog of NCBI NO: 30686389 NR Description: expressed protein [Arabidopsis thaliana]
  misc_feature (154)..(290): Homolog of NCBI NO: 22531056 NR Description: unknown protein [Arabidopsis thaliana]
  misc_feature (547)..(879): Homolog of NCBI NO: 22531056 NR Description: unknown protein [Arabidopsis thaliana]
  misc_feature (60)..(811): Homolog of NCBI NO: 15236231 NR Description: putative protein; protein id: At4g03000.1
  misc_feature (884)..(1896): Homolog of NCBI NO: 38344486 NR Description: OSJNBa0022H21.21 [Oryza sativa (japonica
  misc_feature (884)..(1905): Homolog of NCBI NO: 15240629 NR Description: putative protein

SEQ ID NO: 47196 - protein, 1859 aa, Arabidopsis thaliana; identical to SEQ ID NO: 40080
  peptide (1)..(1859): Ceres Seq. ID no. 12639312
  misc_feature (1363)..(1445): Pfam Name: C2 domain Pfam Description: C2 domain
  misc_feature (1363)..(1445): Pfam Name: C2 domain Pfam Description: C2 domain
  misc_feature (381)..(816): Homolog of NCBI NO: 15223228 NR Description: unknown protein
  misc_feature (97)..(233): Homolog of NCBI NO: 30686389 NR Description: expressed protein [Arabidopsis thaliana]
  misc_feature (97)..(233): Homolog of NCBI NO: 25408371 NR Description: hypothetical protein At2g35330 [imported] -
  misc_feature (490)..(822): Homolog of NCBI NO: 30686389 NR Description: expressed protein [Arabidopsis thaliana]
  misc_feature (490)..(822): Homolog of NCBI NO: 25408371 NR Description: hypothetical protein At2g35330 [imported] -
  misc_feature (381)..(816): Homolog of NCBI NO: 15223228 NR Description: unknown protein
  misc_feature (97)..(233): Homolog of NCBI NO: 25408371 NR Description: hypothetical protein At2g35330 [imported] -
  misc_feature (490)..(822): Homolog of NCBI NO: 25408371 NR Description: hypothetical protein At2g35330 [imported] -
  misc_feature (827)..(1848): Homolog of NCBI NO: 15240629 NR Description: putative protein
  misc_feature (827)..(1839): Homolog of NCBI NO: 38344486 NR Description: OSJNBa0022H21.21 [Oryza sativa (japonica
  misc_feature (3)..(754): Homolog of NCBI NO: 15236231 NR Description: putative protein; protein id: At4g03000.1
  misc_feature (490)..(822): Homolog of NCBI NO: 22531056 NR Description: unknown protein [Arabidopsis thaliana]
  misc_feature (97)..(233): Homolog of NCBI NO: 22531056 NR Description: unknown protein [Arabidopsis thaliana]
  misc_feature (490)..(822): Homolog of NCBI NO: 30686389 NR Description: expressed protein [Arabidopsis thaliana]
  misc_feature (97)..(233): Homolog of NCBI NO: 30686389 NR Description: expressed protein [Arabidopsis thaliana]
  misc_feature (97)..(233): Homolog of NCBI NO: 22531056 NR Description: unknown protein [Arabidopsis thaliana]
  misc_feature (490)..(822): Homolog of NCBI NO: 22531056 NR Description: unknown protein [Arabidopsis thaliana]
  misc_feature (3)..(754): Homolog of NCBI NO: 15236231 NR Description: putative protein; protein id: At4g03000.1
  misc_feature (827)..(1839): Homolog of NCBI NO: 38344486 NR Description: OSJNBa0022H21.21 [Oryza sativa (japonica
  misc_feature (827)..(1848): Homolog of NCBI NO: 15240629 NR Description: putative protein

SEQ ID NO: 47197 - protein, 1850 aa, Arabidopsis thaliana; identical to SEQ ID NO: 40081
  peptide (1)..(1850): Ceres Seq. ID no. 12639313
  misc_feature (1354)..(1436): Pfam Name: C2 domain Pfam Description: C2 domain
  misc_feature (1354)..(1436): Pfam Name: C2 domain Pfam Description: C2 domain
  misc_feature (372)..(807): Homolog of NCBI NO: 15223228 NR Description: unknown protein
  misc_feature (88)..(224): Homolog of NCBI NO: 30686389 NR Description: expressed protein [Arabidopsis thaliana]
  misc_feature (88)..(224): Homolog of NCBI NO: 25408371 NR Description: hypothetical protein At2g35330 [imported] -
  misc_feature (481)..(813): Homolog of NCBI NO: 30686389 NR Description: expressed protein [Arabidopsis thaliana]
  misc_feature (481)..(813): Homolog of NCBI NO: 25408371 NR Description: hypothetical protein At2g35330 [imported] -
  misc_feature (372)..(807): Homolog of NCBI NO: 15223228 NR Description: unknown protein
  misc_feature (88)..(224): Homolog of NCBI NO: 25408371 NR Description: hypothetical protein At2g35330 [imported] -
  misc_feature (481)..(813): Homolog of NCBI NO: 25408371 NR Description: hypothetical protein At2g35330 [imported] -
  misc_feature (818)..(1839): Homolog of NCBI NO: 15240629 NR Description: putative protein
  misc_feature (818)..(1830): Homolog of NCBI NO: 38344486 NR Description: OSJNBa0022H21.21 [Oryza sativa (japonica
  misc_feature (1)..(745): Homolog of NCBI NO: 15236231 NR Description: putative protein; protein id: At4g03000.1
  misc_feature (481)..(813): Homolog of NCBI NO: 22531056 NR Description: unknown protein [Arabidopsis thaliana]
  misc_feature (88)..(224): Homolog of NCBI NO: 22531056 NR Description: unknown protein [Arabidopsis thaliana]
  misc_feature (481)..(813): Homolog of NCBI NO: 30686389 NR Description: expressed protein [Arabidopsis thaliana]
  misc_feature (88)..(224): Homolog of NCBI NO: 30686389 NR Description: expressed protein [Arabidopsis thaliana]
  misc_feature (88)..(224): Homolog of NCBI NO: 22531056 NR Description: unknown protein [Arabidopsis thaliana]
  misc_feature (481)..(813): Homolog of NCBI NO: 22531056 NR Description: unknown protein [Arabidopsis thaliana]
  misc_feature (1)..(745): Homolog of NCBI NO: 15236231 NR Description: putative protein; protein id: At4g03000.1
  misc_feature (818)..(1830): Homolog of NCBI NO: 38344486 NR Description: OSJNBa0022H21.21 [Oryza sativa (japonica
  misc_feature (818)..(1839): Homolog of NCBI NO: 15240629 NR Description: putative protein

SEQ ID NO: 47198 - DNA, 2070 bp, Arabidopsis thaliana; identical to SEQ ID NO: 44648
  misc_feature (1)..(2070): Ceres Seq. ID no. 12455389
  misc_feature: MA Experiment ID: 20000794 Result: Down-regulated in Transcription
  misc_feature: MA Experiment 20000794 PARAMETER Experiment Name: At_Petals_P Parameter: Age (day) Value: 23-25 days
  misc_feature: MA Experiment 20000794 PARAMETER Experiment Name: At_Petals_P Parameter: Plant Line Value: WS
  misc_feature: MA Experiment 20000794 PARAMETER Experiment Name: At_Petals_P Parameter: Tissue Value: Petals vs. Whole plant

SEQ ID NO: 47199 - protein, 525 aa, Arabidopsis thaliana; identical to SEQ ID NO: 44649
  peptide (1)..(525): Ceres Seq. ID no. 12455390
  misc_feature (3)..(62): Pfam Name: U-box domain Pfam Description: U-box domain
  misc_feature (3)..(62): Pfam Name: U-box domain Pfam Description: U-box domain
  misc_feature (3)..(62): Pfam Name: U-box domain Pfam Description: U-box domain
  misc_feature (3)..(509): Homolog of NCBI NO: 17647459 NR Description: GTP-binding-protein CG5519-PA [Drosophila
  misc_feature (1)..(33): Homolog of NCBI NO: 25406791 NR Description: hypothetical protein [imported] - Arabidopsis
  misc_feature (438)..(525): Homolog of NCBI NO: 25406791 NR Description: hypothetical protein [imported] - Arabidopsis
  misc_feature (107)..(398): Homolog of NCBI NO: 25406791 NR Description: hypothetical protein [imported] - Arabidopsis
  misc_feature (311)..(503): Homolog of NCBI NO: 25408261 NR Description: probable PRP19-like spliceosomal protein
  misc_feature (3)..(509): Homolog of NCBI NO: 17647459 NR Description: GTP-binding-protein CG5519-PA [Drosophila
  misc_feature (438)..(525): Homolog of NCBI NO: 25406791 NR Description: hypothetical protein [imported] - Arabidopsis
  misc_feature (311)..(503): Homolog of NCBI NO: 25408261 NR Description: probable PRP19-like spliceosomal protein
  misc_feature (107)..(398): Homolog of NCBI NO: 25406791 NR Description: hypothetical protein [imported] - Arabidopsis
  misc_feature (438)..(525): Homolog of NCBI NO: 25406791 NR Description: hypothetical protein [imported] - Arabidopsis
  misc_feature (1)..(33): Homolog of NCBI NO: 25406791 NR Description: hypothetical protein [imported] - Arabidopsis
  misc_feature (3)..(509): Homolog of NCBI NO: 17647459 NR Description: GTP-binding-protein CG5519-PA [Drosophila
  misc_feature (1)..(503): Homolog of NCBI NO: 30685651 NR Description: transducin / WD-40 repeat protein family
  misc_feature (1)..(503): Homolog of NCBI NO: 30685653 NR Description: transducin / WD-40 repeat protein family
  misc_feature (1)..(525): Homolog of NCBI NO: 18390401 NR Description: putative pre-mRNA splicing factor PRP19
  misc_feature (1)..(519): Homolog of NCBI NO: 37535206 NR Description: putative WD-repeat containing protein
  misc_feature (1)..(416): Homolog of NCBI NO: 25408261 NR Description: probable PRP19-like spliceosomal protein
  misc_feature (1)..(503): Homolog of NCBI NO: 30685651 NR Description: transducin / WD-40 repeat protein family
  misc_feature (1)..(503): Homolog of NCBI NO: 30685653 NR Description: transducin / WD-40 repeat protein family
  misc_feature (1)..(525): Homolog of NCBI NO: 18390401 NR Description: putative pre-mRNA splicing factor PRP19
  misc_feature (1)..(519): Homolog of NCBI NO: 37535206 NR Description: putative WD-repeat containing protein
  misc_feature (1)..(416): Homolog of NCBI NO: 25408261 NR Description: probable PRP19-like spliceosomal protein
  misc_feature (311)..(503): Homolog of NCBI NO: 25408261 NR Description: probable PRP19-like spliceosomal protein
  misc_feature (107)..(398): Homolog of NCBI NO: 25406791 NR Description: hypothetical protein [imported] - Arabidopsis
  misc_feature (1)..(33): Homolog of NCBI NO: 25406791 NR Description: hypothetical protein [imported] - Arabidopsis
  misc_feature (1)..(416): Homolog of NCBI NO: 25408261 NR Description: probable PRP19-like spliceosomal protein
  misc_feature (1)..(519): Homolog of NCBI NO: 37535206 NR Description: putative WD-repeat containing protein
  misc_feature (1)..(525): Homolog of NCBI NO: 18390401 NR Description: putative pre-mRNA splicing factor PRP19
  misc_feature (1)..(503): Homolog of NCBI NO: 30685653 NR Description: transducin / WD-40 repeat protein family
  misc_feature (1)..(503): Homolog of NCBI NO: 30685651 NR Description: transducin / WD-40 repeat protein family

SEQ ID NO: 47200 - protein, 442 aa, Arabidopsis thaliana; identical to SEQ ID NO: 44650
  peptide (1)..(442): Ceres Seq. ID no. 12455391
  misc_feature (1)..(426): Homolog of NCBI NO: 28278498 NR Description: Similar to nuclear matrix protein NMP200 related
  misc_feature (1)..(426): Homolog of NCBI NO: 17647459 NR Description: GTP-binding-protein CG5519-PA [Drosophila
  misc_feature (355)..(442): Homolog of NCBI NO: 25406791 NR Description: hypothetical protein [imported] - Arabidopsis
  misc_feature (24)..(315): Homolog of NCBI NO: 25406791 NR Description: hypothetical protein [imported] - Arabidopsis
  misc_feature (228)..(420): Homolog of NCBI NO: 25408261 NR Description: probable PRP19-like spliceosomal protein
  misc_feature (1)..(333): Homolog of NCBI NO: 25408261 NR Description: probable PRP19-like spliceosomal protein
  misc_feature (1)..(436): Homolog of NCBI NO: 37535206 NR Description: putative WD-repeat containing protein
  misc_feature (1)..(442): Homolog of NCBI NO: 18390401 NR Description: putative pre-mRNA splicing factor PRP19
  misc_feature (1)..(420): Homolog of NCBI NO: 30685653 NR Description: transducin / WD-40 repeat protein family
  misc_feature (1)..(420): Homolog of NCBI NO: 30685651 NR Description: transducin / WD-40 repeat protein family
  misc_feature (1)..(426): Homolog of NCBI NO: 28278498 NR Description: Similar to nuclear matrix protein NMP200 related
  misc_feature (1)..(426): Homolog of NCBI NO: 17647459 NR Description: GTP-binding-protein CG5519-PA [Drosophila
  misc_feature (355)..(442): Homolog of NCBI NO: 25406791 NR Description: hypothetical protein [imported] - Arabidopsis
  misc_feature (24)..(315): Homolog of NCBI NO: 25406791 NR Description: hypothetical protein [imported] - Arabidopsis
  misc_feature (228)..(420): Homolog of NCBI NO: 25408261 NR Description: probable PRP19-like spliceosomal protein
  misc_feature (1)..(333): Homolog of NCBI NO: 25408261 NR Description: probable PRP19-like spliceosomal protein
  misc_feature (1)..(436): Homolog of NCBI NO: 37535206 NR Description: putative WD-repeat containing protein
  misc_feature (1)..(442): Homolog of NCBI NO: 18390401 NR Description: putative pre-mRNA splicing factor PRP19
  misc_feature (1)..(420): Homolog of NCBI NO: 30685653 NR Description: transducin / WD-40 repeat protein family
  misc_feature (1)..(420): Homolog of NCBI NO: 30685651 NR Description: transducin / WD-40 repeat protein family
  misc_feature (1)..(426): Homolog of NCBI NO: 28278498 NR Description: Similar to nuclear matrix protein NMP200 related
  misc_feature (1)..(426): Homolog of NCBI NO: 17647459 NR Description: GTP-binding-protein CG5519-PA [Drosophila
  misc_feature (355)..(442): Homolog of NCBI NO: 25406791 NR Description: hypothetical protein [imported] - Arabidopsis
  misc_feature (24)..(315): Homolog of NCBI NO: 25406791 NR Description: hypothetical protein [imported] - Arabidopsis
  misc_feature (228)..(420): Homolog of NCBI NO: 25408261 NR Description: probable PRP19-like spliceosomal protein
  misc_feature (1)..(333): Homolog of NCBI NO: 25408261 NR Description: probable PRP19-like spliceosomal protein
  misc_feature (1)..(436): Homolog of NCBI NO: 37535206 NR Description: putative WD-repeat containing protein
  misc_feature (1)..(442): Homolog of NCBI NO: 18390401 NR Description: putative pre-mRNA splicing factor PRP19
  misc_feature (1)..(420): Homolog of NCBI NO: 30685653 NR Description: transducin / WD-40 repeat protein family
  misc_feature (1)..(420): Homolog of NCBI NO: 30685651 NR Description: transducin / WD-40 repeat protein family

SEQ ID NO: 47201 - protein, 298 aa, Arabidopsis thaliana; identical to SEQ ID NO: 44651
  peptide (1)..(298): Ceres Seq. ID no. 12455392
  misc_feature (1)..(282): Homolog of NCBI NO: 28278498 NR Description: Similar to nuclear matrix protein NMP200 related
  misc_feature (1)..(282): Homolog of NCBI NO: 17647459 NR Description: GTP-binding-protein CG5519-PA [Drosophila
  misc_feature (211)..(298): Homolog of NCBI NO: 25406791 NR Description: hypothetical protein [imported] - Arabidopsis
  misc_feature (1)..(171): Homolog of NCBI NO: 25406791 NR Description: hypothetical protein [imported] - Arabidopsis
  misc_feature (84)..(276): Homolog of NCBI NO: 25408261 NR Description: probable PRP19-like spliceosomal protein
  misc_feature (1)..(189): Homolog of NCBI NO: 25408261 NR Description: probable PRP19-like spliceosomal protein
  misc_feature (1)..(292): Homolog of NCBI NO: 37535206 NR Description: putative WD-repeat containing protein
  misc_feature (1)..(298): Homolog of NCBI NO: 18390401 NR Description: putative pre-mRNA splicing factor PRP19
  misc_feature (1)..(276): Homolog of NCBI NO: 30685653 NR Description: transducin / WD-40 repeat protein family
  misc_feature (1)..(276): Homolog of NCBI NO: 30685651 NR Description: transducin / WD-40 repeat protein family
  misc_feature (1)..(282): Homolog of NCBI NO: 28278498 NR Description: Similar to nuclear matrix protein NMP200 related
  misc_feature (1)..(282): Homolog of NCBI NO: 17647459 NR Description: GTP-binding-protein CG5519-PA [Drosophila
  misc_feature (211)..(298): Homolog of NCBI NO: 25406791 NR Description: hypothetical protein [imported] - Arabidopsis
  misc_feature (1)..(171): Homolog of NCBI NO: 25406791 NR Description: hypothetical protein [imported] - Arabidopsis
  misc_feature (84)..(276): Homolog of NCBI NO: 25408261 NR Description: probable PRP19-like spliceosomal protein
  misc_feature (1)..(189): Homolog of NCBI NO: 25408261 NR Description: probable PRP19-like spliceosomal protein
  misc_feature (1)..(292): Homolog of NCBI NO: 37535206 NR Description: putative WD-repeat containing protein
  misc_feature (1)..(298): Homolog of NCBI NO: 18390401 NR Description: putative pre-mRNA splicing factor PRP19
  misc_feature (1)..(276): Homolog of NCBI NO: 30685653 NR Description: transducin / WD-40 repeat protein family
  misc_feature (1)..(276): Homolog of NCBI NO: 30685651 NR Description: transducin / WD-40 repeat protein family
  misc_feature (1)..(282): Homolog of NCBI NO: 28278498 NR Description: Similar to nuclear matrix protein NMP200 related
  misc_feature (1)..(282): Homolog of NCBI NO: 17647459 NR Description: GTP-binding-protein CG5519-PA [Drosophila
  misc_feature (211)..(298): Homolog of NCBI NO: 25406791 NR Description: hypothetical protein [imported] - Arabidopsis
  misc_feature (1)..(171): Homolog of NCBI NO: 25406791 NR Description: hypothetical protein [imported] - Arabidopsis
  misc_feature (84)..(276): Homolog of NCBI NO: 25408261 NR Description: probable PRP19-like spliceosomal protein
  misc_feature (1)..(189): Homolog of NCBI NO: 25408261 NR Description: probable PRP19-like spliceosomal protein
  misc_feature (1)..(292): Homolog of NCBI NO: 37535206 NR Description: putative WD-repeat containing protein
  misc_feature (1)..(298): Homolog of NCBI NO: 18390401 NR Description: putative pre-mRNA splicing factor PRP19
  misc_feature (1)..(276): Homolog of NCBI NO: 30685653 NR Description: transducin / WD-40 repeat protein family
  misc_feature (1)..(276): Homolog of NCBI NO: 30685651 NR Description: transducin / WD-40 repeat protein family

SEQ ID NO: 47202 - DNA, 1071 bp, Arabidopsis thaliana
  misc_feature (1)..(1071): Ceres Seq. ID no. 12591607
  misc_feature: MA Experiment ID: 20000180 Result: Down-regulated in Transcription
  misc_feature: MA Experiment 20000180 PARAMETER Experiment Name: At_Germinating_Seeds_P Parameter: Age (hr) Value: 24 vs. 0
  misc_feature: MA Experiment 20000180 PARAMETER Experiment Name: At_Germinating_Seeds_P Parameter: Tissue Value: Germinating Seeds
  misc_feature: MA Experiment ID: 20000460 Result: Up-regulated in Transcription
  misc_feature: MA Experiment 20000460 PARAMETER Experiment Name: At_10percent_PEG_P Parameter: Age (day) Value: 12
  misc_feature: MA Experiment 20000460 PARAMETER Experiment Name: At_10percent_PEG_P Parameter: Organism Value: A. thaliana
  misc_feature: MA Experiment 20000460 PARAMETER Experiment Name: At_10percent_PEG_P Parameter: Plant Line Value: WS
  misc_feature: MA Experiment 20000460 PARAMETER Experiment Name: At_10percent_PEG_P Parameter: Timepoint (day) Value: 12
  misc_feature: MA Experiment 20000460 PARAMETER Experiment Name: At_10percent_PEG_P Parameter: Tissue Value: Whole Plant
  misc_feature: MA Experiment 20000460 PARAMETER Experiment Name: At_10percent_PEG_P Parameter: Treatment Value: 10percent PEG vs. No Treatment
atggggaaaactaacttggcacctggttttcggtttcatccgactgatgttgaacttgtgagatactacttgaagaggaaagttatgggaaaaaagttccaagttgatgccattgctgaggtcgacatttacaagttcgaacctcctgatttacccgacaaatcatgtctagggactggagatcttaagtggtacttcttctgtccaagagaaaagaagtatcccaaaggcggtaaggcaaaccgctctactgaatgtggttactggaagaccacagggagagacagagatgtttcttataatgacgaagtcactgggaagataagaactctgatttatcactacgggaaaatacctcgcggtgatcggactgattgggtcatacatgaatatagacttgaagacaaagtactggctcaaaagaatgttcctcaggatacttatgtgctttgcgttctctttaagaaaaatggacttggaccaagacatggatctcaatatggtgctccatttaaggaagaggattggagtgataaggaagaagaatatactcagaatcatcttgtagctggtcctagtaaagaaaccagtctagctgctaaggcctcacactcgtacgctcctaaggatggtttgacaggagtgatctcagaatcttgcgtctctgatgtgccgccactaactgccacagtgcttccacctctaacaagtgatgttatagcttacaatcccttttcttcttcacctcttcttgaggttcctcaagtatctctcgatggtggcgagttaaattcgatgcttgatctcttttctgttgacaatgacgactgtttacttttcgacgatttcgactaccataatgaggtaagacatcctgatggttttgtaaacaaggaagctccggtgttcttaggagatggcaatttcagtggaatgtttgacctgagcaatgaccaagtcgtagagctacaggatctgatacagtcacccactcctcatcctccttctcctccagctcaagctagtattcctgatgactcaagaagcaacggtcagactaaggacgattaa

SEQ ID NO: 47203 - protein, 356 aa, Arabidopsis thaliana
  peptide (1)..(356): Ceres Seq. ID no. 12591608
  misc_feature (6)..(134): Pfam Name: No apical meristem (NAM) protein Pfam Description: No apical meristem (NAM) protein
  misc_feature (5)..(183): Homolog of NCBI NO: 6456751 NR Description: NAC2 [Arabidopsis thaliana]
  misc_feature (6)..(180): Homolog of NCBI NO: 21105746 NR Description: nam-like protein 9 [Petunia x hybrida]
  misc_feature (4)..(183): Homolog of NCBI NO: 15237699 NR Description: putative protein
  misc_feature (4)..(327): Homolog of NCBI NO: 18398895 NR Description: expressed protein; protein id: At3g10500.1
  misc_feature (4)..(327): Homolog of NCBI NO: 8567779 NR Description: NAC, putative [Arabidopsis thaliana]
  misc_feature (4)..(327): Homolog of NCBI NO: 21593389 NR Description: NAC, putative [Arabidopsis thaliana]
  misc_feature (1)..(226): Homolog of NCBI NO: 7716952 NR Description: NAC1 [Medicago truncatula]
  misc_feature (1)..(269): Homolog of NCBI NO: 21105732 NR Description: nam-like protein 2 [Petunia x hybrida]
  misc_feature (1)..(329): Homolog of NCBI NO: 15242390 NR Description: putative protein; protein id: At5g09330.1
  misc_feature (1)..(356): Homolog of NCBI NO: 15237609 NR Description: putative protein; protein id: At5g64060.1
MGKTNLAPGFRFHPTDVELVRYYLKRKVMGKKFQVDAIAEVDIYKFEPPDLPDKSCLGTGDLKWYFFCPREKKYPKGGKANRSTECGYWKTTGRDRDVSYNDEVTGKIRTLIYHYGKIPRGDRTDWVIHEYRLEDKVLAQKNVPQDTYVLCVLFKKNGLGPRHGSQYGAPFKEEDWSDKEEEYTQNHLVAGPSKETSLAAKASHSYAPKDGLTGVISESCVSDVPPLTATVLPPLTSDVIAYNPFSSSPLLEVPQVSLDGGELNSMLDLFSVDNDDCLLFDDFDYHNEVRHPDGFVNKEAPVFLGDGNFSGMFDLSNDQVVELQDLIQSPTPHPPSPPAQASIPDDSRSNGQTKDD

SEQ ID NO: 47204 - protein, 328 aa, Arabidopsis thaliana
  peptide (1)..(328): Ceres Seq. ID no. 12591609
  misc_feature (1)..(106): Pfam Name: No apical meristem (NAM) protein Pfam Description: No apical meristem (NAM) protein
  misc_feature (1)..(155): Homolog of NCBI NO: 6456751 NR Description: NAC2 [Arabidopsis thaliana]
  misc_feature (1)..(152): Homolog of NCBI NO: 21105746 NR Description: nam-like protein 9 [Petunia x hybrida]
  misc_feature (1)..(155): Homolog of NCBI NO: 15237699 NR Description: putative protein
  misc_feature (1)..(299): Homolog of NCBI NO: 18398895 NR Description: expressed protein; protein id: At3g10500.1
  misc_feature (1)..(299): Homolog of NCBI NO: 8567779 NR Description: NAC, putative [Arabidopsis thaliana]
  misc_feature (1)..(299): Homolog of NCBI NO: 21593389 NR Description: NAC, putative [Arabidopsis thaliana]
  misc_feature (1)..(198): Homolog of NCBI NO: 7716952 NR Description: NAC1 [Medicago truncatula]
  misc_feature (1)..(241): Homolog of NCBI NO: 21105732 NR Description: nam-like protein 2 [Petunia x hybrida]
  misc_feature (1)..(301): Homolog of NCBI NO: 15242390 NR Description: putative protein; protein id: At5g09330.1
  misc_feature (1)..(328): Homolog of NCBI NO: 15237609 NR Description: putative protein; protein id: At5g64060.1
MGKKFQVDAIAEVDIYKFEPPDLPDKSCLGTGDLKWYFFCPREKKYPKGGKANRSTECGYWKTTGRDRDVSYNDEVTGKIRTLIYHYGKIPRGDRTDWVIHEYRLEDKVLAQKNVPQDTYVLCVLFKKNGLGPRHGSQYGAPFKEEDWSDKEEEYTQNHLVAGPSKETSLAAKASHSYAPKDGLTGVISESCVSDVPPLTATVLPPLTSDVIAYNPFSSSPLLEVPQVSLDGGELNSMLDLFSVDNDDCLLFDDFDYHNEVRHPDGFVNKEAPVFLGDGNFSGMFDLSNDQVVELQDLIQSPTPHPPSPPAQASIPDDSRSNGQTKDD

SEQ ID NO: 47205 - DNA, 1389 bp, Arabidopsis thaliana
  misc_feature (1)..(1389): Ceres Seq. ID no. 13592556
  misc_feature: MA Experiment ID: 20000227 Result: Down-regulated in Transcription
  misc_feature: MA Experiment 20000227 PARAMETER Experiment Name: At_Root-Tips-vs-Tops_P Parameter: Tissue Value: Root Tips vs. Root Tops
  misc_feature: MA Experiment ID: 20000286 Result: Down-regulated in Transcription
  misc_feature: MA Experiment 20000286 PARAMETER Experiment Name: At_Open_Flower_P Parameter: Age (day) Value: 21
  misc_feature: MA Experiment 20000286 PARAMETER Experiment Name: At_Open_Flower_P Parameter: Plant Line Value: WS
  misc_feature: MA Experiment 20000286 PARAMETER Experiment Name: At_Open_Flower_P Parameter: Tissue Value: Half Open vs. Whole Plant
  misc_feature: MA Experiment ID: 20000437 Result: Up-regulated in Transcription
  misc_feature: MA Experiment 20000437 PARAMETER Experiment Name: At_Drought_P Parameter: Age (day) Value: 8
  misc_feature: MA Experiment 20000437 PARAMETER Experiment Name: At_Drought_P Parameter: Organism Value: A. thaliana
  misc_feature: MA Experiment 20000437 PARAMETER Experiment Name: At_Drought_P Parameter: Plant Line Value: WS
  misc_feature: MA Experiment 20000437 PARAMETER Experiment Name: At_Drought_P Parameter: Timepoint (hr) Value: 24
  misc_feature: MA Experiment 20000437 PARAMETER Experiment Name: At_Drought_P Parameter: Tissue Value: Whole Plant
  misc_feature: MA Experiment 20000437 PARAMETER Experiment Name: At_Drought_P Parameter: Treatment Value: Drought vs. No Drought
  misc_feature: MA Experiment ID: 20000794 Result: Down-regulated in Transcription
  misc_feature: MA Experiment 20000794 PARAMETER Experiment Name: At_Petals_P Parameter: Age (day) Value: 23-25 days
  misc_feature: MA Experiment 20000794 PARAMETER Experiment Name: At_Petals_P Parameter: Plant Line Value: WS
  misc_feature: MA Experiment 20000794 PARAMETER Experiment Name: At_Petals_P Parameter: Tissue Value: Petals vs. Whole plant
  misc_feature: MA Experiment ID: 20001905 Result: Up-regulated in Transcription
  misc_feature: MA Experiment 20001905 PARAMETER Experiment Name: At_Drought_Reproduction_P Parameter: Age (day) Value: 40
  misc_feature: MA Experiment 20001905 PARAMETER Experiment Name: At_Drought_Reproduction_P Parameter: Organism Value: A. thaliana
  misc_feature: MA Experiment 20001905 PARAMETER Experiment Name: At_Drought_Reproduction_P Parameter: Plant Line Value: WS
  misc_feature: MA Experiment 20001905 PARAMETER Experiment Name: At_Drought_Reproduction_P Parameter: Timepoint (day) Value: 10
  misc_feature: MA Experiment 20001905 PARAMETER Experiment Name: At_Drought_Reproduction_P Parameter: Tissue Value: Rosettes
  misc_feature: MA Experiment 20001905 PARAMETER Experiment Name: At_Drought_Reproduction_P Parameter: Treatment Value: Drought vs. No Drought
agacacagagagataagagagagtctgtgtaatcctctcaaagacaaagaagaagattatgttaccctcaagaaaaactaagagagtcttctcctgtgactttactccgggaagaaaacgccgacgatgtgttgttgttccttcctctgtttctccggtaccggaaaacacaaccggagccgatttgctagattcaattccagacgatcttgttatctctatactttgtaaacttggctctacttctcgatgtcctgctgatttcatcaacgttttgctgacatgtaagagattaaaaggattagctatgaatcctattgtgttgtcgagattatctcctaaagctatcgctgttaaagctcataattggtcggaatattctcaccggtttttaaaaaggtgtgtcgacgccggaagtctcgaagcttgttacactctaggaatgattcggttttattgtttacaaaacagaggaaacggcgcgtcgttaatggctaaagccgcgattagttctcacgcgccggcgttatattccttagcagtgattcagttcaacggaagcggtggttcaaagaatgataaagatcttagagccggtgtggctttatgcgcgcgtgccgcttttcttggacacgtcgacgcgctacgtgagctaggtcactgtcttcaagatggttatggagttcctcaaaacgtctctgaaggtaggaggtttttagttcaagccaacgctcgtgaactcgccgccgttttatcttccggtatacaagctaggtcaacgtggctttctttatcacagccaccacctccggttgttcctaaccatggtcaacaaacttgtcctttgcttagtgattttggatgtaatgtaccggcaccggaaacacatcccgcgaataggtttttagcggattggttcgctgttcgcggcggagattgtcccggagatgggttgagattgtgttcacacgctggttgtggacgaccggagacgaggaagcatgagtttaggagatgttcggtttgtggcgttgttaattattgttcacgcgcttgtcaagctttagattggaaactccggcataaaatggattgtgctccggtgcaacggtggctagaggaaggtgacggtggtgaaggtaacgttcagattgacggaaatggtaacggtgataatgttttgcttccaatgagttaacggcaatgtaacggctgctttgaatagtaaaaaaaaacgacgagagatgaggtaaacggaagctagtttcgtttttttttttttgctattagtagaaaagattaggataaaaaattactatcgagtagagtaatttttgtaattccaatctattgtaaagaagagttataaaatgaacggcttttattttt

SEQ ID NO: 47206 - protein, 379 aa, Arabidopsis thaliana
  peptide (1)..(379): Ceres Seq. ID no. 15221119
  misc_feature (305)..(346): Pfam Name: MYND finger Pfam Description: MYND finger
  misc_feature (40)..(353): Homolog of NCBI NO: 19386803 NR Description: OJ1485_B09.11 [Oryza sativa (japonica
  misc_feature (264)..(368): Homolog of NCBI NO: 15240674 NR Description: expressed protein [Arabidopsis thaliana]
  misc_feature (37)..(240): Homolog of NCBI NO: 15240674 NR Description: expressed protein [Arabidopsis thaliana]
  misc_feature (1)..(379): Homolog of NCBI NO: 18408746 NR Description: F-box protein family [Arabidopsis thaliana]
MLPSRKTKRVFSCDFTPGRKRRRCVVVPSSVSPVPENTTGADLLDSIPDDLVISILCKLGSTSRCPADFINVLLTCKRLKGLAMNPIVLSRLSPKAIAVKAHNWSEYSHRFLKRCVDAGSLEACYTLGMIRFYCLQNRGNGASLMAKAAISSHAPALYSLAVIQFNGSGGSKNDKDLRAGVALCARAAFLGHVDALRELGHCLQDGYGVPQNVSEGRRFLVQANARELAAVLSSGIQARSTWLSLSQPPPPVVPNHGQQTCPLLSDFGCNVPAPETHPANRFLADWFAVRGGDCPGDGLRLCSHAGCGRPETRKHEFRRCSVCGVVNYCSRACQALDWKLRHKMDCAPVQRWLEEGDGGEGNVQIDGNGNGDNVLLPMS

SEQ ID NO: 47207 - protein, 296 aa, Arabidopsis thaliana
  peptide (1)..(296): Ceres Seq. ID no. 15221120
  misc_feature (222)..(263): Pfam Name: MYND finger Pfam Description: MYND finger
  misc_feature (1)..(270): Homolog of NCBI NO: 19386803 NR Description: OJ1485_B09.11 [Oryza sativa (japonica
  misc_feature (181)..(285): Homolog of NCBI NO: 15240674 NR Description: expressed protein [Arabidopsis thaliana]
  misc_feature (1)..(157): Homolog of NCBI NO: 15240674 NR Description: expressed protein [Arabidopsis thaliana]
  misc_feature (1)..(296): Homolog of NCBI NO: 18408746 NR Description: F-box protein family [Arabidopsis thaliana]
MNPIVLSRLSPKAIAVKAHNWSEYSHRFLKRCVDAGSLEACYTLGMIRFYCLQNRGNGASLMAKAAISSHAPALYSLAVIQFNGSGGSKNDKDLRAGVALCARAAFLGHVDALRELGHCLQDGYGVPQNVSEGRRFLVQANARELAAVLSSGIQARSTWLSLSQPPPPVVPNHGQQTCPLLSDFGCNVPAPETHPANRFLADWFAVRGGDCPGDGLRLCSHAGCGRPETRKHEFRRCSVCGVVNYCSRACQALDWKLRHKMDCAPVQRWLEEGDGGEGNVQIDGNGNGDNVLLPMS

SEQ ID NO: 47208 - protein, 251 aa, Arabidopsis thaliana
  peptide (1)..(251): Ceres Seq. ID no. 15221121
  misc_feature (177)..(218): Pfam Name: MYND finger Pfam Description: MYND finger
  misc_feature (1)..(225): Homolog of NCBI NO: 19386803 NR Description: OJ1485_B09.11 [Oryza sativa (japonica
  misc_feature (136)..(240): Homolog of NCBI NO: 15240674 NR Description: expressed protein [Arabidopsis thaliana]
  misc_feature (1)..(112): Homolog of NCBI NO: 15240674 NR Description: expressed protein [Arabidopsis thaliana]
  misc_feature (1)..(251): Homolog of NCBI NO: 18408746 NR Description: F-box protein family [Arabidopsis thaliana]
MIRFYCLQNRGNGASLMAKAAISSHAPALYSLAVIQFNGSGGSKNDKDLRAGVALCARAAFLGHVDALRELGHCLQDGYGVPQNVSEGRRFLVQANARELAAVLSSGIQARSTWLSLSQPPPPVVPNHGQQTCPLLSDFGCNVPAPETHPANRFLADWFAVRGGDCPGDGLRLCSHAGCGRPETRKHEFRRCSVCGVVNYCSRACQALDWKLRHKMDCAPVQRWLEEGDGGEGNVQIDGNGNGDNVLLPMS

SEQ ID NO: 47209 - DNA, 743 bp, Arabidopsis thaliana; identical to SEQ ID NO: 36037
  misc_feature (1)..(743): Ceres Seq. ID no. 13592706
  misc_feature: MA Experiment ID: 20000180 Result: Up-regulated in Transcription
  misc_feature: MA Experiment 20000180 PARAMETER Experiment Name: At_Germinating_Seeds_P Parameter: Age (hr) Value: 24 vs. 0
  misc_feature: MA Experiment 20000180 PARAMETER Experiment Name: At_Germinating_Seeds_P Parameter: Tissue Value: Germinating Seeds
  misc_feature: MA Experiment ID: 20000184 Result: Up-regulated in Transcription
  misc_feature: MA Experiment 20000184 PARAMETER Experiment Name: At_Shoots__P Parameter: Age (day) Value: 7
  misc_feature: MA Experiment 20000184 PARAMETER Experiment Name: At_Shoots__P Parameter: Tissue Value: Shoots vs. Whole Plant
  misc_feature: MA Experiment ID: 20000185 Result: Down-regulated in Transcription
  misc_feature: MA Experiment 20000185 PARAMETER Experiment Name: At_Roots__P Parameter: Age (day) Value: 7 vs. 21
  misc_feature: MA Experiment 20000185 PARAMETER Experiment Name: At_Roots__P Parameter: Organism Value: A. thaliana
  misc_feature: MA Experiment 20000185 PARAMETER Experiment Name: At_Roots__P Parameter: Tissue Value: Roots vs. Whole Plant
  misc_feature: MA Experiment ID: 20000264 Result: Down-regulated in Transcription
  misc_feature: MA Experiment 20000264 PARAMETER Experiment Name: At_Open_Flower_P Parameter: Age (day) Value: 21
  misc_feature: MA Experiment 20000264 PARAMETER Experiment Name: At_Open_Flower_P Parameter: Plant Line Value: WS
  misc_feature: MA Experiment 20000264 PARAMETER Experiment Name: At_Open_Flower_P Parameter: Tissue Value: Open Flower vs. Whole Plant
  misc_feature: MA Experiment ID: 20000437 Result: Down-regulated in Transcription
  misc_feature: MA Experiment 20000437 PARAMETER Experiment Name: At_Drought_P Parameter: Age (day) Value: 8
  misc_feature: MA Experiment 20000437 PARAMETER Experiment Name: At_Drought_P Parameter: Organism Value: A. thaliana
  misc_feature: MA Experiment 20000437 PARAMETER Experiment Name: At_Drought_P Parameter: Plant Line Value: WS
  misc_feature: MA Experiment 20000437 PARAMETER Experiment Name: At_Drought_P Parameter: Timepoint (hr) Value: 24
  misc_feature: MA Experiment 20000437 PARAMETER Experiment Name: At_Drought_P Parameter: Tissue Value: Whole Plant
  misc_feature: MA Experiment 20000437 PARAMETER Experiment Name: At_Drought_P Parameter: Treatment Value: Drought vs. No Drought
  misc_feature: MA Experiment ID: 20000438 Result: Up-regulated in Transcription
  misc_feature: MA Experiment 20000438 PARAMETER Experiment Name: At_Shoots__P Parameter: Age (day) Value: 14
  misc_feature: MA Experiment 20000438 PARAMETER Experiment Name: At_Shoots__P Parameter: Tissue Value: Shoots vs. Whole Plant
  misc_feature: MA Experiment ID: 20000439 Result: Down-regulated in Transcription
  misc_feature: MA Experiment 20000439 PARAMETER Experiment Name: At_Roots__P Parameter: Age (day) Value: 14 vs. 21
  misc_feature: MA Experiment 20000439 PARAMETER Experiment Name: At_Roots__P Parameter: Organism Value: A. thaliana
  misc_feature: MA Experiment 20000439 PARAMETER Experiment Name: At_Roots__P Parameter: Tissue Value: Roots vs. Whole Plant
  misc_feature: MA Experiment ID: 20000495 Result: Down-regulated in Transcription
  misc_feature: MA Experiment 20000495 PARAMETER Experiment Name: At_Guard_Cells_P Parameter: Harvest Date Value: 8/2/2002
  misc_feature: MA Experiment 20000495 PARAMETER Experiment Name: At_Guard_Cells_P Parameter: Organism Value: A. thaliana
  misc_feature: MA Experiment 20000495 PARAMETER Experiment Name: At_Guard_Cells_P Parameter: Tissue Value: Guard Cells vs. Leaves
  misc_feature: MA Experiment ID: 20000496 Result: Down-regulated in Transcription
  misc_feature: MA Experiment 20000496 PARAMETER Experiment Name: At_Guard_Cells_P Parameter: Harvest Date Value: 7/19/2002
  misc_feature: MA Experiment 20000496 PARAMETER Experiment Name: At_Guard_Cells_P Parameter: Organism Value: Canola
  misc_feature: MA Experiment 20000496 PARAMETER Experiment Name: At_Guard_Cells_P Parameter: Tissue Value: Guard Cells vs. Leaves
  misc_feature: MA Experiment ID: 20000794 Result: Down-regulated in Transcription
  misc_feature: MA Experiment 20000794 PARAMETER Experiment Name: At_Petals_P Parameter: Age (day) Value: 23-25 days
  misc_feature: MA Experiment 20000794 PARAMETER Experiment Name: At_Petals_P Parameter: Plant Line Value: WS
  misc_feature: MA Experiment 20000794 PARAMETER Experiment Name: At_Petals_P Parameter: Tissue Value: Petals vs. Whole plant
  misc_feature: MA Experiment ID: 20001248 Result: Down-regulated in Transcription
  misc_feature: MA Experiment 20001248 PARAMETER Experiment Name: At_Far-red-induction_P Parameter: Age (day) Value: 7
  misc_feature: MA Experiment 20001248 PARAMETER Experiment Name: At_Far-red-induction_P Parameter: Light Value: Far-red vs. White
  misc_feature: MA Experiment 20001248 PARAMETER Experiment Name: At_Far-red-induction_P Parameter: Organism Value: A. thaliana
  misc_feature: MA Experiment 20001248 PARAMETER Experiment Name: At_Far-red-induction_P Parameter: Plant Line Value: Columbia
  misc_feature: MA Experiment 20001248 PARAMETER Experiment Name: At_Far-red-induction_P Parameter: Timepoint (hr) Value: 4
  misc_feature: MA Experiment 20001248 PARAMETER Experiment Name: At_Far-red-induction_P Parameter: Tissue Value: Whole Plant
  misc_feature: MA Experiment ID: 20001450 Result: Down-regulated in Transcription
  misc_feature: MA Experiment 20001450 PARAMETER Experiment Name: At_Far-red-induction_P Parameter: Age (day) Value: 7
  misc_feature: MA Experiment 20001450 PARAMETER Experiment Name: At_Far-red-induction_P Parameter: Light Value: Far-red vs. White
  misc_feature: MA Experiment 20001450 PARAMETER Experiment Name: At_Far-red-induction_P Parameter: Organism Value: A. thaliana
  misc_feature: MA Experiment 20001450 PARAMETER Experiment Name: At_Far-red-induction_P Parameter: Plant Line Value: Columbia
  misc_feature: MA Experiment 20001450 PARAMETER Experiment Name: At_Far-red-induction_P Parameter: Timepoint (hr) Value: 8
  misc_feature: MA Experiment 20001450 PARAMETER Experiment Name: At_Far-red-induction_P Parameter: Tissue Value: Whole Plant
  misc_feature: MA Experiment ID: 20001451 Result: Down-regulated in Transcription
  misc_feature: MA Experiment 20001451 PARAMETER Experiment Name: At_Far-red-induction_P Parameter: Age (day) Value: 7
  misc_feature: MA Experiment 20001451 PARAMETER Experiment Name: At_Far-red-induction_P Parameter: Light Value: Far-red vs. White
  misc_feature: MA Experiment 20001451 PARAMETER Experiment Name: At_Far-red-induction_P Parameter: Organism Value: A. thaliana
  misc_feature: MA Experiment 20001451 PARAMETER Experiment Name: At_Far-red-induction_P Parameter: Plant Line Value: Columbia
  misc_feature: MA Experiment 20001451 PARAMETER Experiment Name: At_Far-red-induction_P Parameter: Timepoint (hr) Value: 24
  misc_feature: MA Experiment 20001451 PARAMETER Experiment Name: At_Far-red-induction_P Parameter: Tissue Value: Whole Plant
  misc_feature: MA Experiment ID: 20001555 Result: Down-regulated in Transcription
  misc_feature: MA Experiment 20001555 PARAMETER Experiment Name: At_Drought_Soil_Dry_P Parameter: Age (day) Value: 24
  misc_feature: MA Experiment 20001555 PARAMETER Experiment Name: At_Drought_Soil_Dry_P Parameter: Organism Value: A. thaliana
  misc_feature: MA Experiment 20001555 PARAMETER Experiment Name: At_Drought_Soil_Dry_P Parameter: Plant Line Value: WS
  misc_feature: MA Experiment 20001555 PARAMETER Experiment Name: At_Drought_Soil_Dry_P Parameter: Post Timepoint (hr) Value: None
  misc_feature: MA Experiment 20001555 PARAMETER Experiment Name: At_Drought_Soil_Dry_P Parameter: Post-Treatment Value: None
  misc_feature: MA Experiment 20001555 PARAMETER Experiment Name: At_Drought_Soil_Dry_P Parameter: Timepoint (day) Value: 10
  misc_feature: MA Experiment 20001555 PARAMETER Experiment Name: At_Drought_Soil_Dry_P Parameter: Treatment Value: Drought vs. No Drought
  misc_feature: MA Experiment ID: 20001757 Result: Up-regulated in Transcription
  misc_feature: MA Experiment 20001757 PARAMETER Experiment Name: At_50mM_NH4NO3_L-to-H_P Parameter: Timepoint (hr) Value: 6
  misc_feature: MA Experiment 20001757 PARAMETER Experiment Name: At_50mM_NH4NO3_L-to-H_P Parameter: Tissue Value: Leaf
  misc_feature: MA Experiment 20001757 PARAMETER Experiment Name: At_50mM_NH4NO3_L-to-H_P Parameter: Treatment Value: 50mM NH4NO3 vs 100mM Mannitol
  misc_feature: MA Experiment ID: 20001904 Result: Down-regulated in Transcription
  misc_feature: MA Experiment 20001904 PARAMETER Experiment Name: At_Drought_Reproduction_P Parameter: Age (day) Value: 37
  misc_feature: MA Experiment 20001904 PARAMETER Experiment Name: At_Drought_Reproduction_P Parameter: Organism Value: A. thaliana
  misc_feature: MA Experiment 20001904 PARAMETER Experiment Name: At_Drought_Reproduction_P Parameter: Plant Line Value: WS
  misc_feature: MA Experiment 20001904 PARAMETER Experiment Name: At_Drought_Reproduction_P Parameter: Timepoint (day) Value: 7
  misc_feature: MA Experiment 20001904 PARAMETER Experiment Name: At_Drought_Reproduction_P Parameter: Tissue Value: Rosettes
  misc_feature: MA Experiment 20001904 PARAMETER Experiment Name: At_Drought_Reproduction_P Parameter: Treatment Value: Drought vs. No Drought
  misc_feature: MA Experiment ID: 20001905 Result: Down-regulated in Transcription
  misc_feature: MA Experiment 20001905 PARAMETER Experiment Name: At_Drought_Reproduction_P Parameter: Age (day) Value: 40
  misc_feature: MA Experiment 20001905 PARAMETER Experiment Name: At_Drought_Reproduction_P Parameter: Organism Value: A. thaliana
  misc_feature: MA Experiment 20001905 PARAMETER Experiment Name: At_Drought_Reproduction_P Parameter: Plant Line Value: WS
  misc_feature: MA Experiment 20001905 PARAMETER Experiment Name: At_Drought_Reproduction_P Parameter: Timepoint (day) Value: 10
  misc_feature: MA Experiment 20001905 PARAMETER Experiment Name: At_Drought_Reproduction_P Parameter: Tissue Value: Rosettes
  misc_feature: MA Experiment 20001905 PARAMETER Experiment Name: At_Drought_Reproduction_P Parameter: Treatment Value: Drought vs. No Drought
  misc_feature: MA Experiment ID: 20001906 Result: Down-regulated in Transcription
  misc_feature: MA Experiment 20001906 PARAMETER Experiment Name: At_Drought_Reproduction_P Parameter: Age (day) Value: 35
  misc_feature: MA Experiment 20001906 PARAMETER Experiment Name: At_Drought_Reproduction_P Parameter: Organism Value: A. thaliana
  misc_feature: MA Experiment 20001906 PARAMETER Experiment Name: At_Drought_Reproduction_P Parameter: Plant Line Value: WS
  misc_feature: MA Experiment 20001906 PARAMETER Experiment Name: At_Drought_Reproduction_P Parameter: Timepoint (day) Value: 5
  misc_feature: MA Experiment 20001906 PARAMETER Experiment Name: At_Drought_Reproduction_P Parameter: Tissue Value: Siliques
  misc_feature: MA Experiment 20001906 PARAMETER Experiment Name: At_Drought_Reproduction_P Parameter: Treatment Value: Drought vs. No Drought
  misc_feature: MA Experiment ID: 20001907 Result: Down-regulated in Transcription
  misc_feature: MA Experiment 20001907 PARAMETER Experiment Name: At_Drought_Reproduction_P Parameter: Age (day) Value: 37
  misc_feature: MA Experiment 20001907 PARAMETER Experiment Name: At_Drought_Reproduction_P Parameter: Organism Value: A. thaliana
  misc_feature: MA Experiment 20001907 PARAMETER Experiment Name: At_Drought_Reproduction_P Parameter: Plant Line Value: WS
  misc_feature: MA Experiment 20001907 PARAMETER Experiment Name: At_Drought_Reproduction_P Parameter: Timepoint (day) Value: 7
  misc_feature: MA Experiment 20001907 PARAMETER Experiment Name: At_Drought_Reproduction_P Parameter: Tissue Value: Siliques
  misc_feature: MA Experiment 20001907 PARAMETER Experiment Name: At_Drought_Reproduction_P Parameter: Treatment Value: Drought vs. No Drought

SEQ ID NO: 47210 - protein, 198 aa, Arabidopsis thaliana; identical to SEQ ID NO: 36038
  peptide (1)..(198): Ceres Seq. ID no. 13592707
  misc_feature (18)..(196): Homolog of NCBI NO: 15219826 NR Description: ribulose-bisphosphate carboxylase small unit
  misc_feature (18)..(198): Homolog of NCBI NO: 480983 NR Description: ribulose-bisphosphate carboxylase (EC 4.1.1.39)
  misc_feature (18)..(198): Homolog of NCBI NO: 266891 NR Description: Ribulose bisphosphate carboxylase small chain,
  misc_feature (18)..(198): Homolog of NCBI NO: 132091 NR Description: Ribulose bisphosphate carboxylase small chain F1,
  misc_feature (18)..(198): Homolog of NCBI NO: 132154 NR Description: Ribulose bisphosphate carboxylase small chain,
  misc_feature (18)..(198): Homolog of NCBI NO: 15240903 NR Description: ribulose bisphosphate carboxylase small chain 2b
  misc_feature (18)..(198): Homolog of NCBI NO: 15240912 NR Description: ribulose bisphosphate carboxylase small chain 1b
  misc_feature (18)..(198): Homolog of NCBI NO: 68061 NR Description: ribulose-bisphosphate carboxylase (EC 4.1.1.39)
  misc_feature (18)..(198): Homolog of NCBI NO: 68060 NR Description: ribulose-bisphosphate carboxylase (EC 4.1.1.39)
  misc_feature (18)..(198): Homolog of NCBI NO: 15240901 NR Description: ribulose bisphosphate carboxylase small chain 3b
  misc_feature (18)..(196): Homolog of NCBI NO: 15219826 NR Description: ribulose-bisphosphate carboxylase small unit
  misc_feature (18)..(198): Homolog of NCBI NO: 480983 NR Description: ribulose-bisphosphate carboxylase (EC 4.1.1.39)
  misc_feature (18)..(198): Homolog of NCBI NO: 266891 NR Description: Ribulose bisphosphate carboxylase small chain,
  misc_feature (18)..(198): Homolog of NCBI NO: 132091 NR Description: Ribulose bisphosphate carboxylase small chain F1,
  misc_feature (18)..(198): Homolog of NCBI NO: 132154 NR Description: Ribulose bisphosphate carboxylase small chain,
  misc_feature (18)..(198): Homolog of NCBI NO: 15240903 NR Description: ribulose bisphosphate carboxylase small chain 2b
  misc_feature (18)..(198): Homolog of NCBI NO: 15240912 NR Description: ribulose bisphosphate carboxylase small chain 1b
  misc_feature (18)..(198): Homolog of NCBI NO: 68061 NR Description: ribulose-bisphosphate carboxylase (EC 4.1.1.39)
  misc_feature (18)..(198): Homolog of NCBI NO: 68060 NR Description: ribulose-bisphosphate carboxylase (EC 4.1.1.39)
  misc_feature (18)..(198): Homolog of NCBI NO: 15240901 NR Description: ribulose bisphosphate carboxylase small chain 3b

SEQ ID NO: 47211 - protein, 181 aa, Arabidopsis thaliana; identical to SEQ ID NO: 36039
  peptide (1)..(181): Ceres Seq. ID no. 13592708
  misc_feature (1)..(179): Homolog of NCBI NO: 15219826 NR Description: ribulose-bisphosphate carboxylase small unit
  misc_feature (1)..(181): Homolog of NCBI NO: 480983 NR Description: ribulose-bisphosphate carboxylase (EC 4.1.1.39)
  misc_feature (1)..(181): Homolog of NCBI NO: 266891 NR Description: Ribulose bisphosphate carboxylase small chain,
  misc_feature (1)..(181): Homolog of NCBI NO: 132091 NR Description: Ribulose bisphosphate carboxylase small chain F1,
  misc_feature (1)..(181): Homolog of NCBI NO: 132154 NR Description: Ribulose bisphosphate carboxylase small chain,
  misc_feature (1)..(181): Homolog of NCBI NO: 15240903 NR Description: ribulose bisphosphate carboxylase small chain 2b
  misc_feature (1)..(181): Homolog of NCBI NO: 15240912 NR Description: ribulose bisphosphate carboxylase small chain 1b
  misc_feature (1)..(181): Homolog of NCBI NO: 68061 NR Description: ribulose-bisphosphate carboxylase (EC 4.1.1.39)
  misc_feature (1)..(181): Homolog of NCBI NO: 68060 NR Description: ribulose-bisphosphate carboxylase (EC 4.1.1.39)
  misc_feature (1)..(181): Homolog of NCBI NO: 15240901 NR Description: ribulose bisphosphate carboxylase small chain 3b
  misc_feature (1)..(179): Homolog of NCBI NO: 15219826 NR Description: ribulose-bisphosphate carboxylase small unit
  misc_feature (1)..(181): Homolog of NCBI NO: 480983 NR Description: ribulose-bisphosphate carboxylase (EC 4.1.1.39)
  misc_feature (1)..(181): Homolog of NCBI NO: 266891 NR Description: Ribulose bisphosphate carboxylase small chain,
  misc_feature (1)..(181): Homolog of NCBI NO: 132091 NR Description: Ribulose bisphosphate carboxylase small chain F1,
  misc_feature (1)..(181): Homolog of NCBI NO: 132154 NR Description: Ribulose bisphosphate carboxylase small chain,
  misc_feature (1)..(181): Homolog of NCBI NO: 15240903 NR Description: ribulose bisphosphate carboxylase small chain 2b
  misc_feature (1)..(181): Homolog of NCBI NO: 15240912 NR Description: ribulose bisphosphate carboxylase small chain 1b
  misc_feature (1)..(181): Homolog of NCBI NO: 68061 NR Description: ribulose-bisphosphate carboxylase (EC 4.1.1.39)
  misc_feature (1)..(181): Homolog of NCBI NO: 68060 NR Description: ribulose-bisphosphate carboxylase (EC 4.1.1.39)
  misc_feature (1)..(181): Homolog of NCBI NO: 15240901 NR Description: ribulose bisphosphate carboxylase small chain 3b

SEQ ID NO: 47212 - protein, 177 aa, Arabidopsis thaliana; identical to SEQ ID NO: 36040
  peptide (1)..(177): Ceres Seq. ID no. 13592709
  misc_feature (1)..(175): Homolog of NCBI NO: 15219826 NR Description: ribulose-bisphosphate carboxylase small unit
  misc_feature (1)..(177): Homolog of NCBI NO: 480983 NR Description: ribulose-bisphosphate carboxylase (EC 4.1.1.39)
  misc_feature (1)..(177): Homolog of NCBI NO: 266891 NR Description: Ribulose bisphosphate carboxylase small chain,
  misc_feature (1)..(177): Homolog of NCBI NO: 132091 NR Description: Ribulose bisphosphate carboxylase small chain F1,
  misc_feature (1)..(177): Homolog of NCBI NO: 132154 NR Description: Ribulose bisphosphate carboxylase small chain,
  misc_feature (1)..(177): Homolog of NCBI NO: 15240903 NR Description: ribulose bisphosphate carboxylase small chain 2b
  misc_feature (1)..(177): Homolog of NCBI NO: 15240912 NR Description: ribulose bisphosphate carboxylase small chain 1b
  misc_feature (1)..(177): Homolog of NCBI NO: 68061 NR Description: ribulose-bisphosphate carboxylase (EC 4.1.1.39)
  misc_feature (1)..(177): Homolog of NCBI NO: 68060 NR Description: ribulose-bisphosphate carboxylase (EC 4.1.1.39)
  misc_feature (1)..(177): Homolog of NCBI NO: 15240901 NR Description: ribulose bisphosphate carboxylase small chain 3b
  misc_feature (1)..(175): Homolog of NCBI NO: 15219826 NR Description: ribulose-bisphosphate carboxylase small unit
  misc_feature (1)..(177): Homolog of NCBI NO: 480983 NR Description: ribulose-bisphosphate carboxylase (EC 4.1.1.39)
  misc_feature (1)..(177): Homolog of NCBI NO: 266891 NR Description: Ribulose bisphosphate carboxylase small chain,
  misc_feature (1)..(177): Homolog of NCBI NO: 132091 NR Description: Ribulose bisphosphate carboxylase small chain F1,
  misc_feature (1)..(177): Homolog of NCBI NO: 132154 NR Description: Ribulose bisphosphate carboxylase small chain,
  misc_feature (1)..(177): Homolog of NCBI NO: 15240903 NR Description: ribulose bisphosphate carboxylase small chain 2b
  misc_feature (1)..(177): Homolog of NCBI NO: 15240912 NR Description: ribulose bisphosphate carboxylase small chain 1b
  misc_feature (1)..(177): Homolog of NCBI NO: 68061 NR Description: ribulose-bisphosphate carboxylase (EC 4.1.1.39)
  misc_feature (1)..(177): Homolog of NCBI NO: 68060 NR Description: ribulose-bisphosphate carboxylase (EC 4.1.1.39)
  misc_feature (1)..(177): Homolog of NCBI NO: 15240901 NR Description: ribulose bisphosphate carboxylase small chain 3b

SEQ ID NO: 47213 - DNA, 2281 bp, Arabidopsis thaliana
  misc_feature (1)..(2281): Ceres Seq. ID no. 12591614
  misc_feature: MA Experiment ID: 20000171 Result: Up-regulated in Transcription
  misc_feature: MA Experiment 20000171 PARAMETER Experiment Name: At_42deg_Heat_P Parameter: Age (day) Value: 14
  misc_feature: MA Experiment 20000171 PARAMETER Experiment Name: At_42deg_Heat_P Parameter: Organism Value: A. thaliana
  misc_feature: MA Experiment 20000171 PARAMETER Experiment Name: At_42deg_Heat_P Parameter: Plant Line Value: WS
  misc_feature: MA Experiment 20000171 PARAMETER Experiment Name: At_42deg_Heat_P Parameter: Temperature (deg C) Value: 42 vs. 22
  misc_feature: MA Experiment 20000171 PARAMETER Experiment Name: At_42deg_Heat_P Parameter: Timepoint (hr) Value: 1
  misc_feature: MA Experiment 20000171 PARAMETER Experiment Name: At_42deg_Heat_P Parameter: Tissue Value: Aerial
  misc_feature: MA Experiment ID: 20000173 Result: Up-regulated in Transcription
  misc_feature: MA Experiment 20000173 PARAMETER Experiment Name: At_42deg_Heat_P Parameter: Age (day) Value: 14
  misc_feature: MA Experiment 20000173 PARAMETER Experiment Name: At_42deg_Heat_P Parameter: Organism Value: A. thaliana
  misc_feature: MA Experiment 20000173 PARAMETER Experiment Name: At_42deg_Heat_P Parameter: Plant Line Value: WS
  misc_feature: MA Experiment 20000173 PARAMETER Experiment Name: At_42deg_Heat_P Parameter: Temperature (deg C) Value: 42 vs. 22
  misc_feature: MA Experiment 20000173 PARAMETER Experiment Name: At_42deg_Heat_P Parameter: Timepoint (hr) Value: 6
  misc_feature: MA Experiment 20000173 PARAMETER Experiment Name: At_42deg_Heat_P Parameter: Tissue Value: Aerial
  misc_feature: MA Experiment ID: 20000180 Result: Down-regulated in Transcription
  misc_feature: MA Experiment 20000180 PARAMETER Experiment Name: At_Germinating_Seeds_P Parameter: Age (hr) Value: 24 vs. 0
  misc_feature: MA Experiment 20000180 PARAMETER Experiment Name: At_Germinating_Seeds_P Parameter: Tissue Value: Germinating Seeds
  misc_feature: MA Experiment ID: 20000182 Result: Up-regulated in Transcription
  misc_feature: MA Experiment 20000182 PARAMETER Experiment Name: At_2mM_SA_P Parameter: Age (day) Value: 14
  misc_feature: MA Experiment 20000182 PARAMETER Experiment Name: At_2mM_SA_P Parameter: Organism Value: A. thaliana
  misc_feature: MA Experiment 20000182 PARAMETER Experiment Name: At_2mM_SA_P Parameter: Plant Line Value: WS
  misc_feature: MA Experiment 20000182 PARAMETER Experiment Name: At_2mM_SA_P Parameter: Timepoint (hr) Value: 6
  misc_feature: MA Experiment 20000182 PARAMETER Experiment Name: At_2mM_SA_P Parameter: Tissue Value: Aerial
  misc_feature: MA Experiment 20000182 PARAMETER Experiment Name: At_2mM_SA_P Parameter: Treatment Value: 2mM SA vs. No Treatment
  misc_feature: MA Experiment ID: 20000185 Result: Up-regulated in Transcription
  misc_feature: MA Experiment 20000185 PARAMETER Experiment Name: At_Roots__P Parameter: Age (day) Value: 7 vs. 21
  misc_feature: MA Experiment 20000185 PARAMETER Experiment Name: At_Roots__P Parameter: Organism Value: A. thaliana
  misc_feature: MA Experiment 20000185 PARAMETER Experiment Name: At_Roots__P Parameter: Tissue Value: Roots vs. Whole Plant
  misc_feature: MA Experiment ID: 20000227 Result: Down-regulated in Transcription
  misc_feature: MA Experiment 20000227 PARAMETER Experiment Name: At_Root-Tips-vs-Tops_P Parameter: Tissue Value: Root Tips vs. Root Tops
  misc_feature: MA Experiment ID: 20000234 Result: Down-regulated in Transcription
  misc_feature: MA Experiment 20000234 PARAMETER Experiment Name: At_Siliques_P Parameter: Age (day) Value: 21
  misc_feature: MA Experiment 20000234 PARAMETER Experiment Name: At_Siliques_P Parameter: Organism Value: A. thaliana
  misc_feature: MA Experiment 20000234 PARAMETER Experiment Name: At_Siliques_P Parameter: Plant Line Value: WS
  misc_feature: MA Experiment 20000234 PARAMETER Experiment Name: At_Siliques_P Parameter: Tissue Value: Less Than 5mm Siliques vs. Whole Plant
  misc_feature: MA Experiment ID: 20000235 Result: Down-regulated in Transcription
  misc_feature: MA Experiment 20000235 PARAMETER Experiment Name: At_Siliques_P Parameter: Age (day) Value: 21
  misc_feature: MA Experiment 20000235 PARAMETER Experiment Name: At_Siliques_P Parameter: Organism Value: A. thaliana
  misc_feature: MA Experiment 20000235 PARAMETER Experiment Name: At_Siliques_P Parameter: Plant Line Value: WS
  misc_feature: MA Experiment 20000235 PARAMETER Experiment Name: At_Siliques_P Parameter: Tissue Value: 5-10mm Siliques vs. Whole Plant
  misc_feature: MA Experiment ID: 20000265 Result: Down-regulated in Transcription
  misc_feature: MA Experiment 20000265 PARAMETER Experiment Name: At_Open_Flower_P Parameter: Age (day) Value: 21
  misc_feature: MA Experiment 20000265 PARAMETER Experiment Name: At_Open_Flower_P Parameter: Plant Line Value: WS
  misc_feature: MA Experiment 20000265 PARAMETER Experiment Name: At_Open_Flower_P Parameter: Tissue Value: Closed Flower vs. Whole Plant
  misc_feature: MA Experiment ID: 20000267 Result: Up-regulated in Transcription
  misc_feature: MA Experiment 20000267 PARAMETER Experiment Name: At_Drought_P Parameter: Age (day) Value: 7
  misc_feature: MA Experiment 20000267 PARAMETER Experiment Name: At_Drought_P Parameter: Organism Value: A. thaliana
  misc_feature: MA Experiment 20000267 PARAMETER Experiment Name: At_Drought_P Parameter: Plant Line Value: WS
  misc_feature: MA Experiment 20000267 PARAMETER Experiment Name: At_Drought_P Parameter: Timepoint (hr) Value: 6
  misc_feature: MA Experiment 20000267 PARAMETER Experiment Name: At_Drought_P Parameter: Tissue Value: Whole Plant
  misc_feature: MA Experiment 20000267 PARAMETER Experiment Name: At_Drought_P Parameter: Treatment Value: Drought vs. No Drought
  misc_feature: MA Experiment ID: 20000286 Result: Down-regulated in Transcription
  misc_feature: MA Experiment 20000286 PARAMETER Experiment Name: At_Open_Flower_P Parameter: Age (day) Value: 21
  misc_feature: MA Experiment 20000286 PARAMETER Experiment Name: At_Open_Flower_P Parameter: Plant Line Value: WS
  misc_feature: MA Experiment 20000286 PARAMETER Experiment Name: At_Open_Flower_P Parameter: Tissue Value: Half Open vs. Whole Plant
  misc_feature: MA Experiment ID: 20000436 Result: Up-regulated in Transcription
  misc_feature: MA Experiment 20000436 PARAMETER Experiment Name: At_Drought_P Parameter: Age (day) Value: 7
  misc_feature: MA Experiment 20000436 PARAMETER Experiment Name: At_Drought_P Parameter: Organism Value: A. thaliana
  misc_feature: MA Experiment 20000436 PARAMETER Experiment Name: At_Drought_P Parameter: Plant Line Value: WS
  misc_feature: MA Experiment 20000436 PARAMETER Experiment Name: At_Drought_P Parameter: Timepoint (hr) Value: 12
  misc_feature: MA Experiment 20000436 PARAMETER Experiment Name: At_Drought_P Parameter: Tissue Value: Whole Plant
  misc_feature: MA Experiment 20000436 PARAMETER Experiment Name: At_Drought_P Parameter: Treatment Value: Drought vs. No Drought
  misc_feature: MA Experiment ID: 20000437 Result: Up-regulated in Transcription
  misc_feature: MA Experiment 20000437 PARAMETER Experiment Name: At_Drought_P Parameter: Age (day) Value: 8
  misc_feature: MA Experiment 20000437 PARAMETER Experiment Name: At_Drought_P Parameter: Organism Value: A. thaliana
  misc_feature: MA Experiment 20000437 PARAMETER Experiment Name: At_Drought_P Parameter: Plant Line Value: WS
  misc_feature: MA Experiment 20000437 PARAMETER Experiment Name: At_Drought_P Parameter: Timepoint (hr) Value: 24
  misc_feature: MA Experiment 20000437 PARAMETER Experiment Name: At_Drought_P Parameter: Tissue Value: Whole Plant
  misc_feature: MA Experiment 20000437 PARAMETER Experiment Name: At_Drought_P Parameter: Treatment Value: Drought vs. No Drought
  misc_feature: MA Experiment ID: 20000441 Result: Up-regulated in Transcription
  misc_feature: MA Experiment 20000441 PARAMETER Experiment Name: At_1uM_BR-BRZ__P Parameter: Tissue Value: Shoot Apices
  misc_feature: MA Experiment 20000441 PARAMETER Experiment Name: At_1uM_BR-BRZ__P Parameter: Treatment Value: 1uM BR vs. No Treatment
  misc_feature: MA Experiment ID: 20000443 Result: Up-regulated in Transcription
  misc_feature: MA Experiment 20000443 PARAMETER Experiment Name: At_1uM_BR-BRZ__P Parameter: Tissue Value: Shoot Apices
  misc_feature: MA Experiment 20000443 PARAMETER Experiment Name: At_1uM_BR-BRZ__P Parameter: Treatment Value: 1uM BRZ vs. No Treatment
  misc_feature: MA Experiment ID: 20000453 Result: Up-regulated in Transcription
  misc_feature: MA Experiment 20000453 PARAMETER Experiment Name: At_100uM_ABA_P Parameter: Age (day) Value: 15
  misc_feature: MA Experiment 20000453 PARAMETER Experiment Name: At_100uM_ABA_P Parameter: Organism Value: A. thaliana
  misc_feature: MA Experiment 20000453 PARAMETER Experiment Name: At_100uM_ABA_P Parameter: Plant Line Value: WS
  misc_feature: MA Experiment 20000453 PARAMETER Experiment Name: At_100uM_ABA_P Parameter: Timepoint (hr) Value: 24
  misc_feature: MA Experiment 20000453 PARAMETER Experiment Name: At_100uM_ABA_P Parameter: Tissue Value: Aerial
  misc_feature: MA Experiment 20000453 PARAMETER Experiment Name: At_100uM_ABA_P Parameter: Treatment Value: 100uM ABA vs. No Treatment
  misc_feature: MA Experiment ID: 20000455 Result: Up-regulated in Transcription
  misc_feature: MA Experiment 20000455 PARAMETER Experiment Name: At_100uM_ABA_P Parameter: Age (day) Value: 16
  misc_feature: MA Experiment 20000455 PARAMETER Experiment Name: At_100uM_ABA_P Parameter: Organism Value: A. thaliana
  misc_feature: MA Experiment 20000455 PARAMETER Experiment Name: At_100uM_ABA_P Parameter: Plant Line Value: WS
  misc_feature: MA Experiment 20000455 PARAMETER Experiment Name: At_100uM_ABA_P Parameter: Timepoint (hr) Value: 48
  misc_feature: MA Experiment 20000455 PARAMETER Experiment Name: At_100uM_ABA_P Parameter: Tissue Value: Aerial
  misc_feature: MA Experiment 20000455 PARAMETER Experiment Name: At_100uM_ABA_P Parameter: Treatment Value: 100uM ABA vs. No Treatment
  misc_feature: MA Experiment ID: 20000456 Result: Up-regulated in Transcription
  misc_feature: MA Experiment 20000456 PARAMETER Experiment Name: At_100uM_BA_P Parameter: Age (day) Value: 14
  misc_feature: MA Experiment 20000456 PARAMETER Experiment Name: At_100uM_BA_P Parameter: Organism Value: A. thaliana
  misc_feature: MA Experiment 20000456 PARAMETER Experiment Name: At_100uM_BA_P Parameter: Plant Line Value: WS
  misc_feature: MA Experiment 20000456 PARAMETER Experiment Name: At_100uM_BA_P Parameter: Timepoint (hr) Value: 6
  misc_feature: MA Experiment 20000456 PARAMETER Experiment Name: At_100uM_BA_P Parameter: Tissue Value: Aerial
  misc_feature: MA Experiment 20000456 PARAMETER Experiment Name: At_100uM_BA_P Parameter: Treatment Value: 100uM BA vs. No Treatment
  misc_feature: MA Experiment ID: 20000506 Result: Up-regulated in Transcription
  misc_feature: MA Experiment 20000506 PARAMETER Experiment Name: At_Wounding_P Parameter: Organism Value: A. thaliana
  misc_feature: MA Experiment 20000506 PARAMETER Experiment Name: At_Wounding_P Parameter: Plant Line Value: WS
  misc_feature: MA Experiment 20000506 PARAMETER Experiment Name: At_Wounding_P Parameter: Timepoint (hr) Value: 6
  misc_feature: MA Experiment 20000506 PARAMETER Experiment Name: At_Wounding_P Parameter: Tissue Value: Aerial
  misc_feature: MA Experiment 20000506 PARAMETER Experiment Name: At_Wounding_P Parameter: Treatment Value: Wounding vs. No Wounding
  misc_feature: MA Experiment ID: 20000709 Result: Up-regulated in Transcription
  misc_feature: MA Experiment 20000709 PARAMETER Experiment Name: At_15mM_NH4NO3_L-to-H_P Parameter: Age (hr) Value: 14
  misc_feature: MA Experiment 20000709 PARAMETER Experiment Name: At_15mM_NH4NO3_L-to-H_P Parameter: Organism Value: A. thaliana
  misc_feature: MA Experiment 20000709 PARAMETER Experiment Name: At_15mM_NH4NO3_L-to-H_P Parameter: Plant Line Value: WS
  misc_feature: MA Experiment 20000709 PARAMETER Experiment Name: At_15mM_NH4NO3_L-to-H_P Parameter: Timepoint (hr) Value: 4
  misc_feature: MA Experiment 20000709 PARAMETER Experiment Name: At_15mM_NH4NO3_L-to-H_P Parameter: Tissue Value: Aerial
  misc_feature: MA Experiment 20000709 PARAMETER Experiment Name: At_15mM_NH4NO3_L-to-H_P Parameter: Treatment Value: 15mM NH4NO3 vs. 30mM Mannitol
  misc_feature: MA Experiment ID: 20001247 Result: Down-regulated in Transcription
  misc_feature: MA Experiment 20001247 PARAMETER Experiment Name: At_Far-red-induction_P Parameter: Age (day) Value: 7
  misc_feature: MA Experiment 20001247 PARAMETER Experiment Name: At_Far-red-induction_P Parameter: Light Value: Far-red vs. White
  misc_feature: MA Experiment 20001247 PARAMETER Experiment Name: At_Far-red-induction_P Parameter: Organism Value: A. thaliana
  misc_feature: MA Experiment 20001247 PARAMETER Experiment Name: At_Far-red-induction_P Parameter: Plant Line Value: Columbia
  misc_feature: MA Experiment 20001247 PARAMETER Experiment Name: At_Far-red-induction_P Parameter: Timepoint (hr) Value: 1
  misc_feature: MA Experiment 20001247 PARAMETER Experiment Name: At_Far-red-induction_P Parameter: Tissue Value: Whole Plant
  misc_feature: MA Experiment ID: 20001450 Result: Down-regulated in Transcription
  misc_feature: MA Experiment 20001450 PARAMETER Experiment Name: At_Far-red-induction_P Parameter: Age (day) Value: 7
  misc_feature: MA Experiment 20001450 PARAMETER Experiment Name: At_Far-red-induction_P Parameter: Light Value: Far-red vs. White
  misc_feature: MA Experiment 20001450 PARAMETER Experiment Name: At_Far-red-induction_P Parameter: Organism Value: A. thaliana
  misc_feature: MA Experiment 20001450 PARAMETER Experiment Name: At_Far-red-induction_P Parameter: Plant Line Value: Columbia
  misc_feature: MA Experiment 20001450 PARAMETER Experiment Name: At_Far-red-induction_P Parameter: Timepoint (hr) Value: 8
  misc_feature: MA Experiment 20001450 PARAMETER Experiment Name: At_Far-red-induction_P Parameter: Tissue Value: Whole Plant
  misc_feature: MA Experiment ID: 20001451 Result: Down-regulated in Transcription
  misc_feature: MA Experiment 20001451 PARAMETER Experiment Name: At_Far-red-induction_P Parameter: Age (day) Value: 7
  misc_feature: MA Experiment 20001451 PARAMETER Experiment Name: At_Far-red-induction_P Parameter: Light Value: Far-red vs. White
  misc_feature: MA Experiment 20001451 PARAMETER Experiment Name: At_Far-red-induction_P Parameter: Organism Value: A. thaliana
  misc_feature: MA Experiment 20001451 PARAMETER Experiment Name: At_Far-red-induction_P Parameter: Plant Line Value: Columbia
  misc_feature: MA Experiment 20001451 PARAMETER Experiment Name: At_Far-red-induction_P Parameter: Timepoint (hr) Value: 24
  misc_feature: MA Experiment 20001451 PARAMETER Experiment Name: At_Far-red-induction_P Parameter: Tissue Value: Whole Plant
  misc_feature: MA Experiment ID: 20001554 Result: Up-regulated in Transcription
  misc_feature: MA Experiment 20001554 PARAMETER Experiment Name: At_Drought_Soil_Dry_P Parameter: Age (day) Value: 21
  misc_feature: MA Experiment 20001554 PARAMETER Experiment Name: At_Drought_Soil_Dry_P Parameter: Organism Value: A. thaliana
  misc_feature: MA Experiment 20001554 PARAMETER Experiment Name: At_Drought_Soil_Dry_P Parameter: Plant Line Value: WS
  misc_feature: MA Experiment 20001554 PARAMETER Experiment Name: At_Drought_Soil_Dry_P Parameter: Post Timepoint (hr) Value: None
  misc_feature: MA Experiment 20001554 PARAMETER Experiment Name: At_Drought_Soil_Dry_P Parameter: Post-Treatment Value: None
  misc_feature: MA Experiment 20001554 PARAMETER Experiment Name: At_Drought_Soil_Dry_P Parameter: Timepoint (day) Value: 7
  misc_feature: MA Experiment 20001554 PARAMETER Experiment Name: At_Drought_Soil_Dry_P Parameter: Treatment Value: Drought vs. No Drought
  misc_feature: MA Experiment ID: 20001555 Result: Up-regulated in Transcription
  misc_feature: MA Experiment 20001555 PARAMETER Experiment Name: At_Drought_Soil_Dry_P Parameter: Age (day) Value: 24
  misc_feature: MA Experiment 20001555 PARAMETER Experiment Name: At_Drought_Soil_Dry_P Parameter: Organism Value: A. thaliana
  misc_feature: MA Experiment 20001555 PARAMETER Experiment Name: At_Drought_Soil_Dry_P Parameter: Plant Line Value: WS
  misc_feature: MA Experiment 20001555 PARAMETER Experiment Name: At_Drought_Soil_Dry_P Parameter: Post Timepoint (hr) Value: None
  misc_feature: MA Experiment 20001555 PARAMETER Experiment Name: At_Drought_Soil_Dry_P Parameter: Post-Treatment Value: None
  misc_feature: MA Experiment 20001555 PARAMETER Experiment Name: At_Drought_Soil_Dry_P Parameter: Timepoint (day) Value: 10
  misc_feature: MA Experiment 20001555 PARAMETER Experiment Name: At_Drought_Soil_Dry_P Parameter: Treatment Value: Drought vs. No Drought
  misc_feature: MA Experiment ID: 20001556 Result: Up-regulated in Transcription
  misc_feature: MA Experiment 20001556 PARAMETER Experiment Name: At_Drought_Soil_Dry_P Parameter: Age (day) Value: 26
  misc_feature: MA Experiment 20001556 PARAMETER Experiment Name: At_Drought_Soil_Dry_P Parameter: Organism Value: A. thaliana
  misc_feature: MA Experiment 20001556 PARAMETER Experiment Name: At_Drought_Soil_Dry_P Parameter: Plant Line Value: WS
  misc_feature: MA Experiment 20001556 PARAMETER Experiment Name: At_Drought_Soil_Dry_P Parameter: Post Timepoint (hr) Value: None
  misc_feature: MA Experiment 20001556 PARAMETER Experiment Name: At_Drought_Soil_Dry_P Parameter: Post-Treatment Value: None
  misc_feature: MA Experiment 20001556 PARAMETER Experiment Name: At_Drought_Soil_Dry_P Parameter: Timepoint (day) Value: 12
  misc_feature: MA Experiment 20001556 PARAMETER Experiment Name: At_Drought_Soil_Dry_P Parameter: Treatment Value: Drought vs. No Drought
  misc_feature: MA Experiment ID: 20001557 Result: Up-regulated in Transcription
  misc_feature: MA Experiment 20001557 PARAMETER Experiment Name: At_Drought_Soil_Dry_P Parameter: Age (day) Value: 27
  misc_feature: MA Experiment 20001557 PARAMETER Experiment Name: At_Drought_Soil_Dry_P Parameter: Organism Value: A. thaliana
  misc_feature: MA Experiment 20001557 PARAMETER Experiment Name: At_Drought_Soil_Dry_P Parameter: Plant Line Value: WS
  misc_feature: MA Experiment 20001557 PARAMETER Experiment Name: At_Drought_Soil_Dry_P Parameter: Post Timepoint (hr) Value: 3
  misc_feature: MA Experiment 20001557 PARAMETER Experiment Name: At_Drought_Soil_Dry_P Parameter: Post-Treatment Value: Re-Water vs. No Drought
  misc_feature: MA Experiment 20001557 PARAMETER Experiment Name: At_Drought_Soil_Dry_P Parameter: Timepoint (day) Value: 13
  misc_feature: MA Experiment 20001557 PARAMETER Experiment Name: At_Drought_Soil_Dry_P Parameter: Treatment Value: Drought vs. No Drought
  misc_feature: MA Experiment ID: 20001559 Result: Up-regulated in Transcription
  misc_feature: MA Experiment 20001559 PARAMETER Experiment Name: At_Drought_Soil_Dry_P Parameter: Age (day) Value: 28
  misc_feature: MA Experiment 20001559 PARAMETER Experiment Name: At_Drought_Soil_Dry_P Parameter: Organism Value: A. thaliana
  misc_feature: MA Experiment 20001559 PARAMETER Experiment Name: At_Drought_Soil_Dry_P Parameter: Plant Line Value: WS
  misc_feature: MA Experiment 20001559 PARAMETER Experiment Name: At_Drought_Soil_Dry_P Parameter: Post Timepoint (hr) Value: 29
  misc_feature: MA Experiment 20001559 PARAMETER Experiment Name: At_Drought_Soil_Dry_P Parameter: Post-Treatment Value: Re-Water vs. No Drought
  misc_feature: MA Experiment 20001559 PARAMETER Experiment Name: At_Drought_Soil_Dry_P Parameter: Timepoint (day) Value: 14
  misc_feature: MA Experiment 20001559 PARAMETER Experiment Name: At_Drought_Soil_Dry_P Parameter: Treatment Value: Drought vs. No Drought
  misc_feature: MA Experiment ID: 20001560 Result: Up-regulated in Transcription
  misc_feature: MA Experiment 20001560 PARAMETER Experiment Name: At_Drought_Soil_Dry_P Parameter: Age (day) Value: 28
  misc_feature: MA Experiment 20001560 PARAMETER Experiment Name: At_Drought_Soil_Dry_P Parameter: Organism Value: A. thaliana
  misc_feature: MA Experiment 20001560 PARAMETER Experiment Name: At_Drought_Soil_Dry_P Parameter: Plant Line Value: WS
  misc_feature: MA Experiment 20001560 PARAMETER Experiment Name: At_Drought_Soil_Dry_P Parameter: Post Timepoint (hr) Value: None
  misc_feature: MA Experiment 20001560 PARAMETER Experiment Name: At_Drought_Soil_Dry_P Parameter: Post-Treatment Value: None
  misc_feature: MA Experiment 20001560 PARAMETER Experiment Name: At_Drought_Soil_Dry_P Parameter: Timepoint (day) Value: 14
  misc_feature: MA Experiment 20001560 PARAMETER Experiment Name: At_Drought_Soil_Dry_P Parameter: Treatment Value: Drought vs. No Drought
  misc_feature: MA Experiment ID: 20001762 Result: Up-regulated in Transcription
  misc_feature: MA Experiment 20001762 PARAMETER Experiment Name: At_50mM_NH4NO3_L-to-H_P Parameter: Timepoint (hr) Value: 6
  misc_feature: MA Experiment 20001762 PARAMETER Experiment Name: At_50mM_NH4NO3_L-to-H_P Parameter: Tissue Value: Siliques
  misc_feature: MA Experiment 20001762 PARAMETER Experiment Name: At_50mM_NH4NO3_L-to-H_P Parameter: Treatment Value: 50mM NH4NO3 vs 100mM Mannitol
  misc_feature: MA Experiment ID: 20001904 Result: Up-regulated in Transcription
  misc_feature: MA Experiment 20001904 PARAMETER Experiment Name: At_Drought_Reproduction_P Parameter: Age (day) Value: 37
  misc_feature: MA Experiment 20001904 PARAMETER Experiment Name: At_Drought_Reproduction_P Parameter: Organism Value: A. thaliana
  misc_feature: MA Experiment 20001904 PARAMETER Experiment Name: At_Drought_Reproduction_P Parameter: Plant Line Value: WS
  misc_feature: MA Experiment 20001904 PARAMETER Experiment Name: At_Drought_Reproduction_P Parameter: Timepoint (day) Value: 7
  misc_feature: MA Experiment 20001904 PARAMETER Experiment Name: At_Drought_Reproduction_P Parameter: Tissue Value: Rosettes
  misc_feature: MA Experiment 20001904 PARAMETER Experiment Name: At_Drought_Reproduction_P Parameter: Treatment Value: Drought vs. No Drought
  misc_feature: MA Experiment ID: 20001906 Result: Up-regulated in Transcription
  misc_feature: MA Experiment 20001906 PARAMETER Experiment Name: At_Drought_Reproduction_P Parameter: Age (day) Value: 35
  misc_feature: MA Experiment 20001906 PARAMETER Experiment Name: At_Drought_Reproduction_P Parameter: Organism Value: A. thaliana
  misc_feature: MA Experiment 20001906 PARAMETER Experiment Name: At_Drought_Reproduction_P Parameter: Plant Line Value: WS
  misc_feature: MA Experiment 20001906 PARAMETER Experiment Name: At_Drought_Reproduction_P Parameter: Timepoint (day) Value: 5
  misc_feature: MA Experiment 20001906 PARAMETER Experiment Name: At_Drought_Reproduction_P Parameter: Tissue Value: Siliques
  misc_feature: MA Experiment 20001906 PARAMETER Experiment Name: At_Drought_Reproduction_P Parameter: Treatment Value: Drought vs. No Drought
  misc_feature: MA Experiment ID: 20001907 Result: Up-regulated in Transcription
  misc_feature: MA Experiment 20001907 PARAMETER Experiment Name: At_Drought_Reproduction_P Parameter: Age (day) Value: 37
  misc_feature: MA Experiment 20001907 PARAMETER Experiment Name: At_Drought_Reproduction_P Parameter: Organism Value: A. thaliana
  misc_feature: MA Experiment 20001907 PARAMETER Experiment Name: At_Drought_Reproduction_P Parameter: Plant Line Value: WS
  misc_feature: MA Experiment 20001907 PARAMETER Experiment Name: At_Drought_Reproduction_P Parameter: Timepoint (day) Value: 7
  misc_feature: MA Experiment 20001907 PARAMETER Experiment Name: At_Drought_Reproduction_P Parameter: Tissue Value: Siliques
  misc_feature: MA Experiment 20001907 PARAMETER Experiment Name: At_Drought_Reproduction_P Parameter: Treatment Value: Drought vs. No Drought
  misc_feature: MA Experiment ID: 20001909 Result: Up-regulated in Transcription
  misc_feature: MA Experiment 20001909 PARAMETER Experiment Name: At_Drought_Reproduction_P Parameter: Age (day) Value: 35
  misc_feature: MA Experiment 20001909 PARAMETER Experiment Name: At_Drought_Reproduction_P Parameter: Organism Value: A. thaliana
  misc_feature: MA Experiment 20001909 PARAMETER Experiment Name: At_Drought_Reproduction_P Parameter: Plant Line Value: WS
  misc_feature: MA Experiment 20001909 PARAMETER Experiment Name: At_Drought_Reproduction_P Parameter: Timepoint (day) Value: 5
  misc_feature: MA Experiment 20001909 PARAMETER Experiment Name: At_Drought_Reproduction_P Parameter: Tissue Value: Flowers
  misc_feature: MA Experiment 20001909 PARAMETER Experiment Name: At_Drought_Reproduction_P Parameter: Treatment Value: Drought vs. No Drought
  misc_feature: MA Experiment ID: 20001911 Result: Up-regulated in Transcription
  misc_feature: MA Experiment 20001911 PARAMETER Experiment Name: At_Drought_Reproduction_P Parameter: Age (day) Value: 40
  misc_feature: MA Experiment 20001911 PARAMETER Experiment Name: At_Drought_Reproduction_P Parameter: Organism Value: A. thaliana
  misc_feature: MA Experiment 20001911 PARAMETER Experiment Name: At_Drought_Reproduction_P Parameter: Plant Line Value: WS
  misc_feature: MA Experiment 20001911 PARAMETER Experiment Name: At_Drought_Reproduction_P Parameter: Timepoint (day) Value: 10
  misc_feature: MA Experiment 20001911 PARAMETER Experiment Name: At_Drought_Reproduction_P Parameter: Tissue Value: Flowers
  misc_feature: MA Experiment 20001911 PARAMETER Experiment Name: At_Drought_Reproduction_P Parameter: Treatment Value: Drought vs. No Drought
cacacaatcataaacacaacaacactcacaaattctcttaaagctcacagacgaattctttctatttttaatctttccggcgaacaattctgatctctaataatggcgggtaaaggtgaaggtccagctatcggtatcgatctcggtacaacctactcttgcgtcggtgtttggcaacatgaccgcgtcgaaatcatcgccaacgatcaaggcaaccgcaccactccttcctacgttgctttcactgacagcgagcgtctcatcggggatgctgccaagaatcaagtcgccatgaaccctaccaacaccgtcttcgatgctaagcgtctaatcggaagaagatacagtgatccctctgttcaagcggataagagtcactggccttttaaggttgtttccggtccaggtgagaagcctatgattgtggttaaccacaagggagaggagaaacagttctctgctgaggaaatctcgtcgatggttcttattaagatgcgggagattgcagaagctttccttggttctcctgttaagaacgctgtcgttacagttcctgcttatttcaacgactctcagcgtcaagcgactaaggacgctggagttatctctggtctcaacgtgatgcgtatcatcaatgagccaactgctgctgctattgcttacggtcttgacaagaaggcgtcgagtgttggcgagaagaatgttttgatctttgatttgggaggtggtacttttgatgtgtctttgcttacgattgaggaaggtatctttgaagtcaaggcaactgctggtgacacgcatcttggtggtgaggacttcgacaacaggatggttaatcattttgttcaggagtttaagaggaagaacaagaaggatattactgggaacccgagagctttgaggaggcttaggacagcttgtgagcgggcgaagagaactctttcttcgactgctcagacgactatagagattgactctctttttgagggtattgatttctacactaccatcactcgtgctaggttcgaggagctcaacatggatttgtttaggaagtgtatggagccagtggagaagtgtttgagggatgctaagatggacaagagcagtgttcatgatgttgttcttgttggtggctctacaaggattcccaaagtgcagcagcttttgcaagacttcttcaatgggaaagagctctgtaaaagcattaacccggacgaggctgttgcttacggagcagctgtgcaagctgcaatcttgagcggtgaagggaatgagaaggtccaggacttgttacttcttgatgtcactcctctgtccttgggtttggaaactgccggtggtgttatgactgttttgattccgaggaacaccacaattccgaccaagaaagagcagatattctctacctattcagacaaccagcccggtgtactgatccaggtctacgaaggagagagggcacgaacaaaggacaacaaccttttgggaaagttcgagctcagtggtataccacctgctccacgaggtgtaccgcagattactgtctgtttcgacatcgacgccaatggtatcctgaatgtgtcggctgaggacaagacgactggtcagaagaacaagatcacaatcacaaacgacaagggaaggttatcaaaggaagagatcgagaagatggtacaagaggcagagaagtacaaggctgaggatgaagaacacaagaagaaggtggatgcaaagaacgctctcgagaactatgcatacaacatgaggaacacgatcaaggacgagaagatcgcatctaagcttgacgcagctgacaagaagaagattgaggatgcaatcgaccaagctattgaatggttagatgggaatcaactggctgaggcagatgagttcgaggataagatgaaggagctcgagtctctttgcaaccctattattgcaagaatgtaccaaggagctgggcctgatatgggtggtgcaggaggaatggatgacgacacacctgctggtggtagcggcggtgctggcccaaagattgaagaagttgattaagccttttggcttttgtttactctgtttgcttgagattctagttggtttcttgttcttagttttatctttctatgtcactctgaaactggtgtgtgatcattttgatgctttaagaatttagctttaccgtttttaaaactcgctctgacctatgaaagacgactgggcataatactctacacgaaatatagtagacaaagtgaaagaagttaagttcatggtttaa

SEQ ID NO: 47214 - protein, 650 aa, Arabidopsis thaliana
  peptide (1)..(650): Ceres Seq. ID no. 12591615
  misc_feature (124)..(645): Homolog of NCBI NO: 4164594 NR Description: heat shock protein 70 [Paracoccidioides
  misc_feature (6)..(633): Homolog of NCBI NO: 23480384 NR Description: heat shock protein [Plasmodium yoelii yoelii]
  misc_feature (1)..(633): Homolog of NCBI NO: 121568 NR Description: 78 KD GLUCOSE-REGULATED PROTEIN HOMOLOG PRECURSOR
  misc_feature (1)..(617): Homolog of NCBI NO: 9963944 NR Description: binding protein [Pichia angusta]
  misc_feature (3)..(633): Homolog of NCBI NO: 29539338 NR Description: Heat shock 70 kDa protein [Cyanidioschyzon
  misc_feature (3)..(633): Homolog of NCBI NO: 1037176 NR Description: immunoglobulin heavy chain binding protein
  misc_feature (1)..(633): Homolog of NCBI NO: 7635897 NR Description: luminal binding protein [Pseudotsuga menziesii]
  misc_feature (8)..(650): Homolog of NCBI NO: 14423732 NR Description: Heat shock 70 kDa protein
  misc_feature (6)..(626): Homolog of NCBI NO: 21263753 NR Description: Heat shock cognate 71 kDa protein (Hsc70.1)
MAGKGEGPAIGIDLGTTYSCVGVWQHDRVEIIANDQGNRTTPSYVAFTDSERLIGDAAKNQVAMNPTNTVFDAKRLIGRRYSDPSVQADKSHWPFKVVSGPGEKPMIVVNHKGEEKQFSAEEISSMVLIKMREIAEAFLGSPVKNAVVTVPAYFNDSQRQATKDAGVISGLNVMRIINEPTAAAIAYGLDKKASSVGEKNVLIFDLGGGTFDVSLLTIEEGIFEVKATAGDTHLGGEDFDNRMVNHFVQEFKRKNKKDITGNPRALRRLRTACERAKRTLSSTAQTTIEIDSLFEGIDFYTTITRARFEELNMDLFRKCMEPVEKCLRDAKMDKSSVHDVVLVGGSTRIPKVQQLLQDFFNGKELCKSINPDEAVAYGAAVQAAILSGEGNEKVQDLLLLDVTPLSLGLETAGGVMTVLIPRNTTIPTKKEQIFSTYSDNQPGVLIQVYEGERARTKDNNLLGKFELSGIPPAPRGVPQITVCFDIDANGILNVSAEDKTTGQKNKITITNDKGRLSKEEIEKMVQEAEKYKAEDEEHKKKVDAKNALENYAYNMRNTIKDEKIASKLDAADKKKIEDAIDQAIEWLDGNQLAEADEFEDKMKELESLCNPIIARMYQGAGPDMGGAGGMDDDTPAGGSGGAGPKIEEVD

SEQ ID NO: 47215 - protein, 587 aa, Arabidopsis thaliana
  peptide (1)..(587): Ceres Seq. ID no. 12591616
  misc_feature (61)..(582): Homolog of NCBI NO: 4164594 NR Description: heat shock protein 70 [Paracoccidioides
  misc_feature (1)..(570): Homolog of NCBI NO: 23480384 NR Description: heat shock protein [Plasmodium yoelii yoelii]
  misc_feature (1)..(570): Homolog of NCBI NO: 121568 NR Description: 78 KD GLUCOSE-REGULATED PROTEIN HOMOLOG PRECURSOR
  misc_feature (1)..(554): Homolog of NCBI NO: 9963944 NR Description: binding protein [Pichia angusta]
  misc_feature (1)..(570): Homolog of NCBI NO: 29539338 NR Description: Heat shock 70 kDa protein [Cyanidioschyzon
  misc_feature (1)..(570): Homolog of NCBI NO: 1037176 NR Description: immunoglobulin heavy chain binding protein
  misc_feature (1)..(570): Homolog of NCBI NO: 7635897 NR Description: luminal binding protein [Pseudotsuga menziesii]
  misc_feature (1)..(587): Homolog of NCBI NO: 14423732 NR Description: Heat shock 70 kDa protein
  misc_feature (1)..(563): Homolog of NCBI NO: 21263753 NR Description: Heat shock cognate 71 kDa protein (Hsc70.1)
MNPTNTVFDAKRLIGRRYSDPSVQADKSHWPFKVVSGPGEKPMIVVNHKGEEKQFSAEEISSMVLIKMREIAEAFLGSPVKNAVVTVPAYFNDSQRQATKDAGVISGLNVMRIINEPTAAAIAYGLDKKASSVGEKNVLIFDLGGGTFDVSLLTIEEGIFEVKATAGDTHLGGEDFDNRMVNHFVQEFKRKNKKDITGNPRALRRLRTACERAKRTLSSTAQTTIEIDSLFEGIDFYTTITRARFEELNMDLFRKCMEPVEKCLRDAKMDKSSVHDVVLVGGSTRIPKVQQLLQDFFNGKELCKSINPDEAVAYGAAVQAAILSGEGNEKVQDLLLLDVTPLSLGLETAGGVMTVLIPRNTTIPTKKEQIFSTYSDNQPGVLIQVYEGERARTKDNNLLGKFELSGIPPAPRGVPQITVCFDIDANGILNVSAEDKTTGQKNKITITNDKGRLSKEEIEKMVQEAEKYKAEDEEHKKKVDAKNALENYAYNMRNTIKDEKIASKLDAADKKKIEDAIDQAIEWLDGNQLAEADEFEDKMKELESLCNPIIARMYQGAGPDMGGAGGMDDDTPAGGSGGAGPKIEEVD

SEQ ID NO: 47216 - protein, 545 aa, Arabidopsis thaliana
  peptide (1)..(545): Ceres Seq. ID no. 12591617
  misc_feature (19)..(540): Homolog of NCBI NO: 4164594 NR Description: heat shock protein 70 [Paracoccidioides
  misc_feature (1)..(528): Homolog of NCBI NO: 23480384 NR Description: heat shock protein [Plasmodium yoelii yoelii]
  misc_feature (1)..(528): Homolog of NCBI NO: 121568 NR Description: 78 KD GLUCOSE-REGULATED PROTEIN HOMOLOG PRECURSOR
  misc_feature (1)..(512): Homolog of NCBI NO: 9963944 NR Description: binding protein [Pichia angusta]
  misc_feature (1)..(528): Homolog of NCBI NO: 29539338 NR Description: Heat shock 70 kDa protein [Cyanidioschyzon
  misc_feature (1)..(528): Homolog of NCBI NO: 1037176 NR Description: immunoglobulin heavy chain binding protein
  misc_feature (1)..(528): Homolog of NCBI NO: 7635897 NR Description: luminal binding protein [Pseudotsuga menziesii]
  misc_feature (1)..(545): Homolog of NCBI NO: 14423732 NR Description: Heat shock 70 kDa protein
  misc_feature (1)..(521): Homolog of NCBI NO: 21263753 NR Description: Heat shock cognate 71 kDa protein (Hsc70.1)
MIVVNHKGEEKQFSAEEISSMVLIKMREIAEAFLGSPVKNAVVTVPAYFNDSQRQATKDAGVISGLNVMRIINEPTAAAIAYGLDKKASSVGEKNVLIFDLGGGTFDVSLLTIEEGIFEVKATAGDTHLGGEDFDNRMVNHFVQEFKRKNKKDITGNPRALRRLRTACERAKRTLSSTAQTTIEIDSLFEGIDFYTTITRARFEELNMDLFRKCMEPVEKCLRDAKMDKSSVHDVVLVGGSTRIPKVQQLLQDFFNGKELCKSINPDEAVAYGAAVQAAILSGEGNEKVQDLLLLDVTPLSLGLETAGGVMTVLIPRNTTIPTKKEQIFSTYSDNQPGVLIQVYEGERARTKDNNLLGKFELSGIPPAPRGVPQITVCFDIDANGILNVSAEDKTTGQKNKITITNDKGRLSKEEIEKMVQEAEKYKAEDEEHKKKVDAKNALENYAYNMRNTIKDEKIASKLDAADKKKIEDAIDQAIEWLDGNQLAEADEFEDKMKELESLCNPIIARMYQGAGPDMGGAGGMDDDTPAGGSGGAGPKIEEVD

SEQ ID NO: 47217 - DNA, 2078 bp, Arabidopsis thaliana
  misc_feature (1)..(2078): Ceres Seq. ID no. 12601002
  misc_feature: MA Experiment ID: 20000173 Result: Up-regulated in Transcription
  misc_feature: MA Experiment 20000173 PARAMETER Experiment Name: At_42deg_Heat_P Parameter: Age (day) Value: 14
  misc_feature: MA Experiment 20000173 PARAMETER Experiment Name: At_42deg_Heat_P Parameter: Organism Value: A. thaliana
  misc_feature: MA Experiment 20000173 PARAMETER Experiment Name: At_42deg_Heat_P Parameter: Plant Line Value: WS
  misc_feature: MA Experiment 20000173 PARAMETER Experiment Name: At_42deg_Heat_P Parameter: Temperature (deg C) Value: 42 vs. 22
  misc_feature: MA Experiment 20000173 PARAMETER Experiment Name: At_42deg_Heat_P Parameter: Timepoint (hr) Value: 6
  misc_feature: MA Experiment 20000173 PARAMETER Experiment Name: At_42deg_Heat_P Parameter: Tissue Value: Aerial
  misc_feature: MA Experiment ID: 20000438 Result: Up-regulated in Transcription
  misc_feature: MA Experiment 20000438 PARAMETER Experiment Name: At_Shoots__P Parameter: Age (day) Value: 14
  misc_feature: MA Experiment 20000438 PARAMETER Experiment Name: At_Shoots__P Parameter: Tissue Value: Shoots vs. Whole Plant
  misc_feature: MA Experiment ID: 20000441 Result: Up-regulated in Transcription
  misc_feature: MA Experiment 20000441 PARAMETER Experiment Name: At_1uM_BR-BRZ__P Parameter: Tissue Value: Shoot Apices
  misc_feature: MA Experiment 20000441 PARAMETER Experiment Name: At_1uM_BR-BRZ__P Parameter: Treatment Value: 1uM BR vs. No Treatment
  misc_feature: MA Experiment ID: 20000443 Result: Up-regulated in Transcription
  misc_feature: MA Experiment 20000443 PARAMETER Experiment Name: At_1uM_BR-BRZ__P Parameter: Tissue Value: Shoot Apices
  misc_feature: MA Experiment 20000443 PARAMETER Experiment Name: At_1uM_BR-BRZ__P Parameter: Treatment Value: 1uM BRZ vs. No Treatment
  misc_feature: MA Experiment ID: 20000460 Result: Down-regulated in Transcription
  misc_feature: MA Experiment 20000460 PARAMETER Experiment Name: At_10percent_PEG_P Parameter: Age (day) Value: 12
  misc_feature: MA Experiment 20000460 PARAMETER Experiment Name: At_10percent_PEG_P Parameter: Organism Value: A. thaliana
  misc_feature: MA Experiment 20000460 PARAMETER Experiment Name: At_10percent_PEG_P Parameter: Plant Line Value: WS
  misc_feature: MA Experiment 20000460 PARAMETER Experiment Name: At_10percent_PEG_P Parameter: Timepoint (day) Value: 12
  misc_feature: MA Experiment 20000460 PARAMETER Experiment Name: At_10percent_PEG_P Parameter: Tissue Value: Whole Plant
  misc_feature: MA Experiment 20000460 PARAMETER Experiment Name: At_10percent_PEG_P Parameter: Treatment Value: 10percent PEG vs. No Treatment
  misc_feature: MA Experiment ID: 20000574 Result: Down-regulated in Transcription
  misc_feature: MA Experiment 20000574 PARAMETER Experiment Name: At_100uM_ABA_Mutants__P Parameter: Organism Value: A. thaliana
  misc_feature: MA Experiment 20000574 PARAMETER Experiment Name: At_100uM_ABA_Mutants__P Parameter: Plant Line Value: CS23 vs. Ler wt
  misc_feature: MA Experiment 20000574 PARAMETER Experiment Name: At_100uM_ABA_Mutants__P Parameter: Timepoint (hr) Value: N/A
  misc_feature: MA Experiment 20000574 PARAMETER Experiment Name: At_100uM_ABA_Mutants__P Parameter: Tissue Value: Whole Plant
  misc_feature: MA Experiment 20000574 PARAMETER Experiment Name: At_100uM_ABA_Mutants__P Parameter: Treatment Value: None
  misc_feature: MA Experiment ID: 20001247 Result: Down-regulated in Transcription
  misc_feature: MA Experiment 20001247 PARAMETER Experiment Name: At_Far-red-induction_P Parameter: Age (day) Value: 7
  misc_feature: MA Experiment 20001247 PARAMETER Experiment Name: At_Far-red-induction_P Parameter: Light Value: Far-red vs. White
  misc_feature: MA Experiment 20001247 PARAMETER Experiment Name: At_Far-red-induction_P Parameter: Organism Value: A. thaliana
  misc_feature: MA Experiment 20001247 PARAMETER Experiment Name: At_Far-red-induction_P Parameter: Plant Line Value: Columbia
  misc_feature: MA Experiment 20001247 PARAMETER Experiment Name: At_Far-red-induction_P Parameter: Timepoint (hr) Value: 1
  misc_feature: MA Experiment 20001247 PARAMETER Experiment Name: At_Far-red-induction_P Parameter: Tissue Value: Whole Plant
  misc_feature: MA Experiment ID: 20001248 Result: Down-regulated in Transcription
  misc_feature: MA Experiment 20001248 PARAMETER Experiment Name: At_Far-red-induction_P Parameter: Age (day) Value: 7
  misc_feature: MA Experiment 20001248 PARAMETER Experiment Name: At_Far-red-induction_P Parameter: Light Value: Far-red vs. White
  misc_feature: MA Experiment 20001248 PARAMETER Experiment Name: At_Far-red-induction_P Parameter: Organism Value: A. thaliana
  misc_feature: MA Experiment 20001248 PARAMETER Experiment Name: At_Far-red-induction_P Parameter: Plant Line Value: Columbia
  misc_feature: MA Experiment 20001248 PARAMETER Experiment Name: At_Far-red-induction_P Parameter: Timepoint (hr) Value: 4
  misc_feature: MA Experiment 20001248 PARAMETER Experiment Name: At_Far-red-induction_P Parameter: Tissue Value: Whole Plant
  misc_feature: MA Experiment ID: 20001560 Result: Down-regulated in Transcription
  misc_feature: MA Experiment 20001560 PARAMETER Experiment Name: At_Drought_Soil_Dry_P Parameter: Age (day) Value: 28
  misc_feature: MA Experiment 20001560 PARAMETER Experiment Name: At_Drought_Soil_Dry_P Parameter: Organism Value: A. thaliana
  misc_feature: MA Experiment 20001560 PARAMETER Experiment Name: At_Drought_Soil_Dry_P Parameter: Plant Line Value: WS
  misc_feature: MA Experiment 20001560 PARAMETER Experiment Name: At_Drought_Soil_Dry_P Parameter: Post Timepoint (hr) Value: None
  misc_feature: MA Experiment 20001560 PARAMETER Experiment Name: At_Drought_Soil_Dry_P Parameter: Post-Treatment Value: None
  misc_feature: MA Experiment 20001560 PARAMETER Experiment Name: At_Drought_Soil_Dry_P Parameter: Timepoint (day) Value: 14
  misc_feature: MA Experiment 20001560 PARAMETER Experiment Name: At_Drought_Soil_Dry_P Parameter: Treatment Value: Drought vs. No Drought
  misc_feature: MA Experiment ID: 20001911 Result: Up-regulated in Transcription
  misc_feature: MA Experiment 20001911 PARAMETER Experiment Name: At_Drought_Reproduction_P Parameter: Age (day) Value: 40
  misc_feature: MA Experiment 20001911 PARAMETER Experiment Name: At_Drought_Reproduction_P Parameter: Organism Value: A. thaliana
  misc_feature: MA Experiment 20001911 PARAMETER Experiment Name: At_Drought_Reproduction_P Parameter: Plant Line Value: WS
  misc_feature: MA Experiment 20001911 PARAMETER Experiment Name: At_Drought_Reproduction_P Parameter: Timepoint (day) Value: 10
  misc_feature: MA Experiment 20001911 PARAMETER Experiment Name: At_Drought_Reproduction_P Parameter: Tissue Value: Flowers
  misc_feature: MA Experiment 20001911 PARAMETER Experiment Name: At_Drought_Reproduction_P Parameter: Treatment Value: Drought vs. No Drought
atcatcaaaaaacacctcaaagaattattcattcaggcatcttctcaaatttttgtttgtgaaaaaaacccacatcaaaagatctctcatttattcgtttcgtttctgctgttttgagtgtcgggttcgttttagctgtaatctttttttccggcgttcgatttgaaaaaatccggggaacaggtgatcggaatcacggctatacacgggatatcacggggtgttagctcacatgtccatattgtccgacagaagggttgtttaatcgaaactaatcctttgccgcacggaggacgtggagctctgccgtctgaaggcggcagcccttccgatctcctctttctcgccggtggcggttccagctttaacttcttttcctttaggttttaggagttagggtttgttagtgttttttccttcttctttttttggtgctcttgaatcgcttttttcttgggggaagttttttcttttgctcttcgaaatttgtcttttttgagaatgttgaaaatcaaaagagttccgaccgttgtttcgaactaccagaaggacgatggagcggaggatcccgtcggctgtggacggaattgcctcggcgcttgttgccttaacggggctaggcttccattgtatgcatgtaagaatctggtaaaatccggagagaagcttgtaatcagtcatgaggctatagagcctcctgtagcttttctcgagtcccttgttctcggagagtgggaggataggttccaaagaggactttttcgctatgatgtcactgcctgcgaaaccaaagttatcccggggaagtatggtttcgttgctcagcttaacgagggtcgtcacttgaagaagaggccaactgagttccgtgtagataaggtgttgcagtcttttgatggcagcaaattcaacttcactaaagttggccaagaagagttgctcttccagtttgaagctggtgaagatgcccaagttcagttcttcccttgcatgcctattgaccctgagaattctcccagtgttgttgccatcaatgttagtccgatagagtatggccatgtgctgctgattcctcgtgttcttgactgcttgcctcaaaggatcgatcacaaaagccttttgcttgcagttcacatggctgctgaggctgctaatccatacttcagactcggttacaacagcttgggtgcttttgccactatcaatcatctccactttcaggcttattacttggccatgcctttcccactggagaaagctcctaccaagaagataactaccactgttagtggtgtcaaaatctcagagcttctaagttaccctgtgagaagtcttctctttgaaggtggaagctctatgcaagaactatctgatactgtttcagactgctgtgtttgccttcaaaacaacaacattcctttcaacattctcatctctgattgtggaaggcagatcttcttaatgccacagtgttacgcagagaaacaggctctaggtgaagtgagcccggaggtattggaaacacaagtgaacccagccgtgtgggagataagtggtcacatggtactgaagaggaaagaggattacgaaggtgcttcagaggataacgcgtggaggctccttgcggaagcttctctgtcggaggaaaggtttaaggaggttactgctctcgcctttgaagccataggttgtagtaaccaagaggaggatcttgaaggaaccatagttcatcagcaaaactctagtggcaatgttaaccagaaaagcaacagaacccatggaggtccgatcacaaatgggacggccgccgagtgccttgtccttcagtgaacaatatggtgacttggtggtttgtatgtataattaaaagcctaaataagcaaactctctttgtagttgcatttgaagcttcttggtttatgtatgatggttgtgggcattttgtgcctagacttctggttctttgttttttgttatgagttggtgtttatgaattatatatgttcttcactaatatgattattatttgtatagatttgattattcaaaggatatgtcttaagaaggggttcaggttc

SEQ ID NO: 47218 - protein, 442 aa, Arabidopsis thaliana
  peptide (1)..(442): Ceres Seq. ID no. 12601003
  misc_feature (59)..(389): Homolog of NCBI NO: 22766878 NR Description: Unknown (protein for MGC:47349) [Mus musculus]
  misc_feature (66)..(389): Homolog of NCBI NO: 27677438 NR Description: similar to CG3552-PC [Drosophila melanogaster]
  misc_feature (97)..(402): Homolog of NCBI NO: 34907712 NR Description: P0035F12.16 [Oryza sativa (japonica
  misc_feature (1)..(182): Homolog of NCBI NO: 21070346 NR Description: VTC2 [Arabidopsis thaliana]
  misc_feature (1)..(182): Homolog of NCBI NO: 7452423 NR Description: hypothetical protein F10M23.190 - Arabidopsis
  misc_feature (1)..(416): Homolog of NCBI NO: 15240467 NR Description: putative protein
  misc_feature (41)..(442): Homolog of NCBI NO: 21070346 NR Description: VTC2 [Arabidopsis thaliana]
  misc_feature (41)..(442): Homolog of NCBI NO: 7452423 NR Description: hypothetical protein F10M23.190 - Arabidopsis
  misc_feature (1)..(442): Homolog of NCBI NO: 15810139 NR Description: unknown protein [Arabidopsis thaliana]
  misc_feature (1)..(442): Homolog of NCBI NO: 18416877 NR Description: putative protein
  misc_feature (59)..(389): Homolog of NCBI NO: 22766878 NR Description: Unknown (protein for MGC:47349) [Mus musculus]
  misc_feature (66)..(389): Homolog of NCBI NO: 27677438 NR Description: similar to CG3552-PC [Drosophila melanogaster]
  misc_feature (97)..(402): Homolog of NCBI NO: 34907712 NR Description: P0035F12.16 [Oryza sativa (japonica
  misc_feature (1)..(182): Homolog of NCBI NO: 21070346 NR Description: VTC2 [Arabidopsis thaliana]
  misc_feature (1)..(182): Homolog of NCBI NO: 7452423 NR Description: hypothetical protein F10M23.190 - Arabidopsis
  misc_feature (1)..(416): Homolog of NCBI NO: 15240467 NR Description: putative protein
  misc_feature (41)..(442): Homolog of NCBI NO: 21070346 NR Description: VTC2 [Arabidopsis thaliana]
  misc_feature (41)..(442): Homolog of NCBI NO: 7452423 NR Description: hypothetical protein F10M23.190 - Arabidopsis
  misc_feature (1)..(442): Homolog of NCBI NO: 15810139 NR Description: unknown protein [Arabidopsis thaliana]
  misc_feature (1)..(442): Homolog of NCBI NO: 18416877 NR Description: putative protein
  misc_feature (59)..(389): Homolog of NCBI NO: 22766878 NR Description: Unknown (protein for MGC:47349) [Mus musculus]
  misc_feature (66)..(389): Homolog of NCBI NO: 27677438 NR Description: similar to CG3552-PC [Drosophila melanogaster]
  misc_feature (97)..(402): Homolog of NCBI NO: 34907712 NR Description: P0035F12.16 [Oryza sativa (japonica
  misc_feature (1)..(182): Homolog of NCBI NO: 21070346 NR Description: VTC2 [Arabidopsis thaliana]
  misc_feature (1)..(182): Homolog of NCBI NO: 7452423 NR Description: hypothetical protein F10M23.190 - Arabidopsis
  misc_feature (1)..(416): Homolog of NCBI NO: 15240467 NR Description: putative protein
  misc_feature (41)..(442): Homolog of NCBI NO: 21070346 NR Description: VTC2 [Arabidopsis thaliana]
  misc_feature (41)..(442): Homolog of NCBI NO: 7452423 NR Description: hypothetical protein F10M23.190 - Arabidopsis
  misc_feature (1)..(442): Homolog of NCBI NO: 15810139 NR Description: unknown protein [Arabidopsis thaliana]
  misc_feature (1)..(442): Homolog of NCBI NO: 18416877 NR Description: putative protein
MLKIKRVPTVVSNYQKDDGAEDPVGCGRNCLGACCLNGARLPLYACKNLVKSGEKLVISHEAIEPPVAFLESLVLGEWEDRFQRGLFRYDVTACETKVIPGKYGFVAQLNEGRHLKKRPTEFRVDKVLQSFDGSKFNFTKVGQEELLFQFEAGEDAQVQFFPCMPIDPENSPSVVAINVSPIEYGHVLLIPRVLDCLPQRIDHKSLLLAVHMAAEAANPYFRLGYNSLGAFATINHLHFQAYYLAMPFPLEKAPTKKITTTVSGVKISELLSYPVRSLLFEGGSSMQELSDTVSDCCVCLQNNNIPFNILISDCGRQIFLMPQCYAEKQALGEVSPEVLETQVNPAVWEISGHMVLKRKEDYEGASEDNAWRLLAEASLSEERFKEVTALAFEAIGCSNQEEDLEGTIVHQQNSSGNVNQKSNRTHGGPITNGTAAECLVLQ

SEQ ID NO: 47219 - protein, 279 aa, Arabidopsis thaliana
  peptide (1)..(279): Ceres Seq. ID no. 12601004
  misc_feature (1)..(226): Homolog of NCBI NO: 22766878 NR Description: Unknown (protein for MGC:47349) [Mus musculus]
  misc_feature (1)..(226): Homolog of NCBI NO: 27677438 NR Description: similar to CG3552-PC [Drosophila melanogaster]
  misc_feature (1)..(239): Homolog of NCBI NO: 34907712 NR Description: P0035F12.16 [Oryza sativa (japonica
  misc_feature (1)..(19): Homolog of NCBI NO: 21070346 NR Description: VTC2 [Arabidopsis thaliana]
  misc_feature (1)..(19): Homolog of NCBI NO: 7452423 NR Description: hypothetical protein F10M23.190 - Arabidopsis
  misc_feature (1)..(253): Homolog of NCBI NO: 15240467 NR Description: putative protein
  misc_feature (1)..(279): Homolog of NCBI NO: 21070346 NR Description: VTC2 [Arabidopsis thaliana]
  misc_feature (1)..(279): Homolog of NCBI NO: 7452423 NR Description: hypothetical protein F10M23.190 - Arabidopsis
  misc_feature (1)..(279): Homolog of NCBI NO: 15810139 NR Description: unknown protein [Arabidopsis thaliana]
  misc_feature (1)..(279): Homolog of NCBI NO: 18416877 NR Description: putative protein
  misc_feature (1)..(226): Homolog of NCBI NO: 22766878 NR Description: Unknown (protein for MGC:47349) [Mus musculus]
  misc_feature (1)..(226): Homolog of NCBI NO: 27677438 NR Description: similar to CG3552-PC [Drosophila melanogaster]
  misc_feature (1)..(239): Homolog of NCBI NO: 34907712 NR Description: P0035F12.16 [Oryza sativa (japonica
  misc_feature (1)..(19): Homolog of NCBI NO: 21070346 NR Description: VTC2 [Arabidopsis thaliana]
  misc_feature (1)..(19): Homolog of NCBI NO: 7452423 NR Description: hypothetical protein F10M23.190 - Arabidopsis
  misc_feature (1)..(253): Homolog of NCBI NO: 15240467 NR Description: putative protein
  misc_feature (1)..(279): Homolog of NCBI NO: 21070346 NR Description: VTC2 [Arabidopsis thaliana]
  misc_feature (1)..(279): Homolog of NCBI NO: 7452423 NR Description: hypothetical protein F10M23.190 - Arabidopsis
  misc_feature (1)..(279): Homolog of NCBI NO: 15810139 NR Description: unknown protein [Arabidopsis thaliana]
  misc_feature (1)..(279): Homolog of NCBI NO: 18416877 NR Description: putative protein
  misc_feature (1)..(226): Homolog of NCBI NO: 22766878 NR Description: Unknown (protein for MGC:47349) [Mus musculus]
  misc_feature (1)..(226): Homolog of NCBI NO: 27677438 NR Description: similar to CG3552-PC [Drosophila melanogaster]
  misc_feature (1)..(239): Homolog of NCBI NO: 34907712 NR Description: P0035F12.16 [Oryza sativa (japonica
  misc_feature (1)..(19): Homolog of NCBI NO: 21070346 NR Description: VTC2 [Arabidopsis thaliana]
  misc_feature (1)..(19): Homolog of NCBI NO: 7452423 NR Description: hypothetical protein F10M23.190 - Arabidopsis
  misc_feature (1)..(253): Homolog of NCBI NO: 15240467 NR Description: putative protein
  misc_feature (1)..(279): Homolog of NCBI NO: 21070346 NR Description: VTC2 [Arabidopsis thaliana]
  misc_feature (1)..(279): Homolog of NCBI NO: 7452423 NR Description: hypothetical protein F10M23.190 - Arabidopsis
  misc_feature (1)..(279): Homolog of NCBI NO: 15810139 NR Description: unknown protein [Arabidopsis thaliana]
  misc_feature (1)..(279): Homolog of NCBI NO: 18416877 NR Description: putative protein
MPIDPENSPSVVAINVSPIEYGHVLLIPRVLDCLPQRIDHKSLLLAVHMAAEAANPYFRLGYNSLGAFATINHLHFQAYYLAMPFPLEKAPTKKITTTVSGVKISELLSYPVRSLLFEGGSSMQELSDTVSDCCVCLQNNNIPFNILISDCGRQIFLMPQCYAEKQALGEVSPEVLETQVNPAVWEISGHMVLKRKEDYEGASEDNAWRLLAEASLSEERFKEVTALAFEAIGCSNQEEDLEGTIVHQQNSSGNVNQKSNRTHGGPITNGTAAECLVLQ

SEQ ID NO: 47220 - protein, 231 aa, Arabidopsis thaliana
  peptide (1)..(231): Ceres Seq. ID no. 12601005
  misc_feature (1)..(178): Homolog of NCBI NO: 26351153 NR Description: unnamed protein product [Mus musculus]
  misc_feature (1)..(191): Homolog of NCBI NO: 34527348 NR Description: unnamed protein product [Homo sapiens]
  misc_feature (1)..(178): Homolog of NCBI NO: 22766878 NR Description: Unknown (protein for MGC:47349) [Mus musculus]
  misc_feature (1)..(178): Homolog of NCBI NO: 27677438 NR Description: similar to CG3552-PC [Drosophila melanogaster]
  misc_feature (1)..(191): Homolog of NCBI NO: 34907712 NR Description: P0035F12.16 [Oryza sativa (japonica
  misc_feature (1)..(205): Homolog of NCBI NO: 15240467 NR Description: putative protein
  misc_feature (1)..(231): Homolog of NCBI NO: 21070346 NR Description: VTC2 [Arabidopsis thaliana]
  misc_feature (1)..(231): Homolog of NCBI NO: 7452423 NR Description: hypothetical protein F10M23.190 - Arabidopsis
  misc_feature (1)..(231): Homolog of NCBI NO: 15810139 NR Description: unknown protein [Arabidopsis thaliana]
  misc_feature (1)..(231): Homolog of NCBI NO: 18416877 NR Description: putative protein
  misc_feature (1)..(178): Homolog of NCBI NO: 26351153 NR Description: unnamed protein product [Mus musculus]
  misc_feature (1)..(191): Homolog of NCBI NO: 34527348 NR Description: unnamed protein product [Homo sapiens]
  misc_feature (1)..(178): Homolog of NCBI NO: 22766878 NR Description: Unknown (protein for MGC:47349) [Mus musculus]
  misc_feature (1)..(178): Homolog of NCBI NO: 27677438 NR Description: similar to CG3552-PC [Drosophila melanogaster]
  misc_feature (1)..(191): Homolog of NCBI NO: 34907712 NR Description: P0035F12.16 [Oryza sativa (japonica
  misc_feature (1)..(205): Homolog of NCBI NO: 15240467 NR Description: putative protein
  misc_feature (1)..(231): Homolog of NCBI NO: 21070346 NR Description: VTC2 [Arabidopsis thaliana]
  misc_feature (1)..(231): Homolog of NCBI NO: 7452423 NR Description: hypothetical protein F10M23.190 - Arabidopsis
  misc_feature (1)..(231): Homolog of NCBI NO: 15810139 NR Description: unknown protein [Arabidopsis thaliana]
  misc_feature (1)..(231): Homolog of NCBI NO: 18416877 NR Description: putative protein
  misc_feature (1)..(178): Homolog of NCBI NO: 26351153 NR Description: unnamed protein product [Mus musculus]
  misc_feature (1)..(191): Homolog of NCBI NO: 34527348 NR Description: unnamed protein product [Homo sapiens]
  misc_feature (1)..(178): Homolog of NCBI NO: 22766878 NR Description: Unknown (protein for MGC:47349) [Mus musculus]
  misc_feature (1)..(178): Homolog of NCBI NO: 27677438 NR Description: similar to CG3552-PC [Drosophila melanogaster]
  misc_feature (1)..(191): Homolog of NCBI NO: 34907712 NR Description: P0035F12.16 [Oryza sativa (japonica
  misc_feature (1)..(205): Homolog of NCBI NO: 15240467 NR Description: putative protein
  misc_feature (1)..(231): Homolog of NCBI NO: 21070346 NR Description: VTC2 [Arabidopsis thaliana]
  misc_feature (1)..(231): Homolog of NCBI NO: 7452423 NR Description: hypothetical protein F10M23.190 - Arabidopsis
  misc_feature (1)..(231): Homolog of NCBI NO: 15810139 NR Description: unknown protein [Arabidopsis thaliana]
  misc_feature (1)..(231): Homolog of NCBI NO: 18416877 NR Description: putative protein
MAAEAANPYFRLGYNSLGAFATINHLHFQAYYLAMPFPLEKAPTKKITTTVSGVKISELLSYPVRSLLFEGGSSMQELSDTVSDCCVCLQNNNIPFNILISDCGRQIFLMPQCYAEKQALGEVSPEVLETQVNPAVWEISGHMVLKRKEDYEGASEDNAWRLLAEASLSEERFKEVTALAFEAIGCSNQEEDLEGTIVHQQNSSGNVNQKSNRTHGGPITNGTAAECLVLQ

SEQ ID NO: 47221 - DNA, 1184 bp, Arabidopsis thaliana; identical to SEQ ID NO: 35315
  misc_feature (1)..(1184): Ceres Seq. ID no. 13488582
  misc_feature: MA Experiment ID: 108434 Result: Down-regulated in Transcription
  misc_feature: MA Experiment 108434 PARAMETER Experiment Name: At_Root_Tips_cDNA_P Parameter: Tissue Value: Root Tips
  misc_feature: MA Experiment ID: 108577 Result: Down-regulated in Transcription
  misc_feature: MA Experiment 108577 PARAMETER Experiment Name: At_42deg_Heat_cDNA_P Parameter: Temperature (deg C) Value: 42 vs. 22
  misc_feature: MA Experiment 108577 PARAMETER Experiment Name: At_42deg_Heat_cDNA_P Parameter: Timepoint (hr) Value: 6
  misc_feature: MA Experiment 108577 PARAMETER Experiment Name: At_42deg_Heat_cDNA_P Parameter: Tissue Value: Aerial
  misc_feature: MA Experiment ID: 20000111 Result: Down-regulated in Transcription
  misc_feature: MA Experiment 20000111 PARAMETER Experiment Name: At_42deg_Heat_cDNA_P Parameter: Temperature (deg C) Value: 42 vs. 22
  misc_feature: MA Experiment 20000111 PARAMETER Experiment Name: At_42deg_Heat_cDNA_P Parameter: Timepoint (hr) Value: 6
  misc_feature: MA Experiment 20000111 PARAMETER Experiment Name: At_42deg_Heat_cDNA_P Parameter: Tissue Value: Aerial
  misc_feature: MA Experiment ID: 20000113 Result: Down-regulated in Transcription
  misc_feature: MA Experiment 20000113 PARAMETER Experiment Name: At_42deg_Heat_cDNA_P Parameter: Temperature (deg C) Value: 42 vs. 22
  misc_feature: MA Experiment 20000113 PARAMETER Experiment Name: At_42deg_Heat_cDNA_P Parameter: Timepoint (hr) Value: 8
  misc_feature: MA Experiment 20000113 PARAMETER Experiment Name: At_42deg_Heat_cDNA_P Parameter: Tissue Value: Aerial
  misc_feature: MA Experiment ID: 20000171 Result: Down-regulated in Transcription
  misc_feature: MA Experiment 20000171 PARAMETER Experiment Name: At_42deg_Heat_P Parameter: Age (day) Value: 14
  misc_feature: MA Experiment 20000171 PARAMETER Experiment Name: At_42deg_Heat_P Parameter: Organism Value: A. thaliana
  misc_feature: MA Experiment 20000171 PARAMETER Experiment Name: At_42deg_Heat_P Parameter: Plant Line Value: WS
  misc_feature: MA Experiment 20000171 PARAMETER Experiment Name: At_42deg_Heat_P Parameter: Temperature (deg C) Value: 42 vs. 22
  misc_feature: MA Experiment 20000171 PARAMETER Experiment Name: At_42deg_Heat_P Parameter: Timepoint (hr) Value: 1
  misc_feature: MA Experiment 20000171 PARAMETER Experiment Name: At_42deg_Heat_P Parameter: Tissue Value: Aerial
  misc_feature: MA Experiment ID: 20000173 Result: Down-regulated in Transcription
  misc_feature: MA Experiment 20000173 PARAMETER Experiment Name: At_42deg_Heat_P Parameter: Age (day) Value: 14
  misc_feature: MA Experiment 20000173 PARAMETER Experiment Name: At_42deg_Heat_P Parameter: Organism Value: A. thaliana
  misc_feature: MA Experiment 20000173 PARAMETER Experiment Name: At_42deg_Heat_P Parameter: Plant Line Value: WS
  misc_feature: MA Experiment 20000173 PARAMETER Experiment Name: At_42deg_Heat_P Parameter: Temperature (deg C) Value: 42 vs. 22
  misc_feature: MA Experiment 20000173 PARAMETER Experiment Name: At_42deg_Heat_P Parameter: Timepoint (hr) Value: 6
  misc_feature: MA Experiment 20000173 PARAMETER Experiment Name: At_42deg_Heat_P Parameter: Tissue Value: Aerial
  misc_feature: MA Experiment ID: 20000180 Result: Up-regulated in Transcription
  misc_feature: MA Experiment 20000180 PARAMETER Experiment Name: At_Germinating_Seeds_P Parameter: Age (hr) Value: 24 vs. 0
  misc_feature: MA Experiment 20000180 PARAMETER Experiment Name: At_Germinating_Seeds_P Parameter: Tissue Value: Germinating Seeds
  misc_feature: MA Experiment ID: 20000184 Result: Down-regulated in Transcription
  misc_feature: MA Experiment 20000184 PARAMETER Experiment Name: At_Shoots__P Parameter: Age (day) Value: 7
  misc_feature: MA Experiment 20000184 PARAMETER Experiment Name: At_Shoots__P Parameter: Tissue Value: Shoots vs. Whole Plant
  misc_feature: MA Experiment ID: 20000264 Result: Down-regulated in Transcription
  misc_feature: MA Experiment 20000264 PARAMETER Experiment Name: At_Open_Flower_P Parameter: Age (day) Value: 21
  misc_feature: MA Experiment 20000264 PARAMETER Experiment Name: At_Open_Flower_P Parameter: Plant Line Value: WS
  misc_feature: MA Experiment 20000264 PARAMETER Experiment Name: At_Open_Flower_P Parameter: Tissue Value: Open Flower vs. Whole Plant
  misc_feature: MA Experiment ID: 20000265 Result: Down-regulated in Transcription
  misc_feature: MA Experiment 20000265 PARAMETER Experiment Name: At_Open_Flower_P Parameter: Age (day) Value: 21
  misc_feature: MA Experiment 20000265 PARAMETER Experiment Name: At_Open_Flower_P Parameter: Plant Line Value: WS
  misc_feature: MA Experiment 20000265 PARAMETER Experiment Name: At_Open_Flower_P Parameter: Tissue Value: Closed Flower vs. Whole Plant
  misc_feature: MA Experiment ID: 20000451 Result: Up-regulated in Transcription
  misc_feature: MA Experiment 20000451 PARAMETER Experiment Name: At_CS6879_Shoots-Roots_P Parameter: Age (day) Value: 14
  misc_feature: MA Experiment 20000451 PARAMETER Experiment Name: At_CS6879_Shoots-Roots_P Parameter: Organism Value: A. thaliana
  misc_feature: MA Experiment 20000451 PARAMETER Experiment Name: At_CS6879_Shoots-Roots_P Parameter: Plant Line Value: CS6879 vs. WS
  misc_feature: MA Experiment 20000451 PARAMETER Experiment Name: At_CS6879_Shoots-Roots_P Parameter: Tissue Value: Roots
  misc_feature: MA Experiment ID: 20000452 Result: Up-regulated in Transcription
  misc_feature: MA Experiment 20000452 PARAMETER Experiment Name: At_CS6879_Shoots-Roots_P Parameter: Age (day) Value: 14
  misc_feature: MA Experiment 20000452 PARAMETER Experiment Name: At_CS6879_Shoots-Roots_P Parameter: Organism Value: A. thaliana
  misc_feature: MA Experiment 20000452 PARAMETER Experiment Name: At_CS6879_Shoots-Roots_P Parameter: Plant Line Value: CS6879 vs. WS
  misc_feature: MA Experiment 20000452 PARAMETER Experiment Name: At_CS6879_Shoots-Roots_P Parameter: Tissue Value: Shoots
  misc_feature: MA Experiment ID: 20001558 Result: Down-regulated in Transcription
  misc_feature: MA Experiment 20001558 PARAMETER Experiment Name: At_Drought_Soil_Dry_P Parameter: Age (day) Value: 27
  misc_feature: MA Experiment 20001558 PARAMETER Experiment Name: At_Drought_Soil_Dry_P Parameter: Organism Value: A. thaliana
  misc_feature: MA Experiment 20001558 PARAMETER Experiment Name: At_Drought_Soil_Dry_P Parameter: Plant Line Value: WS
  misc_feature: MA Experiment 20001558 PARAMETER Experiment Name: At_Drought_Soil_Dry_P Parameter: Post Timepoint (hr) Value: 6
  misc_feature: MA Experiment 20001558 PARAMETER Experiment Name: At_Drought_Soil_Dry_P Parameter: Post-Treatment Value: Re-Water vs. No Drought
  misc_feature: MA Experiment 20001558 PARAMETER Experiment Name: At_Drought_Soil_Dry_P Parameter: Timepoint (day) Value: 13
  misc_feature: MA Experiment 20001558 PARAMETER Experiment Name: At_Drought_Soil_Dry_P Parameter: Treatment Value: Drought vs. No Drought

SEQ ID NO: 47222 - protein, 246 aa, Arabidopsis thaliana; identical to SEQ ID NO: 35316
  peptide (1)..(246): Ceres Seq. ID no. 13488583
  misc_feature (2)..(236): Pfam Name: Glutamine cyclotransferase Pfam Description: Glutamine cyclotransferase
  misc_feature (2)..(236): Pfam Name: Glutamine cyclotransferase Pfam Description: Glutamine cyclotransferase
  misc_feature (2)..(236): Pfam Name: Glutamine cyclotransferase Pfam Description: Glutamine cyclotransferase
  misc_feature (5)..(231): Homolog of NCBI NO: 21243055 NR Description: glutamine cyclotransferase
  misc_feature (4)..(229): Homolog of NCBI NO: 31790364 NR Description: putative glutamine cyclotransferase
  misc_feature (1)..(231): Homolog of NCBI NO: 22970826 NR Description: hypothetical protein [Chloroflexus aurantiacus]
  misc_feature (1)..(229): Homolog of NCBI NO: 21231655 NR Description: glutamine cyclotransferase
  misc_feature (1)..(233): Homolog of NCBI NO: 16126885 NR Description: glutamine cyclotransferase [Caulobacter
  misc_feature (5)..(231): Homolog of NCBI NO: 21243055 NR Description: glutamine cyclotransferase
  misc_feature (1)..(231): Homolog of NCBI NO: 22970826 NR Description: hypothetical protein [Chloroflexus aurantiacus]
  misc_feature (1)..(233): Homolog of NCBI NO: 16126885 NR Description: glutamine cyclotransferase [Caulobacter
  misc_feature (1)..(229): Homolog of NCBI NO: 21231655 NR Description: glutamine cyclotransferase
  misc_feature (1)..(231): Homolog of NCBI NO: 22970826 NR Description: hypothetical protein [Chloroflexus aurantiacus]
  misc_feature (4)..(229): Homolog of NCBI NO: 31790364 NR Description: putative glutamine cyclotransferase
  misc_feature (5)..(231): Homolog of NCBI NO: 21243055 NR Description: glutamine cyclotransferase
  misc_feature (2)..(246): Homolog of NCBI NO: 21536884 NR Description: glutamine cyclotransferase precursor-like protein
  misc_feature (2)..(246): Homolog of NCBI NO: 18416607 NR Description: glutamine cyclotransferase precursor - like
  misc_feature (2)..(246): Homolog of NCBI NO: 7484984 NR Description: glutaminyl-peptide cyclotransferase homolog
  misc_feature (3)..(245): Homolog of NCBI NO: 7484740 NR Description: glutaminyl-peptide cyclotransferase (EC 2.3.2.5)
  misc_feature (1)..(244): Homolog of NCBI NO: 24413973 NR Description: putative glutaminyl-peptide cyclotransferase
  misc_feature (2)..(246): Homolog of NCBI NO: 21536884 NR Description: glutamine cyclotransferase precursor-like protein
  misc_feature (2)..(246): Homolog of NCBI NO: 18416607 NR Description: glutamine cyclotransferase precursor - like
  misc_feature (2)..(246): Homolog of NCBI NO: 7484984 NR Description: glutaminyl-peptide cyclotransferase homolog
  misc_feature (3)..(245): Homolog of NCBI NO: 7484740 NR Description: glutaminyl-peptide cyclotransferase (EC 2.3.2.5)
  misc_feature (1)..(244): Homolog of NCBI NO: 24413973 NR Description: putative glutaminyl-peptide cyclotransferase
  misc_feature (1)..(233): Homolog of NCBI NO: 16126885 NR Description: glutamine cyclotransferase [Caulobacter
  misc_feature (1)..(229): Homolog of NCBI NO: 21231655 NR Description: glutamine cyclotransferase
  misc_feature (4)..(229): Homolog of NCBI NO: 31790364 NR Description: putative glutamine cyclotransferase
  misc_feature (1)..(244): Homolog of NCBI NO: 24413973 NR Description: putative glutaminyl-peptide cyclotransferase
  misc_feature (3)..(245): Homolog of NCBI NO: 7484740 NR Description: glutaminyl-peptide cyclotransferase (EC 2.3.2.5)
  misc_feature (2)..(246): Homolog of NCBI NO: 7484984 NR Description: glutaminyl-peptide cyclotransferase homolog
  misc_feature (2)..(246): Homolog of NCBI NO: 18416607 NR Description: glutamine cyclotransferase precursor - like
  misc_feature (2)..(246): Homolog of NCBI NO: 21536884 NR Description: glutamine cyclotransferase precursor-like protein

SEQ ID NO: 47223 - protein, 191 aa, Arabidopsis thaliana; identical to SEQ ID NO: 35317
  peptide (1)..(191): Ceres Seq. ID no. 13488584
  misc_feature (1)..(181): Pfam Name: Glutamine cyclotransferase Pfam Description: Glutamine cyclotransferase
  misc_feature (1)..(181): Pfam Name: Glutamine cyclotransferase Pfam Description: Glutamine cyclotransferase
  misc_feature (1)..(181): Pfam Name: Glutamine cyclotransferase Pfam Description: Glutamine cyclotransferase
  misc_feature (1)..(176): Homolog of NCBI NO: 21243055 NR Description: glutamine cyclotransferase
  misc_feature (1)..(174): Homolog of NCBI NO: 31790364 NR Description: putative glutamine cyclotransferase
  misc_feature (1)..(176): Homolog of NCBI NO: 22970826 NR Description: hypothetical protein [Chloroflexus aurantiacus]
  misc_feature (1)..(174): Homolog of NCBI NO: 21231655 NR Description: glutamine cyclotransferase
  misc_feature (1)..(178): Homolog of NCBI NO: 16126885 NR Description: glutamine cyclotransferase [Caulobacter
  misc_feature (1)..(176): Homolog of NCBI NO: 21243055 NR Description: glutamine cyclotransferase
  misc_feature (1)..(176): Homolog of NCBI NO: 22970826 NR Description: hypothetical protein [Chloroflexus aurantiacus]
  misc_feature (1)..(178): Homolog of NCBI NO: 16126885 NR Description: glutamine cyclotransferase [Caulobacter
  misc_feature (1)..(174): Homolog of NCBI NO: 21231655 NR Description: glutamine cyclotransferase
  misc_feature (1)..(176): Homolog of NCBI NO: 22970826 NR Description: hypothetical protein [Chloroflexus aurantiacus]
  misc_feature (1)..(174): Homolog of NCBI NO: 31790364 NR Description: putative glutamine cyclotransferase
  misc_feature (1)..(176): Homolog of NCBI NO: 21243055 NR Description: glutamine cyclotransferase
  misc_feature (1)..(191): Homolog of NCBI NO: 21536884 NR Description: glutamine cyclotransferase precursor-like protein
  misc_feature (1)..(191): Homolog of NCBI NO: 18416607 NR Description: glutamine cyclotransferase precursor - like
  misc_feature (1)..(191): Homolog of NCBI NO: 7484984 NR Description: glutaminyl-peptide cyclotransferase homolog
  misc_feature (1)..(190): Homolog of NCBI NO: 7484740 NR Description: glutaminyl-peptide cyclotransferase (EC 2.3.2.5)
  misc_feature (1)..(189): Homolog of NCBI NO: 24413973 NR Description: putative glutaminyl-peptide cyclotransferase
  misc_feature (1)..(191): Homolog of NCBI NO: 21536884 NR Description: glutamine cyclotransferase precursor-like protein
  misc_feature (1)..(191): Homolog of NCBI NO: 18416607 NR Description: glutamine cyclotransferase precursor - like
  misc_feature (1)..(191): Homolog of NCBI NO: 7484984 NR Description: glutaminyl-peptide cyclotransferase homolog
  misc_feature (1)..(190): Homolog of NCBI NO: 7484740 NR Description: glutaminyl-peptide cyclotransferase (EC 2.3.2.5)
  misc_feature (1)..(189): Homolog of NCBI NO: 24413973 NR Description: putative glutaminyl-peptide cyclotransferase
  misc_feature (1)..(178): Homolog of NCBI NO: 16126885 NR Description: glutamine cyclotransferase [Caulobacter
  misc_feature (1)..(174): Homolog of NCBI NO: 21231655 NR Description: glutamine cyclotransferase
  misc_feature (1)..(174): Homolog of NCBI NO: 31790364 NR Description: putative glutamine cyclotransferase
  misc_feature (1)..(189): Homolog of NCBI NO: 24413973 NR Description: putative glutaminyl-peptide cyclotransferase
  misc_feature (1)..(190): Homolog of NCBI NO: 7484740 NR Description: glutaminyl-peptide cyclotransferase (EC 2.3.2.5)
  misc_feature (1)..(191): Homolog of NCBI NO: 7484984 NR Description: glutaminyl-peptide cyclotransferase homolog
  misc_feature (1)..(191): Homolog of NCBI NO: 18416607 NR Description: glutamine cyclotransferase precursor - like
  misc_feature (1)..(191): Homolog of NCBI NO: 21536884 NR Description: glutamine cyclotransferase precursor-like protein

SEQ ID NO: 47224 - protein, 147 aa, Arabidopsis thaliana; identical to SEQ ID NO: 35318
  peptide (1)..(147): Ceres Seq. ID no. 13488585
  misc_feature (1)..(137): Pfam Name: Glutamine cyclotransferase Pfam Description: Glutamine cyclotransferase
  misc_feature (1)..(137): Pfam Name: Glutamine cyclotransferase Pfam Description: Glutamine cyclotransferase
  misc_feature (1)..(137): Pfam Name: Glutamine cyclotransferase Pfam Description: Glutamine cyclotransferase
  misc_feature (1)..(132): Homolog of NCBI NO: 21243055 NR Description: glutamine cyclotransferase
  misc_feature (1)..(130): Homolog of NCBI NO: 31790364 NR Description: putative glutamine cyclotransferase
  misc_feature (1)..(132): Homolog of NCBI NO: 22970826 NR Description: hypothetical protein [Chloroflexus aurantiacus]
  misc_feature (1)..(130): Homolog of NCBI NO: 21231655 NR Description: glutamine cyclotransferase
  misc_feature (1)..(134): Homolog of NCBI NO: 16126885 NR Description: glutamine cyclotransferase [Caulobacter
  misc_feature (1)..(132): Homolog of NCBI NO: 21243055 NR Description: glutamine cyclotransferase
  misc_feature (1)..(132): Homolog of NCBI NO: 22970826 NR Description: hypothetical protein [Chloroflexus aurantiacus]
  misc_feature (1)..(134): Homolog of NCBI NO: 16126885 NR Description: glutamine cyclotransferase [Caulobacter
  misc_feature (1)..(130): Homolog of NCBI NO: 21231655 NR Description: glutamine cyclotransferase
  misc_feature (1)..(132): Homolog of NCBI NO: 22970826 NR Description: hypothetical protein [Chloroflexus aurantiacus]
  misc_feature (1)..(130): Homolog of NCBI NO: 31790364 NR Description: putative glutamine cyclotransferase
  misc_feature (1)..(132): Homolog of NCBI NO: 21243055 NR Description: glutamine cyclotransferase
  misc_feature (1)..(147): Homolog of NCBI NO: 21536884 NR Description: glutamine cyclotransferase precursor-like protein
  misc_feature (1)..(147): Homolog of NCBI NO: 18416607 NR Description: glutamine cyclotransferase precursor - like
  misc_feature (1)..(147): Homolog of NCBI NO: 7484984 NR Description: glutaminyl-peptide cyclotransferase homolog
  misc_feature (1)..(146): Homolog of NCBI NO: 7484740 NR Description: glutaminyl-peptide cyclotransferase (EC 2.3.2.5)
  misc_feature (1)..(145): Homolog of NCBI NO: 24413973 NR Description: putative glutaminyl-peptide cyclotransferase
  misc_feature (1)..(147): Homolog of NCBI NO: 21536884 NR Description: glutamine cyclotransferase precursor-like protein
  misc_feature (1)..(147): Homolog of NCBI NO: 18416607 NR Description: glutamine cyclotransferase precursor - like
  misc_feature (1)..(147): Homolog of NCBI NO: 7484984 NR Description: glutaminyl-peptide cyclotransferase homolog
  misc_feature (1)..(146): Homolog of NCBI NO: 7484740 NR Description: glutaminyl-peptide cyclotransferase (EC 2.3.2.5)
  misc_feature (1)..(145): Homolog of NCBI NO: 24413973 NR Description: putative glutaminyl-peptide cyclotransferase
  misc_feature (1)..(134): Homolog of NCBI NO: 16126885 NR Description: glutamine cyclotransferase [Caulobacter
  misc_feature (1)..(130): Homolog of NCBI NO: 21231655 NR Description: glutamine cyclotransferase
  misc_feature (1)..(130): Homolog of NCBI NO: 31790364 NR Description: putative glutamine cyclotransferase
  misc_feature (1)..(145): Homolog of NCBI NO: 24413973 NR Description: putative glutaminyl-peptide cyclotransferase
  misc_feature (1)..(146): Homolog of NCBI NO: 7484740 NR Description: glutaminyl-peptide cyclotransferase (EC 2.3.2.5)
  misc_feature (1)..(147): Homolog of NCBI NO: 7484984 NR Description: glutaminyl-peptide cyclotransferase homolog
  misc_feature (1)..(147): Homolog of NCBI NO: 18416607 NR Description: glutamine cyclotransferase precursor - like
  misc_feature (1)..(147): Homolog of NCBI NO: 21536884 NR Description: glutamine cyclotransferase precursor-like protein

SEQ ID NO: 47225 - DNA, 1585 bp, Arabidopsis thaliana
  misc_feature (1)..(1585): Ceres Seq. ID no. 12591622
  misc_feature: MA Experiment ID: 20000173 Result: Down-regulated in Transcription
  misc_feature: MA Experiment 20000173 PARAMETER Experiment Name: At_42deg_Heat_P Parameter: Age (day) Value: 14
  misc_feature: MA Experiment 20000173 PARAMETER Experiment Name: At_42deg_Heat_P Parameter: Organism Value: A. thaliana
  misc_feature: MA Experiment 20000173 PARAMETER Experiment Name: At_42deg_Heat_P Parameter: Plant Line Value: WS
  misc_feature: MA Experiment 20000173 PARAMETER Experiment Name: At_42deg_Heat_P Parameter: Temperature (deg C) Value: 42 vs. 22
  misc_feature: MA Experiment 20000173 PARAMETER Experiment Name: At_42deg_Heat_P Parameter: Timepoint (hr) Value: 6
  misc_feature: MA Experiment 20000173 PARAMETER Experiment Name: At_42deg_Heat_P Parameter: Tissue Value: Aerial
  misc_feature: MA Experiment ID: 20000180 Result: Down-regulated in Transcription
  misc_feature: MA Experiment 20000180 PARAMETER Experiment Name: At_Germinating_Seeds_P Parameter: Age (hr) Value: 24 vs. 0
  misc_feature: MA Experiment 20000180 PARAMETER Experiment Name: At_Germinating_Seeds_P Parameter: Tissue Value: Germinating Seeds
  misc_feature: MA Experiment ID: 20000184 Result: Down-regulated in Transcription
  misc_feature: MA Experiment 20000184 PARAMETER Experiment Name: At_Shoots__P Parameter: Age (day) Value: 7
  misc_feature: MA Experiment 20000184 PARAMETER Experiment Name: At_Shoots__P Parameter: Tissue Value: Shoots vs. Whole Plant
  misc_feature: MA Experiment ID: 20000234 Result: Down-regulated in Transcription
  misc_feature: MA Experiment 20000234 PARAMETER Experiment Name: At_Siliques_P Parameter: Age (day) Value: 21
  misc_feature: MA Experiment 20000234 PARAMETER Experiment Name: At_Siliques_P Parameter: Organism Value: A. thaliana
  misc_feature: MA Experiment 20000234 PARAMETER Experiment Name: At_Siliques_P Parameter: Plant Line Value: WS
  misc_feature: MA Experiment 20000234 PARAMETER Experiment Name: At_Siliques_P Parameter: Tissue Value: Less Than 5mm Siliques vs. Whole Plant
  misc_feature: MA Experiment ID: 20000264 Result: Down-regulated in Transcription
  misc_feature: MA Experiment 20000264 PARAMETER Experiment Name: At_Open_Flower_P Parameter: Age (day) Value: 21
  misc_feature: MA Experiment 20000264 PARAMETER Experiment Name: At_Open_Flower_P Parameter: Plant Line Value: WS
  misc_feature: MA Experiment 20000264 PARAMETER Experiment Name: At_Open_Flower_P Parameter: Tissue Value: Open Flower vs. Whole Plant
  misc_feature: MA Experiment ID: 20000286 Result: Down-regulated in Transcription
  misc_feature: MA Experiment 20000286 PARAMETER Experiment Name: At_Open_Flower_P Parameter: Age (day) Value: 21
  misc_feature: MA Experiment 20000286 PARAMETER Experiment Name: At_Open_Flower_P Parameter: Plant Line Value: WS
  misc_feature: MA Experiment 20000286 PARAMETER Experiment Name: At_Open_Flower_P Parameter: Tissue Value: Half Open vs. Whole Plant
  misc_feature: MA Experiment ID: 20000308 Result: Down-regulated in Transcription
  misc_feature: MA Experiment 20000308 PARAMETER Experiment Name: At_100mM_NaCl__P Parameter: Age (day) Value: 17
  misc_feature: MA Experiment 20000308 PARAMETER Experiment Name: At_100mM_NaCl__P Parameter: Organism Value: A. thaliana
  misc_feature: MA Experiment 20000308 PARAMETER Experiment Name: At_100mM_NaCl__P Parameter: Plant Line Value: WS
  misc_feature: MA Experiment 20000308 PARAMETER Experiment Name: At_100mM_NaCl__P Parameter: Timepoint (hr) Value: 72
  misc_feature: MA Experiment 20000308 PARAMETER Experiment Name: At_100mM_NaCl__P Parameter: Tissue Value: Whole Plant
  misc_feature: MA Experiment 20000308 PARAMETER Experiment Name: At_100mM_NaCl__P Parameter: Treatment Value: 100mM NaCl vs. No Treatment
  misc_feature: MA Experiment ID: 20000709 Result: Up-regulated in Transcription
  misc_feature: MA Experiment 20000709 PARAMETER Experiment Name: At_15mM_NH4NO3_L-to-H_P Parameter: Age (hr) Value: 14
  misc_feature: MA Experiment 20000709 PARAMETER Experiment Name: At_15mM_NH4NO3_L-to-H_P Parameter: Organism Value: A. thaliana
  misc_feature: MA Experiment 20000709 PARAMETER Experiment Name: At_15mM_NH4NO3_L-to-H_P Parameter: Plant Line Value: WS
  misc_feature: MA Experiment 20000709 PARAMETER Experiment Name: At_15mM_NH4NO3_L-to-H_P Parameter: Timepoint (hr) Value: 4
  misc_feature: MA Experiment 20000709 PARAMETER Experiment Name: At_15mM_NH4NO3_L-to-H_P Parameter: Tissue Value: Aerial
  misc_feature: MA Experiment 20000709 PARAMETER Experiment Name: At_15mM_NH4NO3_L-to-H_P Parameter: Treatment Value: 15mM NH4NO3 vs. 30mM Mannitol
  misc_feature: MA Experiment ID: 20001247 Result: Up-regulated in Transcription
  misc_feature: MA Experiment 20001247 PARAMETER Experiment Name: At_Far-red-induction_P Parameter: Age (day) Value: 7
  misc_feature: MA Experiment 20001247 PARAMETER Experiment Name: At_Far-red-induction_P Parameter: Light Value: Far-red vs. White
  misc_feature: MA Experiment 20001247 PARAMETER Experiment Name: At_Far-red-induction_P Parameter: Organism Value: A. thaliana
  misc_feature: MA Experiment 20001247 PARAMETER Experiment Name: At_Far-red-induction_P Parameter: Plant Line Value: Columbia
  misc_feature: MA Experiment 20001247 PARAMETER Experiment Name: At_Far-red-induction_P Parameter: Timepoint (hr) Value: 1
  misc_feature: MA Experiment 20001247 PARAMETER Experiment Name: At_Far-red-induction_P Parameter: Tissue Value: Whole Plant
  misc_feature: MA Experiment ID: 20001248 Result: Up-regulated in Transcription
  misc_feature: MA Experiment 20001248 PARAMETER Experiment Name: At_Far-red-induction_P Parameter: Age (day) Value: 7
  misc_feature: MA Experiment 20001248 PARAMETER Experiment Name: At_Far-red-induction_P Parameter: Light Value: Far-red vs. White
  misc_feature: MA Experiment 20001248 PARAMETER Experiment Name: At_Far-red-induction_P Parameter: Organism Value: A. thaliana
  misc_feature: MA Experiment 20001248 PARAMETER Experiment Name: At_Far-red-induction_P Parameter: Plant Line Value: Columbia
  misc_feature: MA Experiment 20001248 PARAMETER Experiment Name: At_Far-red-induction_P Parameter: Timepoint (hr) Value: 4
  misc_feature: MA Experiment 20001248 PARAMETER Experiment Name: At_Far-red-induction_P Parameter: Tissue Value: Whole Plant
  misc_feature: MA Experiment ID: 20001457 Result: Up-regulated in Transcription
  misc_feature: MA Experiment 20001457 PARAMETER Experiment Name: At_50mM_NH4NO3_L-to-H_P Parameter: Age (day) Value: Undefined
  misc_feature: MA Experiment 20001457 PARAMETER Experiment Name: At_50mM_NH4NO3_L-to-H_P Parameter: Organism Value: Undefined
  misc_feature: MA Experiment 20001457 PARAMETER Experiment Name: At_50mM_NH4NO3_L-to-H_P Parameter: Plant Line Value: Undefined
  misc_feature: MA Experiment 20001457 PARAMETER Experiment Name: At_50mM_NH4NO3_L-to-H_P Parameter: Timepoint (hr) Value: 0.5
  misc_feature: MA Experiment 20001457 PARAMETER Experiment Name: At_50mM_NH4NO3_L-to-H_P Parameter: Tissue Value: Siliques
  misc_feature: MA Experiment 20001457 PARAMETER Experiment Name: At_50mM_NH4NO3_L-to-H_P Parameter: Treatment Value: 50mM NH4NO3 vs. 100mM Manitol
  misc_feature: MA Experiment ID: 20001458 Result: Up-regulated in Transcription
  misc_feature: MA Experiment 20001458 PARAMETER Experiment Name: At_50mM_NH4NO3_L-to-H_P Parameter: Age (day) Value: Undefined
  misc_feature: MA Experiment 20001458 PARAMETER Experiment Name: At_50mM_NH4NO3_L-to-H_P Parameter: Organism Value: Undefined
  misc_feature: MA Experiment 20001458 PARAMETER Experiment Name: At_50mM_NH4NO3_L-to-H_P Parameter: Plant Line Value: Undefined
  misc_feature: MA Experiment 20001458 PARAMETER Experiment Name: At_50mM_NH4NO3_L-to-H_P Parameter: Timepoint (hr) Value: 2
  misc_feature: MA Experiment 20001458 PARAMETER Experiment Name: At_50mM_NH4NO3_L-to-H_P Parameter: Tissue Value: Siliques
  misc_feature: MA Experiment 20001458 PARAMETER Experiment Name: At_50mM_NH4NO3_L-to-H_P Parameter: Treatment Value: 50mM NH4NO3 vs. 100mM Manitol
  misc_feature: MA Experiment ID: 20001459 Result: Up-regulated in Transcription
  misc_feature: MA Experiment 20001459 PARAMETER Experiment Name: At_50mM_NH4NO3_L-to-H_P Parameter: Age (day) Value: Undefined
  misc_feature: MA Experiment 20001459 PARAMETER Experiment Name: At_50mM_NH4NO3_L-to-H_P Parameter: Organism Value: Undefined
  misc_feature: MA Experiment 20001459 PARAMETER Experiment Name: At_50mM_NH4NO3_L-to-H_P Parameter: Plant Line Value: Undefined
  misc_feature: MA Experiment 20001459 PARAMETER Experiment Name: At_50mM_NH4NO3_L-to-H_P Parameter: Timepoint (hr) Value: 4
  misc_feature: MA Experiment 20001459 PARAMETER Experiment Name: At_50mM_NH4NO3_L-to-H_P Parameter: Tissue Value: Siliques
  misc_feature: MA Experiment 20001459 PARAMETER Experiment Name: At_50mM_NH4NO3_L-to-H_P Parameter: Treatment Value: 50mM NH4NO3 vs. 100mM Manitol
  misc_feature: MA Experiment ID: 20001557 Result: Up-regulated in Transcription
  misc_feature: MA Experiment 20001557 PARAMETER Experiment Name: At_Drought_Soil_Dry_P Parameter: Age (day) Value: 27
  misc_feature: MA Experiment 20001557 PARAMETER Experiment Name: At_Drought_Soil_Dry_P Parameter: Organism Value: A. thaliana
  misc_feature: MA Experiment 20001557 PARAMETER Experiment Name: At_Drought_Soil_Dry_P Parameter: Plant Line Value: WS
  misc_feature: MA Experiment 20001557 PARAMETER Experiment Name: At_Drought_Soil_Dry_P Parameter: Post Timepoint (hr) Value: 3
  misc_feature: MA Experiment 20001557 PARAMETER Experiment Name: At_Drought_Soil_Dry_P Parameter: Post-Treatment Value: Re-Water vs. No Drought
  misc_feature: MA Experiment 20001557 PARAMETER Experiment Name: At_Drought_Soil_Dry_P Parameter: Timepoint (day) Value: 13
  misc_feature: MA Experiment 20001557 PARAMETER Experiment Name: At_Drought_Soil_Dry_P Parameter: Treatment Value: Drought vs. No Drought
  misc_feature: MA Experiment ID: 20001756 Result: Up-regulated in Transcription
  misc_feature: MA Experiment 20001756 PARAMETER Experiment Name: At_50mM_NH4NO3_L-to-H_P Parameter: Timepoint (hr) Value: 4
  misc_feature: MA Experiment 20001756 PARAMETER Experiment Name: At_50mM_NH4NO3_L-to-H_P Parameter: Tissue Value: Leaf
  misc_feature: MA Experiment 20001756 PARAMETER Experiment Name: At_50mM_NH4NO3_L-to-H_P Parameter: Treatment Value: 50mM NH4NO3 vs 100mM Mannitol
  misc_feature: MA Experiment ID: 20001759 Result: Up-regulated in Transcription
  misc_feature: MA Experiment 20001759 PARAMETER Experiment Name: At_50mM_NH4NO3_L-to-H_P Parameter: Timepoint (hr) Value: 1
  misc_feature: MA Experiment 20001759 PARAMETER Experiment Name: At_50mM_NH4NO3_L-to-H_P Parameter: Tissue Value: Siliques
  misc_feature: MA Experiment 20001759 PARAMETER Experiment Name: At_50mM_NH4NO3_L-to-H_P Parameter: Treatment Value: 50mM NH4NO3 vs 100mM Mannitol
  misc_feature: MA Experiment ID: 20001760 Result: Up-regulated in Transcription
  misc_feature: MA Experiment 20001760 PARAMETER Experiment Name: At_50mM_NH4NO3_L-to-H_P Parameter: Timepoint (hr) Value: 2
  misc_feature: MA Experiment 20001760 PARAMETER Experiment Name: At_50mM_NH4NO3_L-to-H_P Parameter: Tissue Value: Siliques
  misc_feature: MA Experiment 20001760 PARAMETER Experiment Name: At_50mM_NH4NO3_L-to-H_P Parameter: Treatment Value: 50mM NH4NO3 vs 100mM Mannitol
gtcttgcttcttctttacccttttcttgtttccaatcaaatcctctaaagtttcgttctttgttctaagttttctgaaggagtgatatttgtttgtggtgtggttagagaaatgaatcggagacagcaagtgaaacgtagagtaggtaaatatgaagttggaagaacaattggagaaggaacgtttgctaaagttaagtttgctagaaactctgaaactggagaacctgttgctctcaagattcttgataaagagaaagttctcaagcataaaatggctgaacagattagaagagagatagctactatgaagttgataaaacatccaaatgttgttcaattatatgaggtgatggcaagtaagacgaaaatatttatcatcttggagtatgttacaggaggagaactctttgataagattgtaaatgatgggcggatgaaagaagatgaggcgcggagatatttccaacagcttatacatgctgtggactactgtcatagcagaggggtctaccatagagacctcaagcctgaaaatttactattggactcctatggaaacctcaagatctcagattttggattaagtgctttgtcccaacaagtcagggatgatggactcttgcatacatcgtgtggaacaccaaactacgttgctcctgaggttctcaatgatagaggctatgatggagcaacagctgacatgtggtcatgcggtgttgtactctatgtcctgcttgcaggttacttaccttttgatgattctaatctaatgaatctttataaaaaaatatcatctggtgaattcaactgtcctccgtggctctcactcggtgccatgaaactcatcactagaatcttagatccgaatccgatgactcgtgtaacaccgcaagaggttttcgaagatgaatggttcaagaaagattacaagccacctgttttcgaggagagggatgattcaaacatggacgatattgatgctgttttcaaggactctgaggaacatcttgttactgagaagagagaagaacagccagcggcgatcaatgccttcgagatcatttcaatgtcaaggggacttaacctagagaatctgtttgatccagaacaggaatttaagagggaaacaaggataacattgagaggaggcgcgaatgagatcatcgagaagatagaagaagctgcaaagcctctcggtttcgatgttcaaaagaagaactacaagatgaggcttgagaatgtgaaggctggaagaaaggggaatctcaatgtagcgacagagatattccaagtagcgccaagtcttcatatggttcaagtatcgaagtcgaaaggagacactctcgaatttcacaagttctataagaagctctctaattctctggagcaagtagtctggacgaataacgaagttaagaaagaaacagcaaagtgatgtatgagagttttcttttgggacaattcttgctttctttgtgtataagagcttttttgctttaccggctactttgtgtggatgatgagaaagggagtgggattggttttgtgtaaaagaaaggtgtaaatatgaactgcattactcg

SEQ ID NO: 47226 - protein, 441 aa, Arabidopsis thaliana
  peptide (1)..(441): Ceres Seq. ID no. 12591623
  misc_feature (14)..(269): Pfam Name: Protein kinase domain Pfam Description: Protein kinase domain
  misc_feature (8)..(438): Homolog of NCBI NO: 30677901 NR Description: CBL-interacting protein kinase 9 [Arabidopsis
  misc_feature (8)..(438): Homolog of NCBI NO: 30677898 NR Description: CBL-interacting protein kinase 9 [Arabidopsis
  misc_feature (8)..(438): Homolog of NCBI NO: 14423524 NR Description: similar to wpk4 protein kinase [Arabidopsis
  misc_feature (8)..(438): Homolog of NCBI NO: 15223317 NR Description: serine threonine kinase, putative
  misc_feature (8)..(438): Homolog of NCBI NO: 25387051 NR Description: probable serine/threonine kinase
  misc_feature (8)..(438): Homolog of NCBI NO: 18397430 NR Description: serine/threonine kinase, putative
  misc_feature (1)..(434): Homolog of NCBI NO: 30688193 NR Description: NAF specific protein kinase family [Arabidopsis
  misc_feature (6)..(440): Homolog of NCBI NO: 7446372 NR Description: probable serine/threonine kinase (EC 2.7.1.-)
  misc_feature (6)..(436): Homolog of NCBI NO: 7446371 NR Description: probable serine/threonine kinase (EC 2.7.1.-)
  misc_feature (1)..(441): Homolog of NCBI NO: 30683336 NR Description: CBL-interacting protein kinase 3 [Arabidopsis
MNRRQQVKRRVGKYEVGRTIGEGTFAKVKFARNSETGEPVALKILDKEKVLKHKMAEQIRREIATMKLIKHPNVVQLYEVMASKTKIFIILEYVTGGELFDKIVNDGRMKEDEARRYFQQLIHAVDYCHSRGVYHRDLKPENLLLDSYGNLKISDFGLSALSQQVRDDGLLHTSCGTPNYVAPEVLNDRGYDGATADMWSCGVVLYVLLAGYLPFDDSNLMNLYKKISSGEFNCPPWLSLGAMKLITRILDPNPMTRVTPQEVFEDEWFKKDYKPPVFEERDDSNMDDIDAVFKDSEEHLVTEKREEQPAAINAFEIISMSRGLNLENLFDPEQEFKRETRITLRGGANEIIEKIEEAAKPLGFDVQKKNYKMRLENVKAGRKGNLNVATEIFQVAPSLHMVQVSKSKGDTLEFHKFYKKLSNSLEQVVWTNNEVKKETAK

SEQ ID NO: 47227 - protein, 387 aa, Arabidopsis thaliana
  peptide (1)..(387): Ceres Seq. ID no. 12591624
  misc_feature (1)..(215): Pfam Name: Protein kinase domain Pfam Description: Protein kinase domain
  misc_feature (1)..(384): Homolog of NCBI NO: 30677901 NR Description: CBL-interacting protein kinase 9 [Arabidopsis
  misc_feature (1)..(384): Homolog of NCBI NO: 30677898 NR Description: CBL-interacting protein kinase 9 [Arabidopsis
  misc_feature (1)..(384): Homolog of NCBI NO: 14423524 NR Description: similar to wpk4 protein kinase [Arabidopsis
  misc_feature (1)..(384): Homolog of NCBI NO: 15223317 NR Description: serine threonine kinase, putative
  misc_feature (1)..(384): Homolog of NCBI NO: 25387051 NR Description: probable serine/threonine kinase
  misc_feature (1)..(384): Homolog of NCBI NO: 18397430 NR Description: serine/threonine kinase, putative
  misc_feature (1)..(380): Homolog of NCBI NO: 30688193 NR Description: NAF specific protein kinase family [Arabidopsis
  misc_feature (1)..(386): Homolog of NCBI NO: 7446372 NR Description: probable serine/threonine kinase (EC 2.7.1.-)
  misc_feature (1)..(382): Homolog of NCBI NO: 7446371 NR Description: probable serine/threonine kinase (EC 2.7.1.-)
  misc_feature (1)..(387): Homolog of NCBI NO: 30683336 NR Description: CBL-interacting protein kinase 3 [Arabidopsis
MAEQIRREIATMKLIKHPNVVQLYEVMASKTKIFIILEYVTGGELFDKIVNDGRMKEDEARRYFQQLIHAVDYCHSRGVYHRDLKPENLLLDSYGNLKISDFGLSALSQQVRDDGLLHTSCGTPNYVAPEVLNDRGYDGATADMWSCGVVLYVLLAGYLPFDDSNLMNLYKKISSGEFNCPPWLSLGAMKLITRILDPNPMTRVTPQEVFEDEWFKKDYKPPVFEERDDSNMDDIDAVFKDSEEHLVTEKREEQPAAINAFEIISMSRGLNLENLFDPEQEFKRETRITLRGGANEIIEKIEEAAKPLGFDVQKKNYKMRLENVKAGRKGNLNVATEIFQVAPSLHMVQVSKSKGDTLEFHKFYKKLSNSLEQVVWTNNEVKKETAK

SEQ ID NO: 47228 - protein, 376 aa, Arabidopsis thaliana
  peptide (1)..(376): Ceres Seq. ID no. 12591625
  misc_feature (1)..(204): Pfam Name: Protein kinase domain Pfam Description: Protein kinase domain
  misc_feature (1)..(373): Homolog of NCBI NO: 30677901 NR Description: CBL-interacting protein kinase 9 [Arabidopsis
  misc_feature (1)..(373): Homolog of NCBI NO: 30677898 NR Description: CBL-interacting protein kinase 9 [Arabidopsis
  misc_feature (1)..(373): Homolog of NCBI NO: 14423524 NR Description: similar to wpk4 protein kinase [Arabidopsis
  misc_feature (1)..(373): Homolog of NCBI NO: 15223317 NR Description: serine threonine kinase, putative
  misc_feature (1)..(373): Homolog of NCBI NO: 25387051 NR Description: probable serine/threonine kinase
  misc_feature (1)..(373): Homolog of NCBI NO: 18397430 NR Description: serine/threonine kinase, putative
  misc_feature (1)..(369): Homolog of NCBI NO: 30688193 NR Description: NAF specific protein kinase family [Arabidopsis
  misc_feature (1)..(375): Homolog of NCBI NO: 7446372 NR Description: probable serine/threonine kinase (EC 2.7.1.-)
  misc_feature (1)..(371): Homolog of NCBI NO: 7446371 NR Description: probable serine/threonine kinase (EC 2.7.1.-)
  misc_feature (1)..(376): Homolog of NCBI NO: 30683336 NR Description: CBL-interacting protein kinase 3 [Arabidopsis
MKLIKHPNVVQLYEVMASKTKIFIILEYVTGGELFDKIVNDGRMKEDEARRYFQQLIHAVDYCHSRGVYHRDLKPENLLLDSYGNLKISDFGLSALSQQVRDDGLLHTSCGTPNYVAPEVLNDRGYDGATADMWSCGVVLYVLLAGYLPFDDSNLMNLYKKISSGEFNCPPWLSLGAMKLITRILDPNPMTRVTPQEVFEDEWFKKDYKPPVFEERDDSNMDDIDAVFKDSEEHLVTEKREEQPAAINAFEIISMSRGLNLENLFDPEQEFKRETRITLRGGANEIIEKIEEAAKPLGFDVQKKNYKMRLENVKAGRKGNLNVATEIFQVAPSLHMVQVSKSKGDTLEFHKFYKKLSNSLEQVVWTNNEVKKETAK

SEQ ID NO: 47229 - DNA, 1565 bp, Arabidopsis thaliana
  misc_feature (1)..(1565): Ceres Seq. ID no. 13588273
  misc_feature: MA Experiment ID: 20000184 Result: Down-regulated in Transcription
  misc_feature: MA Experiment 20000184 PARAMETER Experiment Name: At_Shoots__P Parameter: Age (day) Value: 7
  misc_feature: MA Experiment 20000184 PARAMETER Experiment Name: At_Shoots__P Parameter: Tissue Value: Shoots vs. Whole Plant
  misc_feature: MA Experiment ID: 20000234 Result: Down-regulated in Transcription
  misc_feature: MA Experiment 20000234 PARAMETER Experiment Name: At_Siliques_P Parameter: Age (day) Value: 21
  misc_feature: MA Experiment 20000234 PARAMETER Experiment Name: At_Siliques_P Parameter: Organism Value: A. thaliana
  misc_feature: MA Experiment 20000234 PARAMETER Experiment Name: At_Siliques_P Parameter: Plant Line Value: WS
  misc_feature: MA Experiment 20000234 PARAMETER Experiment Name: At_Siliques_P Parameter: Tissue Value: Less Than 5mm Siliques vs. Whole Plant
  misc_feature: MA Experiment ID: 20000437 Result: Up-regulated in Transcription
  misc_feature: MA Experiment 20000437 PARAMETER Experiment Name: At_Drought_P Parameter: Age (day) Value: 8
  misc_feature: MA Experiment 20000437 PARAMETER Experiment Name: At_Drought_P Parameter: Organism Value: A. thaliana
  misc_feature: MA Experiment 20000437 PARAMETER Experiment Name: At_Drought_P Parameter: Plant Line Value: WS
  misc_feature: MA Experiment 20000437 PARAMETER Experiment Name: At_Drought_P Parameter: Timepoint (hr) Value: 24
  misc_feature: MA Experiment 20000437 PARAMETER Experiment Name: At_Drought_P Parameter: Tissue Value: Whole Plant
  misc_feature: MA Experiment 20000437 PARAMETER Experiment Name: At_Drought_P Parameter: Treatment Value: Drought vs. No Drought
  misc_feature: MA Experiment ID: 20001248 Result: Up-regulated in Transcription
  misc_feature: MA Experiment 20001248 PARAMETER Experiment Name: At_Far-red-induction_P Parameter: Age (day) Value: 7
  misc_feature: MA Experiment 20001248 PARAMETER Experiment Name: At_Far-red-induction_P Parameter: Light Value: Far-red vs. White
  misc_feature: MA Experiment 20001248 PARAMETER Experiment Name: At_Far-red-induction_P Parameter: Organism Value: A. thaliana
  misc_feature: MA Experiment 20001248 PARAMETER Experiment Name: At_Far-red-induction_P Parameter: Plant Line Value: Columbia
  misc_feature: MA Experiment 20001248 PARAMETER Experiment Name: At_Far-red-induction_P Parameter: Timepoint (hr) Value: 4
  misc_feature: MA Experiment 20001248 PARAMETER Experiment Name: At_Far-red-induction_P Parameter: Tissue Value: Whole Plant
  misc_feature: MA Experiment ID: 20001450 Result: Up-regulated in Transcription
  misc_feature: MA Experiment 20001450 PARAMETER Experiment Name: At_Far-red-induction_P Parameter: Age (day) Value: 7
  misc_feature: MA Experiment 20001450 PARAMETER Experiment Name: At_Far-red-induction_P Parameter: Light Value: Far-red vs. White
  misc_feature: MA Experiment 20001450 PARAMETER Experiment Name: At_Far-red-induction_P Parameter: Organism Value: A. thaliana
  misc_feature: MA Experiment 20001450 PARAMETER Experiment Name: At_Far-red-induction_P Parameter: Plant Line Value: Columbia
  misc_feature: MA Experiment 20001450 PARAMETER Experiment Name: At_Far-red-induction_P Parameter: Timepoint (hr) Value: 8
  misc_feature: MA Experiment 20001450 PARAMETER Experiment Name: At_Far-red-induction_P Parameter: Tissue Value: Whole Plant
  misc_feature: MA Experiment ID: 20001905 Result: Up-regulated in Transcription
  misc_feature: MA Experiment 20001905 PARAMETER Experiment Name: At_Drought_Reproduction_P Parameter: Age (day) Value: 40
  misc_feature: MA Experiment 20001905 PARAMETER Experiment Name: At_Drought_Reproduction_P Parameter: Organism Value: A. thaliana
  misc_feature: MA Experiment 20001905 PARAMETER Experiment Name: At_Drought_Reproduction_P Parameter: Plant Line Value: WS
  misc_feature: MA Experiment 20001905 PARAMETER Experiment Name: At_Drought_Reproduction_P Parameter: Timepoint (day) Value: 10
  misc_feature: MA Experiment 20001905 PARAMETER Experiment Name: At_Drought_Reproduction_P Parameter: Tissue Value: Rosettes
  misc_feature: MA Experiment 20001905 PARAMETER Experiment Name: At_Drought_Reproduction_P Parameter: Treatment Value: Drought vs. No Drought
tcgattggccaaatcggccctcgagagacttgtgagagatccccaaaaaaatggcatggcttgctagatccattgcgaattctctgaagatcgatgaggaagaatatgatcaaaaggaaacgattaagaccaattcgattgaaaattccggctcagatcaaccgtcttcgccatcggtgttgcaaacacagtctccacgaggcgtgaaggaagacatctctgaactcaccaagaccttaagaagtcagctacggggcgttgcttctttcctcgcgccacctccttcttcttccgatacggcggatcatgtggatgaggagactcggaagtcatcggatctcgcggaaggtgatgaggatctgattgctggaatcaggaacgatttcgttgagatcggaggtagatttaagactgggatctcgaaactctctggaaacttaccggtatcgaagtttacaaatatggcttcgaatttcttgcaattgggatcggaaggtgtggattcgaagaaccgtgatgttgcgattggaaatgcaattggtgtgacggaggaagtagttttgtttgctagagatcttgctctgcatcctgagacttggcttgattttccttttcctgacgaggatgataactttgatgactttgaaatgactgatgcccaatatgagcatgcgttggctgtggagaatcttgcatcgagtctggctgctttgaggattgagctttgtcctgcgtacatgagcgagtattgcttctggaggatttactttgtacttgtgcatcctatattcagcaaacatgatgccttgactctctcaactcctcaggtacttgaatcaagagcactattatctcacgagctgttgcgtaagagaaacaaagatacagtagtggtgccagagagtagtgatagaggagctgatagtgaaaatgtggaacctctttttcaacctactaatccttcacccaaatcagaaccagaacctgtgaaaacgatcactgtcgaaacaatacattcggctgagagatctgagtttgagacagagaagcacacagtcgagaccaaggaggtacaagttgttgataagcctgtcatcgaagaaagaccagcaccagcgtaccatgacaagccggtgcagagcctagtcactggttcttcacctagagttattgatgttcaagtggatgatgatgctgatgattggttgaaggatgaagataatgcaggaactgttagtgccaccaccaaccatcttgtgcaggatgttgatgaagatgtgtcgttcagtgatcttgaagaagacgacgatgatgtgcctgtaagttacaagaaataattcctgattccaaaagacctcaccattactccaaaaggctggctctggaagaataatgtcccacggctggtcaggtaagcgagacgaagatagaaatcaaacgatgggcttgaatgttgatgacgaacatggatgctatatttgtgatcctatacgttaattaaatttatgtttgtgaataccttttgtaaacgcttgccttttcaaaagatgcatggtttgttttgt

SEQ ID NO: 47230 - protein, 428 aa, Arabidopsis thaliana
  peptide (1)..(428): Ceres Seq. ID no. 13588274
  misc_feature (197)..(243): Pfam Name: BSD domain Pfam Description: BSD domain
  misc_feature (15)..(420): Homolog of NCBI NO: 6573740 NR Description: F20B24.15 [Arabidopsis thaliana]
  misc_feature (1)..(160): Homolog of NCBI NO: 18425006 NR Description: expressed protein [Arabidopsis thaliana]
  misc_feature (15)..(394): Homolog of NCBI NO: 18391195 NR Description: expressed protein [Arabidopsis thaliana]
  misc_feature (15)..(394): Homolog of NCBI NO: 21555533 NR Description: unknown [Arabidopsis thaliana]
  misc_feature (1)..(421): Homolog of NCBI NO: 34909848 NR Description: OSJNBb0053G03.5 [Oryza sativa (japonica
  misc_feature (1)..(142): Homolog of NCBI NO: 28273391 NR Description: putative BSD domain containing protein
  misc_feature (161)..(352): Homolog of NCBI NO: 28273391 NR Description: putative BSD domain containing protein
  misc_feature (1)..(427): Homolog of NCBI NO: 7486518 NR Description: hypothetical protein F6H11.10 - Arabidopsis
  misc_feature (35)..(427): Homolog of NCBI NO: 18425006 NR Description: expressed protein [Arabidopsis thaliana]
  misc_feature (1)..(428): Homolog of NCBI NO: 15229611 NR Description: expressed protein [Arabidopsis thaliana]
MAWLARSIANSLKIDEEEYDQKETIKTNSIENSGSDQPSSPSVLQTQSPRGVKEDISELTKTLRSQLRGVASFLAPPPSSSDTADHVDEETRKSSDLAEGDEDLIAGIRNDFVEIGGRFKTGISKLSGNLPVSKFTNMASNFLQLGSEGVDSKNRDVAIGNAIGVTEEVVLFARDLALHPETWLDFPFPDEDDNFDDFEMTDAQYEHALAVENLASSLAALRIELCPAYMSEYCFWRIYFVLVHPIFSKHDALTLSTPQVLESRALLSHELLRKRNKDTVVVPESSDRGADSENVEPLFQPTNPSPKSEPEPVKTITVETIHSAERSEFETEKHTVETKEVQVVDKPVIEERPAPAYHDKPVQSLVTGSSPRVIDVQVDDDADDWLKDEDNAGTVSATTNHLVQDVDEDVSFSDLEEDDDDVPVSYKK

SEQ ID NO: 47231 - protein, 291 aa, Arabidopsis thaliana
  peptide (1)..(291): Ceres Seq. ID no. 13588275
  misc_feature (60)..(106): Pfam Name: BSD domain Pfam Description: BSD domain
  misc_feature (1)..(254): Homolog of NCBI NO: 21592796 NR Description: unknown [Arabidopsis thaliana]
  misc_feature (1)..(283): Homolog of NCBI NO: 6573740 NR Description: F20B24.15 [Arabidopsis thaliana]
  misc_feature (1)..(23): Homolog of NCBI NO: 18425006 NR Description: expressed protein [Arabidopsis thaliana]
  misc_feature (1)..(257): Homolog of NCBI NO: 18391195 NR Description: expressed protein [Arabidopsis thaliana]
  misc_feature (1)..(257): Homolog of NCBI NO: 21555533 NR Description: unknown [Arabidopsis thaliana]
  misc_feature (1)..(284): Homolog of NCBI NO: 34909848 NR Description: OSJNBb0053G03.5 [Oryza sativa (japonica
  misc_feature (24)..(215): Homolog of NCBI NO: 28273391 NR Description: putative BSD domain containing protein
  misc_feature (1)..(290): Homolog of NCBI NO: 7486518 NR Description: hypothetical protein F6H11.10 - Arabidopsis
  misc_feature (1)..(290): Homolog of NCBI NO: 18425006 NR Description: expressed protein [Arabidopsis thaliana]
  misc_feature (1)..(291): Homolog of NCBI NO: 15229611 NR Description: expressed protein [Arabidopsis thaliana]
MASNFLQLGSEGVDSKNRDVAIGNAIGVTEEVVLFARDLALHPETWLDFPFPDEDDNFDDFEMTDAQYEHALAVENLASSLAALRIELCPAYMSEYCFWRIYFVLVHPIFSKHDALTLSTPQVLESRALLSHELLRKRNKDTVVVPESSDRGADSENVEPLFQPTNPSPKSEPEPVKTITVETIHSAERSEFETEKHTVETKEVQVVDKPVIEERPAPAYHDKPVQSLVTGSSPRVIDVQVDDDADDWLKDEDNAGTVSATTNHLVQDVDEDVSFSDLEEDDDDVPVSYKK

SEQ ID NO: 47232 - protein, 229 aa, Arabidopsis thaliana
  peptide (1)..(229): Ceres Seq. ID no. 13588276
  misc_feature (1)..(44): Pfam Name: BSD domain Pfam Description: BSD domain
  misc_feature (1)..(192): Homolog of NCBI NO: 18396945 NR Description: expressed protein [Arabidopsis thaliana]
  misc_feature (1)..(192): Homolog of NCBI NO: 21592796 NR Description: unknown [Arabidopsis thaliana]
  misc_feature (1)..(221): Homolog of NCBI NO: 6573740 NR Description: F20B24.15 [Arabidopsis thaliana]
  misc_feature (1)..(195): Homolog of NCBI NO: 18391195 NR Description: expressed protein [Arabidopsis thaliana]
  misc_feature (1)..(195): Homolog of NCBI NO: 21555533 NR Description: unknown [Arabidopsis thaliana]
  misc_feature (1)..(222): Homolog of NCBI NO: 34909848 NR Description: OSJNBb0053G03.5 [Oryza sativa (japonica
  misc_feature (1)..(153): Homolog of NCBI NO: 28273391 NR Description: putative BSD domain containing protein
  misc_feature (1)..(228): Homolog of NCBI NO: 7486518 NR Description: hypothetical protein F6H11.10 - Arabidopsis
  misc_feature (1)..(228): Homolog of NCBI NO: 18425006 NR Description: expressed protein [Arabidopsis thaliana]
  misc_feature (1)..(229): Homolog of NCBI NO: 15229611 NR Description: expressed protein [Arabidopsis thaliana]
MTDAQYEHALAVENLASSLAALRIELCPAYMSEYCFWRIYFVLVHPIFSKHDALTLSTPQVLESRALLSHELLRKRNKDTVVVPESSDRGADSENVEPLFQPTNPSPKSEPEPVKTITVETIHSAERSEFETEKHTVETKEVQVVDKPVIEERPAPAYHDKPVQSLVTGSSPRVIDVQVDDDADDWLKDEDNAGTVSATTNHLVQDVDEDVSFSDLEEDDDDVPVSYKK

SEQ ID NO: 47233 - DNA, 1290 bp, Arabidopsis thaliana
  misc_feature (1)..(1290): Ceres Seq. ID no. 14307597
  misc_feature: MA Experiment ID: 20000171 Result: Up-regulated in Transcription
  misc_feature: MA Experiment 20000171 PARAMETER Experiment Name: At_42deg_Heat_P Parameter: Age (day) Value: 14
  misc_feature: MA Experiment 20000171 PARAMETER Experiment Name: At_42deg_Heat_P Parameter: Organism Value: A. thaliana
  misc_feature: MA Experiment 20000171 PARAMETER Experiment Name: At_42deg_Heat_P Parameter: Plant Line Value: WS
  misc_feature: MA Experiment 20000171 PARAMETER Experiment Name: At_42deg_Heat_P Parameter: Temperature (deg C) Value: 42 vs. 22
  misc_feature: MA Experiment 20000171 PARAMETER Experiment Name: At_42deg_Heat_P Parameter: Timepoint (hr) Value: 1
  misc_feature: MA Experiment 20000171 PARAMETER Experiment Name: At_42deg_Heat_P Parameter: Tissue Value: Aerial
  misc_feature: MA Experiment ID: 20000173 Result: Up-regulated in Transcription
  misc_feature: MA Experiment 20000173 PARAMETER Experiment Name: At_42deg_Heat_P Parameter: Age (day) Value: 14
  misc_feature: MA Experiment 20000173 PARAMETER Experiment Name: At_42deg_Heat_P Parameter: Organism Value: A. thaliana
  misc_feature: MA Experiment 20000173 PARAMETER Experiment Name: At_42deg_Heat_P Parameter: Plant Line Value: WS
  misc_feature: MA Experiment 20000173 PARAMETER Experiment Name: At_42deg_Heat_P Parameter: Temperature (deg C) Value: 42 vs. 22
  misc_feature: MA Experiment 20000173 PARAMETER Experiment Name: At_42deg_Heat_P Parameter: Timepoint (hr) Value: 6
  misc_feature: MA Experiment 20000173 PARAMETER Experiment Name: At_42deg_Heat_P Parameter: Tissue Value: Aerial
  misc_feature: MA Experiment ID: 20000180 Result: Up-regulated in Transcription
  misc_feature: MA Experiment 20000180 PARAMETER Experiment Name: At_Germinating_Seeds_P Parameter: Age (hr) Value: 24 vs. 0
  misc_feature: MA Experiment 20000180 PARAMETER Experiment Name: At_Germinating_Seeds_P Parameter: Tissue Value: Germinating Seeds
  misc_feature: MA Experiment ID: 20000185 Result: Up-regulated in Transcription
  misc_feature: MA Experiment 20000185 PARAMETER Experiment Name: At_Roots__P Parameter: Age (day) Value: 7 vs. 21
  misc_feature: MA Experiment 20000185 PARAMETER Experiment Name: At_Roots__P Parameter: Organism Value: A. thaliana
  misc_feature: MA Experiment 20000185 PARAMETER Experiment Name: At_Roots__P Parameter: Tissue Value: Roots vs. Whole Plant
  misc_feature: MA Experiment ID: 20000227 Result: Up-regulated in Transcription
  misc_feature: MA Experiment 20000227 PARAMETER Experiment Name: At_Root-Tips-vs-Tops_P Parameter: Tissue Value: Root Tips vs. Root Tops
  misc_feature: MA Experiment ID: 20000234 Result: Up-regulated in Transcription
  misc_feature: MA Experiment 20000234 PARAMETER Experiment Name: At_Siliques_P Parameter: Age (day) Value: 21
  misc_feature: MA Experiment 20000234 PARAMETER Experiment Name: At_Siliques_P Parameter: Organism Value: A. thaliana
  misc_feature: MA Experiment 20000234 PARAMETER Experiment Name: At_Siliques_P Parameter: Plant Line Value: WS
  misc_feature: MA Experiment 20000234 PARAMETER Experiment Name: At_Siliques_P Parameter: Tissue Value: Less Than 5mm Siliques vs. Whole Plant
  misc_feature: MA Experiment ID: 20000439 Result: Up-regulated in Transcription
  misc_feature: MA Experiment 20000439 PARAMETER Experiment Name: At_Roots__P Parameter: Age (day) Value: 14 vs. 21
  misc_feature: MA Experiment 20000439 PARAMETER Experiment Name: At_Roots__P Parameter: Organism Value: A. thaliana
  misc_feature: MA Experiment 20000439 PARAMETER Experiment Name: At_Roots__P Parameter: Tissue Value: Roots vs. Whole Plant
  misc_feature: MA Experiment ID: 20000794 Result: Down-regulated in Transcription
  misc_feature: MA Experiment 20000794 PARAMETER Experiment Name: At_Petals_P Parameter: Age (day) Value: 23-25 days
  misc_feature: MA Experiment 20000794 PARAMETER Experiment Name: At_Petals_P Parameter: Plant Line Value: WS
  misc_feature: MA Experiment 20000794 PARAMETER Experiment Name: At_Petals_P Parameter: Tissue Value: Petals vs. Whole plant
  misc_feature: MA Experiment ID: 20001247 Result: Up-regulated in Transcription
  misc_feature: MA Experiment 20001247 PARAMETER Experiment Name: At_Far-red-induction_P Parameter: Age (day) Value: 7
  misc_feature: MA Experiment 20001247 PARAMETER Experiment Name: At_Far-red-induction_P Parameter: Light Value: Far-red vs. White
  misc_feature: MA Experiment 20001247 PARAMETER Experiment Name: At_Far-red-induction_P Parameter: Organism Value: A. thaliana
  misc_feature: MA Experiment 20001247 PARAMETER Experiment Name: At_Far-red-induction_P Parameter: Plant Line Value: Columbia
  misc_feature: MA Experiment 20001247 PARAMETER Experiment Name: At_Far-red-induction_P Parameter: Timepoint (hr) Value: 1
  misc_feature: MA Experiment 20001247 PARAMETER Experiment Name: At_Far-red-induction_P Parameter: Tissue Value: Whole Plant
  misc_feature: MA Experiment ID: 20001557 Result: Up-regulated in Transcription
  misc_feature: MA Experiment 20001557 PARAMETER Experiment Name: At_Drought_Soil_Dry_P Parameter: Age (day) Value: 27
  misc_feature: MA Experiment 20001557 PARAMETER Experiment Name: At_Drought_Soil_Dry_P Parameter: Organism Value: A. thaliana
  misc_feature: MA Experiment 20001557 PARAMETER Experiment Name: At_Drought_Soil_Dry_P Parameter: Plant Line Value: WS
  misc_feature: MA Experiment 20001557 PARAMETER Experiment Name: At_Drought_Soil_Dry_P Parameter: Post Timepoint (hr) Value: 3
  misc_feature: MA Experiment 20001557 PARAMETER Experiment Name: At_Drought_Soil_Dry_P Parameter: Post-Treatment Value: Re-Water vs. No Drought
  misc_feature: MA Experiment 20001557 PARAMETER Experiment Name: At_Drought_Soil_Dry_P Parameter: Timepoint (day) Value: 13
  misc_feature: MA Experiment 20001557 PARAMETER Experiment Name: At_Drought_Soil_Dry_P Parameter: Treatment Value: Drought vs. No Drought
  misc_feature: MA Experiment ID: 20001558 Result: Up-regulated in Transcription
  misc_feature: MA Experiment 20001558 PARAMETER Experiment Name: At_Drought_Soil_Dry_P Parameter: Age (day) Value: 27
  misc_feature: MA Experiment 20001558 PARAMETER Experiment Name: At_Drought_Soil_Dry_P Parameter: Organism Value: A. thaliana
  misc_feature: MA Experiment 20001558 PARAMETER Experiment Name: At_Drought_Soil_Dry_P Parameter: Plant Line Value: WS
  misc_feature: MA Experiment 20001558 PARAMETER Experiment Name: At_Drought_Soil_Dry_P Parameter: Post Timepoint (hr) Value: 6
  misc_feature: MA Experiment 20001558 PARAMETER Experiment Name: At_Drought_Soil_Dry_P Parameter: Post-Treatment Value: Re-Water vs. No Drought
  misc_feature: MA Experiment 20001558 PARAMETER Experiment Name: At_Drought_Soil_Dry_P Parameter: Timepoint (day) Value: 13
  misc_feature: MA Experiment 20001558 PARAMETER Experiment Name: At_Drought_Soil_Dry_P Parameter: Treatment Value: Drought vs. No Drought
  misc_feature: MA Experiment ID: 20001560 Result: Up-regulated in Transcription
  misc_feature: MA Experiment 20001560 PARAMETER Experiment Name: At_Drought_Soil_Dry_P Parameter: Age (day) Value: 28
  misc_feature: MA Experiment 20001560 PARAMETER Experiment Name: At_Drought_Soil_Dry_P Parameter: Organism Value: A. thaliana
  misc_feature: MA Experiment 20001560 PARAMETER Experiment Name: At_Drought_Soil_Dry_P Parameter: Plant Line Value: WS
  misc_feature: MA Experiment 20001560 PARAMETER Experiment Name: At_Drought_Soil_Dry_P Parameter: Post Timepoint (hr) Value: None
  misc_feature: MA Experiment 20001560 PARAMETER Experiment Name: At_Drought_Soil_Dry_P Parameter: Post-Treatment Value: None
  misc_feature: MA Experiment 20001560 PARAMETER Experiment Name: At_Drought_Soil_Dry_P Parameter: Timepoint (day) Value: 14
  misc_feature: MA Experiment 20001560 PARAMETER Experiment Name: At_Drought_Soil_Dry_P Parameter: Treatment Value: Drought vs. No Drought
  misc_feature: MA Experiment ID: 20001906 Result: Down-regulated in Transcription
  misc_feature: MA Experiment 20001906 PARAMETER Experiment Name: At_Drought_Reproduction_P Parameter: Age (day) Value: 35
  misc_feature: MA Experiment 20001906 PARAMETER Experiment Name: At_Drought_Reproduction_P Parameter: Organism Value: A. thaliana
  misc_feature: MA Experiment 20001906 PARAMETER Experiment Name: At_Drought_Reproduction_P Parameter: Plant Line Value: WS
  misc_feature: MA Experiment 20001906 PARAMETER Experiment Name: At_Drought_Reproduction_P Parameter: Timepoint (day) Value: 5
  misc_feature: MA Experiment 20001906 PARAMETER Experiment Name: At_Drought_Reproduction_P Parameter: Tissue Value: Siliques
  misc_feature: MA Experiment 20001906 PARAMETER Experiment Name: At_Drought_Reproduction_P Parameter: Treatment Value: Drought vs. No Drought
atgttaaacgttatgggaaccaaaagattaccgtttcccggttctgtttttgaccttatccattgtgctcgttgtagagtcccttggcatattgaaggtggtaaacttcttttggaattgaaccgtgctttgaggccgggtggtttctttgtctggtcagcgactccagtctatagaaagaacgaggaagattctggtatatggaaagcaatgtcggaactcacaaaggcaatgtgctggaagctggtgacaattaagaaagacaaactgaatgaggttggtgccgccatataccaaaagccaacttcaaataaatgttacaacaaaagacctcaaaatgagccacctctctgcaaggattccgatgatcaaaatgcagcctggaatgttccacttgaggcatgtatgcataaagtgacagaagattcatcaaagcgaggagcagtgtggccaaacatgtggccagagagggttgaaactgcgcctgagtggttggattcgcaggaaggtgtttatggaaaacctgcaccagaagatttcacagcagaccaagagaagtggaaaactattgtctcaaaggcataccttaatgacatgggaatcgattggtctaatgtgagaaacgtgatggacatgagagcagtctatggaggatttgctgctgcgttgaaggatttgaagttatgggtgatgaacgtggttcctgtggatgcgccagatacacttcccatcatatatgaacgtggtttatttggaatctatcatgactggtgtgaatcattcaacacttatcccagaacttacgaccttctccatgccgatcatcttttctctaccctgaggaagaggtgcaatttggtgtcggtaatggctgagattgatcggattcttaggccacaaggaactttcatcataagggatgacatggaaacattaggagaagttgagaaaatggtgaaatctatgaaatggaaggttaaaatgacgcagtccaaagacaatgaaggcttgctttcaattgaaaagtcatggtggcgtcctgaagaaactgagacaatcaaatcggcaatcgcttaaacaagtcagaaaagaaaagaaaagcatcacttgaatatagttcagtaaaaaagttggttctttcacgcctttaaggcttgcttatcaaattcatttgaccttgtttcttagtagtatttgtatcttttggctttgagaaaagttgtatacataaattctggaatcataccgttagctctcaaaatgtatacaagatgagttttgttttgttct

SEQ ID NO: 47234 - protein, 358 aa, Arabidopsis thaliana
  peptide (1)..(358): Ceres Seq. ID no. 14307598
  misc_feature (1)..(342): Pfam Name: Putative methyltransferase Pfam Description: Putative methyltransferase
  misc_feature (2)..(351): Homolog of NCBI NO: 18405331 NR Description: dehydration-induced protein family [Arabidopsis
  misc_feature (5)..(347): Homolog of NCBI NO: 34915214 NR Description: unknown protein [Oryza sativa (japonica
  misc_feature (284)..(351): Homolog of NCBI NO: 38567836 NR Description: OSJNBb0020J19.14 [Oryza sativa (japonica
  misc_feature (1)..(286): Homolog of NCBI NO: 38567836 NR Description: OSJNBb0020J19.14 [Oryza sativa (japonica
  misc_feature (4)..(351): Homolog of NCBI NO: 15230391 NR Description: dehydration-induced protein-related [Arabidopsis
  misc_feature (4)..(351): Homolog of NCBI NO: 20161455 NR Description: ankyrin-like protein [Oryza sativa (japonica
  misc_feature (4)..(357): Homolog of NCBI NO: 30697941 NR Description: dehydration-induced protein-related [Arabidopsis
  misc_feature (1)..(358): Homolog of NCBI NO: 30690755 NR Description: dehydration-induced protein-related [Arabidopsis
  misc_feature (1)..(358): Homolog of NCBI NO: 25403070 NR Description: unknown protein, 55790-52851 [imported] -
  misc_feature (1)..(358): Homolog of NCBI NO: 15226271 NR Description: dehydration-induced protein-related [Arabidopsis
MLNVMGTKRLPFPGSVFDLIHCARCRVPWHIEGGKLLLELNRALRPGGFFVWSATPVYRKNEEDSGIWKAMSELTKAMCWKLVTIKKDKLNEVGAAIYQKPTSNKCYNKRPQNEPPLCKDSDDQNAAWNVPLEACMHKVTEDSSKRGAVWPNMWPERVETAPEWLDSQEGVYGKPAPEDFTADQEKWKTIVSKAYLNDMGIDWSNVRNVMDMRAVYGGFAAALKDLKLWVMNVVPVDAPDTLPIIYERGLFGIYHDWCESFNTYPRTYDLLHADHLFSTLRKRCNLVSVMAEIDRILRPQGTFIIRDDMETLGEVEKMVKSMKWKVKMTQSKDNEGLLSIEKSWWRPEETETIKSAIA

SEQ ID NO: 47235 - protein, 354 aa, Arabidopsis thaliana
  peptide (1)..(354): Ceres Seq. ID no. 14307599
  misc_feature (1)..(338): Pfam Name: Putative methyltransferase Pfam Description: Putative methyltransferase
  misc_feature (1)..(347): Homolog of NCBI NO: 18405331 NR Description: dehydration-induced protein family [Arabidopsis
  misc_feature (1)..(343): Homolog of NCBI NO: 34915214 NR Description: unknown protein [Oryza sativa (japonica
  misc_feature (280)..(347): Homolog of NCBI NO: 38567836 NR Description: OSJNBb0020J19.14 [Oryza sativa (japonica
  misc_feature (1)..(282): Homolog of NCBI NO: 38567836 NR Description: OSJNBb0020J19.14 [Oryza sativa (japonica
  misc_feature (1)..(347): Homolog of NCBI NO: 15230391 NR Description: dehydration-induced protein-related [Arabidopsis
  misc_feature (1)..(347): Homolog of NCBI NO: 20161455 NR Description: ankyrin-like protein [Oryza sativa (japonica
  misc_feature (1)..(353): Homolog of NCBI NO: 30697941 NR Description: dehydration-induced protein-related [Arabidopsis
  misc_feature (1)..(354): Homolog of NCBI NO: 30690755 NR Description: dehydration-induced protein-related [Arabidopsis
  misc_feature (1)..(354): Homolog of NCBI NO: 25403070 NR Description: unknown protein, 55790-52851 [imported] -
  misc_feature (1)..(354): Homolog of NCBI NO: 15226271 NR Description: dehydration-induced protein-related [Arabidopsis
MGTKRLPFPGSVFDLIHCARCRVPWHIEGGKLLLELNRALRPGGFFVWSATPVYRKNEEDSGIWKAMSELTKAMCWKLVTIKKDKLNEVGAAIYQKPTSNKCYNKRPQNEPPLCKDSDDQNAAWNVPLEACMHKVTEDSSKRGAVWPNMWPERVETAPEWLDSQEGVYGKPAPEDFTADQEKWKTIVSKAYLNDMGIDWSNVRNVMDMRAVYGGFAAALKDLKLWVMNVVPVDAPDTLPIIYERGLFGIYHDWCESFNTYPRTYDLLHADHLFSTLRKRCNLVSVMAEIDRILRPQGTFIIRDDMETLGEVEKMVKSMKWKVKMTQSKDNEGLLSIEKSWWRPEETETIKSAIA

SEQ ID NO: 47236 - protein, 288 aa, Arabidopsis thaliana
  peptide (1)..(288): Ceres Seq. ID no. 14307600
  misc_feature (1)..(272): Pfam Name: Putative methyltransferase Pfam Description: Putative methyltransferase
  misc_feature (1)..(281): Homolog of NCBI NO: 18405331 NR Description: dehydration-induced protein family [Arabidopsis
  misc_feature (1)..(277): Homolog of NCBI NO: 34915214 NR Description: unknown protein [Oryza sativa (japonica
  misc_feature (214)..(281): Homolog of NCBI NO: 38567836 NR Description: OSJNBb0020J19.14 [Oryza sativa (japonica
  misc_feature (1)..(216): Homolog of NCBI NO: 38567836 NR Description: OSJNBb0020J19.14 [Oryza sativa (japonica
  misc_feature (1)..(281): Homolog of NCBI NO: 15230391 NR Description: dehydration-induced protein-related [Arabidopsis
  misc_feature (1)..(281): Homolog of NCBI NO: 20161455 NR Description: ankyrin-like protein [Oryza sativa (japonica
  misc_feature (1)..(287): Homolog of NCBI NO: 30697941 NR Description: dehydration-induced protein-related [Arabidopsis
  misc_feature (1)..(288): Homolog of NCBI NO: 30690755 NR Description: dehydration-induced protein-related [Arabidopsis
  misc_feature (1)..(288): Homolog of NCBI NO: 25403070 NR Description: unknown protein, 55790-52851 [imported] -
  misc_feature (1)..(288): Homolog of NCBI NO: 15226271 NR Description: dehydration-induced protein-related [Arabidopsis
MSELTKAMCWKLVTIKKDKLNEVGAAIYQKPTSNKCYNKRPQNEPPLCKDSDDQNAAWNVPLEACMHKVTEDSSKRGAVWPNMWPERVETAPEWLDSQEGVYGKPAPEDFTADQEKWKTIVSKAYLNDMGIDWSNVRNVMDMRAVYGGFAAALKDLKLWVMNVVPVDAPDTLPIIYERGLFGIYHDWCESFNTYPRTYDLLHADHLFSTLRKRCNLVSVMAEIDRILRPQGTFIIRDDMETLGEVEKMVKSMKWKVKMTQSKDNEGLLSIEKSWWRPEETETIKSAIA

SEQ ID NO: 47237 - DNA, 1532 bp, Arabidopsis thaliana
  misc_feature (1)..(1532): Ceres Seq. ID no. 13588277
  misc_feature: MA Experiment ID: 20000180 Result: Up-regulated in Transcription
  misc_feature: MA Experiment 20000180 PARAMETER Experiment Name: At_Germinating_Seeds_P Parameter: Age (hr) Value: 24 vs. 0
  misc_feature: MA Experiment 20000180 PARAMETER Experiment Name: At_Germinating_Seeds_P Parameter: Tissue Value: Germinating Seeds
  misc_feature: MA Experiment ID: 20000184 Result: Up-regulated in Transcription
  misc_feature: MA Experiment 20000184 PARAMETER Experiment Name: At_Shoots__P Parameter: Age (day) Value: 7
  misc_feature: MA Experiment 20000184 PARAMETER Experiment Name: At_Shoots__P Parameter: Tissue Value: Shoots vs. Whole Plant
  misc_feature: MA Experiment ID: 20000286 Result: Up-regulated in Transcription
  misc_feature: MA Experiment 20000286 PARAMETER Experiment Name: At_Open_Flower_P Parameter: Age (day) Value: 21
  misc_feature: MA Experiment 20000286 PARAMETER Experiment Name: At_Open_Flower_P Parameter: Plant Line Value: WS
  misc_feature: MA Experiment 20000286 PARAMETER Experiment Name: At_Open_Flower_P Parameter: Tissue Value: Half Open vs. Whole Plant
  misc_feature: MA Experiment ID: 20000438 Result: Up-regulated in Transcription
  misc_feature: MA Experiment 20000438 PARAMETER Experiment Name: At_Shoots__P Parameter: Age (day) Value: 14
  misc_feature: MA Experiment 20000438 PARAMETER Experiment Name: At_Shoots__P Parameter: Tissue Value: Shoots vs. Whole Plant
  misc_feature: MA Experiment ID: 20001248 Result: Down-regulated in Transcription
  misc_feature: MA Experiment 20001248 PARAMETER Experiment Name: At_Far-red-induction_P Parameter: Age (day) Value: 7
  misc_feature: MA Experiment 20001248 PARAMETER Experiment Name: At_Far-red-induction_P Parameter: Light Value: Far-red vs. White
  misc_feature: MA Experiment 20001248 PARAMETER Experiment Name: At_Far-red-induction_P Parameter: Organism Value: A. thaliana
  misc_feature: MA Experiment 20001248 PARAMETER Experiment Name: At_Far-red-induction_P Parameter: Plant Line Value: Columbia
  misc_feature: MA Experiment 20001248 PARAMETER Experiment Name: At_Far-red-induction_P Parameter: Timepoint (hr) Value: 4
  misc_feature: MA Experiment 20001248 PARAMETER Experiment Name: At_Far-red-induction_P Parameter: Tissue Value: Whole Plant
gagtcctcacttctctcacccacaaagtcacagtaaccagaaacacgttccacatcctatgaatccaatcaaacctcagccactcggagtccgccacgtggtggccatgccttggccaggaagaggccacatcaacccaatgttaaacctctgcaaaagcctcgtccggcgagacccaaacctcaccgtcacattcgtcgtcaccgaagaatggctcgggttcatcgggtccgacccgaaacctaaccggatccatttcgccactctccccaacatcattccctccgagctcgtccgagccaacgacttcatcgccttcatcgacgccgtcctcaccagattagaagagccgttcgaacagctacttgaccgtctaaactctcctcccaccgcaatcatcgccgatacttacatcatttgggcagtacgtgtaggcacaaaaaggaatattccggtggcttctttctggactacgtcagccacgattctctccctcttcattaactccgatcttctcgcaagtcacggccattttccgatcgaaccatcagaatcaaaactagacgagattgttgattacatccccggtttatctccgacaagactcagtgacttacagatcttacacggctatagtcatcaagtcttcaatatattcaaaaagtctttcggtgagctttataaagctaagtatcttctcttcccttctgcttatgagctcgaaccaaaagccattgactttttcacttccaagtttgatttcccggtttactccactggtccgttaatacccttggaagaactatccgttggaaatgagaatagagaacttgattactttaagtggcttgatgagcaacctgaaagctctgttctttacatatctcaagggagttttctttcagtctccgaagctcagatggaggagattgttgtaggagttagagaggctggagttaagttcttttgggtggctcgtgggggtgagttaaagcttaaggaggctcttgaaggtagcttgggtgttgtggtgagctggtgtgatcagctacgtgttttgtgtcatgcggctataggcgggttttggacgcattgcgggtataactcgacattggaagggatatgttcgggagtaccgttgcttacatttcctgttttttgggatcagtttctgaatgctaagatgattgttgaggagtggagagttggaatggggatcgagaggaagaagcagatggagttgttgatagtgagtgatgagatcaaggaattggtaaaaaggtttatggatggagagagtgaagaagggaaagagatgagaagaaggacttgtgatctcagtgagatatgtcgtggagcggttgcgaaaggtggttcttctgatgctaacatcgatgctttcattaaagatattactaagatcgtgtgagttctattgttgttaatgattcaagtctatattagtatttgtataagtttgttaaagattcaaactttgtagagatttaagattgtttgtaaaactgttattt

SEQ ID NO: 47238 - protein, 475 aa, Arabidopsis thaliana
  peptide (1)..(475): Ceres Seq. ID no. 13588278
  misc_feature (36)..(475): Pfam Name: UDP-glucoronosyl and UDP-glucosyl transferase Pfam Description: UDP-glucoronosyl and UDP-glucosyl transferase
  misc_feature (84)..(468): Homolog of NCBI NO: 15226332 NR Description: glycosyltransferase family [Arabidopsis thaliana]
  misc_feature (32)..(473): Homolog of NCBI NO: 21536917 NR Description: putative glucosyltransferase [Arabidopsis
  misc_feature (84)..(473): Homolog of NCBI NO: 37534766 NR Description: putative putative glucosyltransferase
  misc_feature (84)..(471): Homolog of NCBI NO: 15228063 NR Description: UDP-glycosyltransferase family [Arabidopsis
  misc_feature (32)..(474): Homolog of NCBI NO: 7385017 NR Description: UDP-glucose:salicylic acid glucosyltransferase
  misc_feature (32)..(471): Homolog of NCBI NO: 34909048 NR Description: putative glucosyltransferase
  misc_feature (307)..(475): Homolog of NCBI NO: 22530984 NR Description: putative glucosyltransferase [Arabidopsis
  misc_feature (31)..(471): Homolog of NCBI NO: 34909046 NR Description: putative glucosyltransferase
  misc_feature (20)..(472): Homolog of NCBI NO: 15227716 NR Description: glycosyltransferase family [Arabidopsis thaliana]
  misc_feature (36)..(475): Homolog of NCBI NO: 15227717 NR Description: glycosyltransferase family [Arabidopsis thaliana]
SPHFSHPQSHSNQKHVPHPMNPIKPQPLGVRHVVAMPWPGRGHINPMLNLCKSLVRRDPNLTVTFVVTEEWLGFIGSDPKPNRIHFATLPNIIPSELVRANDFIAFIDAVLTRLEEPFEQLLDRLNSPPTAIIADTYIIWAVRVGTKRNIPVASFWTTSATILSLFINSDLLASHGHFPIEPSESKLDEIVDYIPGLSPTRLSDLQILHGYSHQVFNIFKKSFGELYKAKYLLFPSAYELEPKAIDFFTSKFDFPVYSTGPLIPLEELSVGNENRELDYFKWLDEQPESSVLYISQGSFLSVSEAQMEEIVVGVREAGVKFFWVARGGELKLKEALEGSLGVVVSWCDQLRVLCHAAIGGFWTHCGYNSTLEGICSGVPLLTFPVFWDQFLNAKMIVEEWRVGMGIERKKQMELLIVSDEIKELVKRFMDGESEEGKEMRRRTCDLSEICRGAVAKGGSSDANIDAFIKDITKIV

SEQ ID NO: 47239 - protein, 456 aa, Arabidopsis thaliana
  peptide (1)..(456): Ceres Seq. ID no. 13588279
  misc_feature (17)..(456): Pfam Name: UDP-glucoronosyl and UDP-glucosyl transferase Pfam Description: UDP-glucoronosyl and UDP-glucosyl transferase
  misc_feature (65)..(449): Homolog of NCBI NO: 15226332 NR Description: glycosyltransferase family [Arabidopsis thaliana]
  misc_feature (13)..(454): Homolog of NCBI NO: 21536917 NR Description: putative glucosyltransferase [Arabidopsis
  misc_feature (65)..(454): Homolog of NCBI NO: 37534766 NR Description: putative putative glucosyltransferase
  misc_feature (65)..(452): Homolog of NCBI NO: 15228063 NR Description: UDP-glycosyltransferase family [Arabidopsis
  misc_feature (13)..(455): Homolog of NCBI NO: 7385017 NR Description: UDP-glucose:salicylic acid glucosyltransferase
  misc_feature (13)..(452): Homolog of NCBI NO: 34909048 NR Description: putative glucosyltransferase
  misc_feature (288)..(456): Homolog of NCBI NO: 22530984 NR Description: putative glucosyltransferase [Arabidopsis
  misc_feature (12)..(452): Homolog of NCBI NO: 34909046 NR Description: putative glucosyltransferase
  misc_feature (1)..(453): Homolog of NCBI NO: 15227716 NR Description: glycosyltransferase family [Arabidopsis thaliana]
  misc_feature (17)..(456): Homolog of NCBI NO: 15227717 NR Description: glycosyltransferase family [Arabidopsis thaliana]
MNPIKPQPLGVRHVVAMPWPGRGHINPMLNLCKSLVRRDPNLTVTFVVTEEWLGFIGSDPKPNRIHFATLPNIIPSELVRANDFIAFIDAVLTRLEEPFEQLLDRLNSPPTAIIADTYIIWAVRVGTKRNIPVASFWTTSATILSLFINSDLLASHGHFPIEPSESKLDEIVDYIPGLSPTRLSDLQILHGYSHQVFNIFKKSFGELYKAKYLLFPSAYELEPKAIDFFTSKFDFPVYSTGPLIPLEELSVGNENRELDYFKWLDEQPESSVLYISQGSFLSVSEAQMEEIVVGVREAGVKFFWVARGGELKLKEALEGSLGVVVSWCDQLRVLCHAAIGGFWTHCGYNSTLEGICSGVPLLTFPVFWDQFLNAKMIVEEWRVGMGIERKKQMELLIVSDEIKELVKRFMDGESEEGKEMRRRTCDLSEICRGAVAKGGSSDANIDAFIKDITKIV

SEQ ID NO: 47240 - protein, 440 aa, Arabidopsis thaliana
  peptide (1)..(440): Ceres Seq. ID no. 13588280
  misc_feature (1)..(440): Pfam Name: UDP-glucoronosyl and UDP-glucosyl transferase Pfam Description: UDP-glucoronosyl and UDP-glucosyl transferase
  misc_feature (49)..(433): Homolog of NCBI NO: 15226332 NR Description: glycosyltransferase family [Arabidopsis thaliana]
  misc_feature (1)..(438): Homolog of NCBI NO: 21536917 NR Description: putative glucosyltransferase [Arabidopsis
  misc_feature (49)..(438): Homolog of NCBI NO: 37534766 NR Description: putative putative glucosyltransferase
  misc_feature (49)..(436): Homolog of NCBI NO: 15228063 NR Description: UDP-glycosyltransferase family [Arabidopsis
  misc_feature (1)..(439): Homolog of NCBI NO: 7385017 NR Description: UDP-glucose:salicylic acid glucosyltransferase
  misc_feature (1)..(436): Homolog of NCBI NO: 34909048 NR Description: putative glucosyltransferase
  misc_feature (272)..(440): Homolog of NCBI NO: 22530984 NR Description: putative glucosyltransferase [Arabidopsis
  misc_feature (1)..(436): Homolog of NCBI NO: 34909046 NR Description: putative glucosyltransferase
  misc_feature (1)..(437): Homolog of NCBI NO: 15227716 NR Description: glycosyltransferase family [Arabidopsis thaliana]
  misc_feature (1)..(440): Homolog of NCBI NO: 15227717 NR Description: glycosyltransferase family [Arabidopsis thaliana]
MPWPGRGHINPMLNLCKSLVRRDPNLTVTFVVTEEWLGFIGSDPKPNRIHFATLPNIIPSELVRANDFIAFIDAVLTRLEEPFEQLLDRLNSPPTAIIADTYIIWAVRVGTKRNIPVASFWTTSATILSLFINSDLLASHGHFPIEPSESKLDEIVDYIPGLSPTRLSDLQILHGYSHQVFNIFKKSFGELYKAKYLLFPSAYELEPKAIDFFTSKFDFPVYSTGPLIPLEELSVGNENRELDYFKWLDEQPESSVLYISQGSFLSVSEAQMEEIVVGVREAGVKFFWVARGGELKLKEALEGSLGVVVSWCDQLRVLCHAAIGGFWTHCGYNSTLEGICSGVPLLTFPVFWDQFLNAKMIVEEWRVGMGIERKKQMELLIVSDEIKELVKRFMDGESEEGKEMRRRTCDLSEICRGAVAKGGSSDANIDAFIKDITKIV

SEQ ID NO: 47241 - DNA, 1697 bp, Arabidopsis thaliana
  misc_feature (1)..(1697): Ceres Seq. ID no. 15168757
  misc_feature: MA Experiment ID: 20000315 Result: Down-regulated in Transcription
  misc_feature: MA Experiment 20000315 PARAMETER Experiment Name: At_14day_Shoots-Roots_Sub_P Parameter: Age (day) Value: 14
  misc_feature: MA Experiment 20000315 PARAMETER Experiment Name: At_14day_Shoots-Roots_Sub_P Parameter: Organism Value: A. thaliana
  misc_feature: MA Experiment 20000315 PARAMETER Experiment Name: At_14day_Shoots-Roots_Sub_P Parameter: Plant Line Value: WS
  misc_feature: MA Experiment 20000315 PARAMETER Experiment Name: At_14day_Shoots-Roots_Sub_P Parameter: Tissue Value: Shoots vs. Whole Plant
  misc_feature: MA Experiment ID: 20000347 Result: Up-regulated in Transcription
  misc_feature: MA Experiment 20000347 PARAMETER Experiment Name: At_2mM_SA_Sub_P Parameter: Age (day) Value: 14
  misc_feature: MA Experiment 20000347 PARAMETER Experiment Name: At_2mM_SA_Sub_P Parameter: Organism Value: A. thaliana
  misc_feature: MA Experiment 20000347 PARAMETER Experiment Name: At_2mM_SA_Sub_P Parameter: Plant Line Value: WS
  misc_feature: MA Experiment 20000347 PARAMETER Experiment Name: At_2mM_SA_Sub_P Parameter: Timepoint (hr) Value: 6
  misc_feature: MA Experiment 20000347 PARAMETER Experiment Name: At_2mM_SA_Sub_P Parameter: Tissue Value: Aerial
  misc_feature: MA Experiment 20000347 PARAMETER Experiment Name: At_2mM_SA_Sub_P Parameter: Treatment Value: 2mM SA vs. No Treatment
  misc_feature: MA Experiment ID: 20000355 Result: Down-regulated in Transcription
  misc_feature: MA Experiment 20000355 PARAMETER Experiment Name: At_Siliques_Sub_P Parameter: Age (day) Value: 21
  misc_feature: MA Experiment 20000355 PARAMETER Experiment Name: At_Siliques_Sub_P Parameter: Organism Value: A. thaliana
  misc_feature: MA Experiment 20000355 PARAMETER Experiment Name: At_Siliques_Sub_P Parameter: Plant Line Value: WS
  misc_feature: MA Experiment 20000355 PARAMETER Experiment Name: At_Siliques_Sub_P Parameter: Tissue Value: Less Than 5mm Siliques vs. Whole Plant
gttcttctcttctctcttcttcttttcgcttcgttgctgctctcttctccgctccgccggaaagtcgtgaaatctctgcgacttcatcaatgaagaaatcgtctcatctctctactgaagctacgcagacctaaaatatctctgtataatccttctttaagattgatttcgtacgatcttcgtgtctttttttctttaagagatgcggtccaaggacaaaatctcctacttttacgatggggatgtggggagtgtctattttggtccgaatcacccgatgaaacctcacaggctttgtatgacccatcatcttatccttgcatatggcctgcatagcaagatggaagtttatcgtccacacaaagcatatcctattgagatggctcagttccattctcctgactatgtagagttcctgcaacgaattaatccagaaaaccagaacttgttccccaatgaaatggctagatataatctgggagaggattgtcctgtctttgaagatttgtttgaattttgtcaaatttacgccggcggaacaatagatgctgcacgcaggttaaacaacaaactctgtgacattgctataaattgggcgggcgggttgcaccatgccaaaaaatgtgatgcatctgggttttgttacatcaacgatctcgtgctaggaattcttgagttgttaaaacaccatccccgtgttctatacatagatatagatgttcatcatggtgatggggttgaagaagctttttacttcactgacagagtaatgactgttagctttcataagtttggggataagttctttccagggacaggcgatgttaaggaaataggagaaagagaagggaaattttacgccattaatgtgccgctgaaggatggtatcgatgacagtagtttcaaccgtctgttcaggactataatatccaaggttgttgagatatatcaaccgggtgcaattgttcttcaatgcggggcagattcactagccagggatcgactaggatgctttaatctctctattgatggacatgctgaatgtgttaaattcgtgaagaagttcaatcttcccttactggttacaggaggtggaggatacacaaaggagaatgtagctcgttgttggaccgttgagactggcattcttttggacacagaacttcctaatgagattcctgaaaacgactacataaagtattttgcgccggatttttctttgaagataccgggtggtcacattgagaatcttaataccaaatcatacatcagttccatcaaagtgcagattttggagaatttgcgatacattcaacacgctccaagcgtacagatgcaggaggttccaccggatttctacataccggattttgatgaagacgaacaaaacccggatgtacgtgtggatcagcgttcacgggataagcagatccagagggatgatgaatatttcgatggcgacaacgataacgatgcgtcgtaaaacatcgattcttagaaattgttggttaatttttttgtttagttatgagatttgtaatgatatcaacactttaacggctactggggcaccaaaaccacttctgattgattccatcttcttcatcttttcgtcttggtgtatatgaatgaagctttttggttcactttctcatcattgtgacttatatagtgatcaaattcgttatatattgtac

SEQ ID NO: 47242 - protein, 426 aa, Arabidopsis thaliana
  peptide (1)..(426): Ceres Seq. ID no. 15168758
  misc_feature (6)..(318): Pfam Name: Histone deacetylase family Pfam Description: Histone deacetylase family
  misc_feature (3)..(424): Homolog of NCBI NO: 2347180 NR Description: putative histone deacetylase [Mus musculus]
  misc_feature (3)..(424): Homolog of NCBI NO: 34871605 NR Description: similar to histone deacetylase [Rattus norvegicus]
  misc_feature (3)..(424): Homolog of NCBI NO: 6680193 NR Description: histone deacetylase 1 [Mus musculus]
  misc_feature (3)..(424): Homolog of NCBI NO: 3023929 NR Description: Histone deacetylase 1 (HD1)
  misc_feature (3)..(424): Homolog of NCBI NO: 2827430 NR Description: histone deacetylase 1 [Gallus gallus]
  misc_feature (1)..(139): Homolog of NCBI NO: 38347605 NR Description: OSJNBa0042I15.18 [Oryza sativa (japonica
  misc_feature (176)..(424): Homolog of NCBI NO: 38347605 NR Description: OSJNBa0042I15.18 [Oryza sativa (japonica
  misc_feature (1)..(424): Homolog of NCBI NO: 17017402 NR Description: histone deacetylase [Zea mays]
  misc_feature (7)..(426): Homolog of NCBI NO: 11278171 NR Description: hypothetical protein T18B22.80 - Arabidopsis
  misc_feature (1)..(426): Homolog of NCBI NO: 30692236 NR Description: expressed protein [Arabidopsis thaliana]
MRSKDKISYFYDGDVGSVYFGPNHPMKPHRLCMTHHLILAYGLHSKMEVYRPHKAYPIEMAQFHSPDYVEFLQRINPENQNLFPNEMARYNLGEDCPVFEDLFEFCQIYAGGTIDAARRLNNKLCDIAINWAGGLHHAKKCDASGFCYINDLVLGILELLKHHPRVLYIDIDVHHGDGVEEAFYFTDRVMTVSFHKFGDKFFPGTGDVKEIGEREGKFYAINVPLKDGIDDSSFNRLFRTIISKVVEIYQPGAIVLQCGADSLARDRLGCFNLSIDGHAECVKFVKKFNLPLLVTGGGGYTKENVARCWTVETGILLDTELPNEIPENDYIKYFAPDFSLKIPGGHIENLNTKSYISSIKVQILENLRYIQHAPSVQMQEVPPDFYIPDFDEDEQNPDVRVDQRSRDKQIQRDDEYFDGDNDNDAS

SEQ ID NO: 47243 - protein, 401 aa, Arabidopsis thaliana
  peptide (1)..(401): Ceres Seq. ID no. 15168759
  misc_feature (1)..(293): Pfam Name: Histone deacetylase family Pfam Description: Histone deacetylase family
  misc_feature (1)..(399): Homolog of NCBI NO: 2347180 NR Description: putative histone deacetylase [Mus musculus]
  misc_feature (1)..(399): Homolog of NCBI NO: 34871605 NR Description: similar to histone deacetylase [Rattus norvegicus]
  misc_feature (1)..(399): Homolog of NCBI NO: 6680193 NR Description: histone deacetylase 1 [Mus musculus]
  misc_feature (1)..(399): Homolog of NCBI NO: 3023929 NR Description: Histone deacetylase 1 (HD1)
  misc_feature (1)..(399): Homolog of NCBI NO: 2827430 NR Description: histone deacetylase 1 [Gallus gallus]
  misc_feature (1)..(114): Homolog of NCBI NO: 38347605 NR Description: OSJNBa0042I15.18 [Oryza sativa (japonica
  misc_feature (151)..(399): Homolog of NCBI NO: 38347605 NR Description: OSJNBa0042I15.18 [Oryza sativa (japonica
  misc_feature (1)..(399): Homolog of NCBI NO: 17017402 NR Description: histone deacetylase [Zea mays]
  misc_feature (1)..(401): Homolog of NCBI NO: 11278171 NR Description: hypothetical protein T18B22.80 - Arabidopsis
  misc_feature (1)..(401): Homolog of NCBI NO: 30692236 NR Description: expressed protein [Arabidopsis thaliana]
MKPHRLCMTHHLILAYGLHSKMEVYRPHKAYPIEMAQFHSPDYVEFLQRINPENQNLFPNEMARYNLGEDCPVFEDLFEFCQIYAGGTIDAARRLNNKLCDIAINWAGGLHHAKKCDASGFCYINDLVLGILELLKHHPRVLYIDIDVHHGDGVEEAFYFTDRVMTVSFHKFGDKFFPGTGDVKEIGEREGKFYAINVPLKDGIDDSSFNRLFRTIISKVVEIYQPGAIVLQCGADSLARDRLGCFNLSIDGHAECVKFVKKFNLPLLVTGGGGYTKENVARCWTVETGILLDTELPNEIPENDYIKYFAPDFSLKIPGGHIENLNTKSYISSIKVQILENLRYIQHAPSVQMQEVPPDFYIPDFDEDEQNPDVRVDQRSRDKQIQRDDEYFDGDNDNDAS

SEQ ID NO: 47244 - protein, 394 aa, Arabidopsis thaliana
  peptide (1)..(394): Ceres Seq. ID no. 15168760
  misc_feature (1)..(286): Pfam Name: Histone deacetylase family Pfam Description: Histone deacetylase family
  misc_feature (1)..(392): Homolog of NCBI NO: 2347180 NR Description: putative histone deacetylase [Mus musculus]
  misc_feature (1)..(392): Homolog of NCBI NO: 34871605 NR Description: similar to histone deacetylase [Rattus norvegicus]
  misc_feature (1)..(392): Homolog of NCBI NO: 6680193 NR Description: histone deacetylase 1 [Mus musculus]
  misc_feature (1)..(392): Homolog of NCBI NO: 3023929 NR Description: Histone deacetylase 1 (HD1)
  misc_feature (1)..(392): Homolog of NCBI NO: 2827430 NR Description: histone deacetylase 1 [Gallus gallus]
  misc_feature (1)..(107): Homolog of NCBI NO: 38347605 NR Description: OSJNBa0042I15.18 [Oryza sativa (japonica
  misc_feature (144)..(392): Homolog of NCBI NO: 38347605 NR Description: OSJNBa0042I15.18 [Oryza sativa (japonica
  misc_feature (1)..(392): Homolog of NCBI NO: 17017402 NR Description: histone deacetylase [Zea mays]
  misc_feature (1)..(394): Homolog of NCBI NO: 11278171 NR Description: hypothetical protein T18B22.80 - Arabidopsis
  misc_feature (1)..(394): Homolog of NCBI NO: 30692236 NR Description: expressed protein [Arabidopsis thaliana]
MTHHLILAYGLHSKMEVYRPHKAYPIEMAQFHSPDYVEFLQRINPENQNLFPNEMARYNLGEDCPVFEDLFEFCQIYAGGTIDAARRLNNKLCDIAINWAGGLHHAKKCDASGFCYINDLVLGILELLKHHPRVLYIDIDVHHGDGVEEAFYFTDRVMTVSFHKFGDKFFPGTGDVKEIGEREGKFYAINVPLKDGIDDSSFNRLFRTIISKVVEIYQPGAIVLQCGADSLARDRLGCFNLSIDGHAECVKFVKKFNLPLLVTGGGGYTKENVARCWTVETGILLDTELPNEIPENDYIKYFAPDFSLKIPGGHIENLNTKSYISSIKVQILENLRYIQHAPSVQMQEVPPDFYIPDFDEDEQNPDVRVDQRSRDKQIQRDDEYFDGDNDNDAS

SEQ ID NO: 47245 - DNA, 682 bp, Arabidopsis thaliana
  misc_feature (1)..(682): Ceres Seq. ID no. 12601843
  misc_feature: MA Experiment ID: 20000306 Result: Up-regulated in Transcription
  misc_feature: MA Experiment 20000306 PARAMETER Experiment Name: At_Germinating_Seeds_Sub_P Parameter: Age (hr) Value: 6 vs. 0
  misc_feature: MA Experiment 20000306 PARAMETER Experiment Name: At_Germinating_Seeds_Sub_P Parameter: Organism Value: A. thaliana
  misc_feature: MA Experiment 20000306 PARAMETER Experiment Name: At_Germinating_Seeds_Sub_P Parameter: Plant Line Value: WS
  misc_feature: MA Experiment 20000306 PARAMETER Experiment Name: At_Germinating_Seeds_Sub_P Parameter: Tissue Value: Germinating Seeds
  misc_feature: MA Experiment ID: 20000307 Result: Up-regulated in Transcription
  misc_feature: MA Experiment 20000307 PARAMETER Experiment Name: At_Germinating_Seeds_Sub_P Parameter: Age (hr) Value: 24 vs. 0
  misc_feature: MA Experiment 20000307 PARAMETER Experiment Name: At_Germinating_Seeds_Sub_P Parameter: Organism Value: A. thaliana
  misc_feature: MA Experiment 20000307 PARAMETER Experiment Name: At_Germinating_Seeds_Sub_P Parameter: Plant Line Value: WS
  misc_feature: MA Experiment 20000307 PARAMETER Experiment Name: At_Germinating_Seeds_Sub_P Parameter: Tissue Value: Germinating Seeds
  misc_feature: MA Experiment ID: 20000314 Result: Down-regulated in Transcription
  misc_feature: MA Experiment 20000314 PARAMETER Experiment Name: At_14day_Shoots-Roots_Sub_P Parameter: Age (day) Value: 14
  misc_feature: MA Experiment 20000314 PARAMETER Experiment Name: At_14day_Shoots-Roots_Sub_P Parameter: Organism Value: A. thaliana
  misc_feature: MA Experiment 20000314 PARAMETER Experiment Name: At_14day_Shoots-Roots_Sub_P Parameter: Plant Line Value: WS
  misc_feature: MA Experiment 20000314 PARAMETER Experiment Name: At_14day_Shoots-Roots_Sub_P Parameter: Tissue Value: Roots vs. Whole Plant
  misc_feature: MA Experiment ID: 20000315 Result: Up-regulated in Transcription
  misc_feature: MA Experiment 20000315 PARAMETER Experiment Name: At_14day_Shoots-Roots_Sub_P Parameter: Age (day) Value: 14
  misc_feature: MA Experiment 20000315 PARAMETER Experiment Name: At_14day_Shoots-Roots_Sub_P Parameter: Organism Value: A. thaliana
  misc_feature: MA Experiment 20000315 PARAMETER Experiment Name: At_14day_Shoots-Roots_Sub_P Parameter: Plant Line Value: WS
  misc_feature: MA Experiment 20000315 PARAMETER Experiment Name: At_14day_Shoots-Roots_Sub_P Parameter: Tissue Value: Shoots vs. Whole Plant
  misc_feature: MA Experiment ID: 20000328 Result: Up-regulated in Transcription
  misc_feature: MA Experiment 20000328 PARAMETER Experiment Name: At_42deg_Heat_Sub_P Parameter: Age (day) Value: 14
  misc_feature: MA Experiment 20000328 PARAMETER Experiment Name: At_42deg_Heat_Sub_P Parameter: Organism Value: A. thaliana
  misc_feature: MA Experiment 20000328 PARAMETER Experiment Name: At_42deg_Heat_Sub_P Parameter: Plant Line Value: WS
  misc_feature: MA Experiment 20000328 PARAMETER Experiment Name: At_42deg_Heat_Sub_P Parameter: Temperature (deg C) Value: 42 vs. 22
  misc_feature: MA Experiment 20000328 PARAMETER Experiment Name: At_42deg_Heat_Sub_P Parameter: Timepoint (hr) Value: 6
  misc_feature: MA Experiment 20000328 PARAMETER Experiment Name: At_42deg_Heat_Sub_P Parameter: Tissue Value: Aerial
  misc_feature: MA Experiment ID: 20001807 Result: Up-regulated in Transcription
  misc_feature: MA Experiment 20001807 PARAMETER Experiment Name: At_50mM_NH4NO3_L-to-H_Sub_P Parameter: Timepoint (hr) Value: 6
  misc_feature: MA Experiment 20001807 PARAMETER Experiment Name: At_50mM_NH4NO3_L-to-H_Sub_P Parameter: Tissue Value: Leaf
  misc_feature: MA Experiment 20001807 PARAMETER Experiment Name: At_50mM_NH4NO3_L-to-H_Sub_P Parameter: Treatment Value: 50mM NH4NO3 vs 100mM Mannitol
gaagtaagtaagagaaaaaccaaaagaagaagagaaacaacaagaagaagtaatggcttcctctatgctctcctccaccgctgtggttacctccccggctcaagccaccatggtcgctccattcaccggcttgaagtcatccgcttctttcccggtcacccgcaaggccaacaacgacattacttccatcacaagcaacggaggaagagttagctgcatgaaggtgtggccaccaatcggaaagaagaagtttgagactctatcttacctccctgaccttagtgacgttgaattggctaaggaagttgactaccttctccgcaacaagtggattccttgtgttgaattcgagttggagcacggatttgtgtaccgtgagcacggaaacactcccggatactatgatggacggtactggacaatgtggaagcttccattgttcggatgcaccgactccgctcaagtgttgaaggaagttgaagaatgcaagaaggagtaccctggcgccttcattaggatcatcggattcgacaacacccgtcaagtccaatgcatcagtttcattgcctacaagcccccaagcttcaccgaagcttaatcccctttctggaatattcagcgttgattattctggaacccatttctatgtggtcaatgcaaatttaagaaattatttgccgac

SEQ ID NO: 47246 - protein, 181 aa, Arabidopsis thaliana
  peptide (1)..(181): Ceres Seq. ID no. 12601844
  misc_feature (1)..(179): Homolog of NCBI NO: 68063 NR Description: ribulose-bisphosphate carboxylase (EC 4.1.1.39)
  misc_feature (1)..(179): Homolog of NCBI NO: 15219826 NR Description: ribulose-bisphosphate carboxylase small unit,
  misc_feature (1)..(181): Homolog of NCBI NO: 132154 NR Description: Ribulose bisphosphate carboxylase small chain,
  misc_feature (1)..(181): Homolog of NCBI NO: 266891 NR Description: Ribulose bisphosphate carboxylase small chain,
  misc_feature (1)..(181): Homolog of NCBI NO: 132091 NR Description: Ribulose bisphosphate carboxylase small chain F1,
  misc_feature (1)..(181): Homolog of NCBI NO: 15240901 NR Description: ribulose bisphosphate carboxylase small chain 3b
  misc_feature (1)..(181): Homolog of NCBI NO: 68060 NR Description: ribulose-bisphosphate carboxylase (EC 4.1.1.39)
  misc_feature (1)..(181): Homolog of NCBI NO: 15240912 NR Description: ribulose bisphosphate carboxylase small chain 1b
  misc_feature (1)..(181): Homolog of NCBI NO: 15240903 NR Description: ribulose bisphosphate carboxylase small chain 2b
  misc_feature (1)..(181): Homolog of NCBI NO: 68061 NR Description: ribulose-bisphosphate carboxylase (EC 4.1.1.39)
  misc_feature (1)..(179): Homolog of NCBI NO: 68063 NR Description: ribulose-bisphosphate carboxylase (EC 4.1.1.39)
  misc_feature (1)..(179): Homolog of NCBI NO: 15219826 NR Description: ribulose-bisphosphate carboxylase small unit,
  misc_feature (1)..(181): Homolog of NCBI NO: 132154 NR Description: Ribulose bisphosphate carboxylase small chain,
  misc_feature (1)..(181): Homolog of NCBI NO: 266891 NR Description: Ribulose bisphosphate carboxylase small chain,
  misc_feature (1)..(181): Homolog of NCBI NO: 132091 NR Description: Ribulose bisphosphate carboxylase small chain F1,
  misc_feature (1)..(181): Homolog of NCBI NO: 15240901 NR Description: ribulose bisphosphate carboxylase small chain 3b
  misc_feature (1)..(181): Homolog of NCBI NO: 68060 NR Description: ribulose-bisphosphate carboxylase (EC 4.1.1.39)
  misc_feature (1)..(181): Homolog of NCBI NO: 15240912 NR Description: ribulose bisphosphate carboxylase small chain 1b
  misc_feature (1)..(181): Homolog of NCBI NO: 15240903 NR Description: ribulose bisphosphate carboxylase small chain 2b
  misc_feature (1)..(181): Homolog of NCBI NO: 68061 NR Description: ribulose-bisphosphate carboxylase (EC 4.1.1.39)
  misc_feature (1)..(179): Homolog of NCBI NO: 68063 NR Description: ribulose-bisphosphate carboxylase (EC 4.1.1.39)
  misc_feature (1)..(179): Homolog of NCBI NO: 15219826 NR Description: ribulose-bisphosphate carboxylase small unit,
  misc_feature (1)..(181): Homolog of NCBI NO: 132154 NR Description: Ribulose bisphosphate carboxylase small chain,
  misc_feature (1)..(181): Homolog of NCBI NO: 266891 NR Description: Ribulose bisphosphate carboxylase small chain,
  misc_feature (1)..(181): Homolog of NCBI NO: 132091 NR Description: Ribulose bisphosphate carboxylase small chain F1,
  misc_feature (1)..(181): Homolog of NCBI NO: 15240901 NR Description: ribulose bisphosphate carboxylase small chain 3b
  misc_feature (1)..(181): Homolog of NCBI NO: 68060 NR Description: ribulose-bisphosphate carboxylase (EC 4.1.1.39)
  misc_feature (1)..(181): Homolog of NCBI NO: 15240912 NR Description: ribulose bisphosphate carboxylase small chain 1b
  misc_feature (1)..(181): Homolog of NCBI NO: 15240903 NR Description: ribulose bisphosphate carboxylase small chain 2b
  misc_feature (1)..(181): Homolog of NCBI NO: 68061 NR Description: ribulose-bisphosphate carboxylase (EC 4.1.1.39)
MASSMLSSTAVVTSPAQATMVAPFTGLKSSASFPVTRKANNDITSITSNGGRVSCMKVWPPIGKKKFETLSYLPDLSDVELAKEVDYLLRNKWIPCVEFELEHGFVYREHGNTPGYYDGRYWTMWKLPLFGCTDSAQVLKEVEECKKEYPGAFIRIIGFDNTRQVQCISFIAYKPPSFTEA

SEQ ID NO: 47247 - protein, 177 aa, Arabidopsis thaliana
  peptide (1)..(177): Ceres Seq. ID no. 12601845
  misc_feature (1)..(175): Homolog of NCBI NO: 68063 NR Description: ribulose-bisphosphate carboxylase (EC 4.1.1.39)
  misc_feature (1)..(175): Homolog of NCBI NO: 15219826 NR Description: ribulose-bisphosphate carboxylase small unit,
  misc_feature (1)..(177): Homolog of NCBI NO: 132154 NR Description: Ribulose bisphosphate carboxylase small chain,
  misc_feature (1)..(177): Homolog of NCBI NO: 266891 NR Description: Ribulose bisphosphate carboxylase small chain,
  misc_feature (1)..(177): Homolog of NCBI NO: 132091 NR Description: Ribulose bisphosphate carboxylase small chain F1,
  misc_feature (1)..(177): Homolog of NCBI NO: 15240901 NR Description: ribulose bisphosphate carboxylase small chain 3b
  misc_feature (1)..(177): Homolog of NCBI NO: 68060 NR Description: ribulose-bisphosphate carboxylase (EC 4.1.1.39)
  misc_feature (1)..(177): Homolog of NCBI NO: 15240912 NR Description: ribulose bisphosphate carboxylase small chain 1b
  misc_feature (1)..(177): Homolog of NCBI NO: 15240903 NR Description: ribulose bisphosphate carboxylase small chain 2b
  misc_feature (1)..(177): Homolog of NCBI NO: 68061 NR Description: ribulose-bisphosphate carboxylase (EC 4.1.1.39)
  misc_feature (1)..(175): Homolog of NCBI NO: 68063 NR Description: ribulose-bisphosphate carboxylase (EC 4.1.1.39)
  misc_feature (1)..(175): Homolog of NCBI NO: 15219826 NR Description: ribulose-bisphosphate carboxylase small unit,
  misc_feature (1)..(177): Homolog of NCBI NO: 132154 NR Description: Ribulose bisphosphate carboxylase small chain,
  misc_feature (1)..(177): Homolog of NCBI NO: 266891 NR Description: Ribulose bisphosphate carboxylase small chain,
  misc_feature (1)..(177): Homolog of NCBI NO: 132091 NR Description: Ribulose bisphosphate carboxylase small chain F1,
  misc_feature (1)..(177): Homolog of NCBI NO: 15240901 NR Description: ribulose bisphosphate carboxylase small chain 3b
  misc_feature (1)..(177): Homolog of NCBI NO: 68060 NR Description: ribulose-bisphosphate carboxylase (EC 4.1.1.39)
  misc_feature (1)..(177): Homolog of NCBI NO: 15240912 NR Description: ribulose bisphosphate carboxylase small chain 1b
  misc_feature (1)..(177): Homolog of NCBI NO: 15240903 NR Description: ribulose bisphosphate carboxylase small chain 2b
  misc_feature (1)..(177): Homolog of NCBI NO: 68061 NR Description: ribulose-bisphosphate carboxylase (EC 4.1.1.39)
  misc_feature (1)..(175): Homolog of NCBI NO: 68063 NR Description: ribulose-bisphosphate carboxylase (EC 4.1.1.39)
  misc_feature (1)..(175): Homolog of NCBI NO: 15219826 NR Description: ribulose-bisphosphate carboxylase small unit,
  misc_feature (1)..(177): Homolog of NCBI NO: 132154 NR Description: Ribulose bisphosphate carboxylase small chain,
  misc_feature (1)..(177): Homolog of NCBI NO: 266891 NR Description: Ribulose bisphosphate carboxylase small chain,
  misc_feature (1)..(177): Homolog of NCBI NO: 132091 NR Description: Ribulose bisphosphate carboxylase small chain F1,
  misc_feature (1)..(177): Homolog of NCBI NO: 15240901 NR Description: ribulose bisphosphate carboxylase small chain 3b
  misc_feature (1)..(177): Homolog of NCBI NO: 68060 NR Description: ribulose-bisphosphate carboxylase (EC 4.1.1.39)
  misc_feature (1)..(177): Homolog of NCBI NO: 15240912 NR Description: ribulose bisphosphate carboxylase small chain 1b
  misc_feature (1)..(177): Homolog of NCBI NO: 15240903 NR Description: ribulose bisphosphate carboxylase small chain 2b
  misc_feature (1)..(177): Homolog of NCBI NO: 68061 NR Description: ribulose-bisphosphate carboxylase (EC 4.1.1.39)
MLSSTAVVTSPAQATMVAPFTGLKSSASFPVTRKANNDITSITSNGGRVSCMKVWPPIGKKKFETLSYLPDLSDVELAKEVDYLLRNKWIPCVEFELEHGFVYREHGNTPGYYDGRYWTMWKLPLFGCTDSAQVLKEVEECKKEYPGAFIRIIGFDNTRQVQCISFIAYKPPSFTEA

SEQ ID NO: 47248 - protein, 162 aa, Arabidopsis thaliana
  peptide (1)..(162): Ceres Seq. ID no. 12601846
  misc_feature (1)..(160): Homolog of NCBI NO: 68063 NR Description: ribulose-bisphosphate carboxylase (EC 4.1.1.39)
  misc_feature (1)..(160): Homolog of NCBI NO: 15219826 NR Description: ribulose-bisphosphate carboxylase small unit,
  misc_feature (1)..(162): Homolog of NCBI NO: 132154 NR Description: Ribulose bisphosphate carboxylase small chain,
  misc_feature (1)..(162): Homolog of NCBI NO: 266891 NR Description: Ribulose bisphosphate carboxylase small chain,
  misc_feature (1)..(162): Homolog of NCBI NO: 132091 NR Description: Ribulose bisphosphate carboxylase small chain F1,
  misc_feature (1)..(162): Homolog of NCBI NO: 15240901 NR Description: ribulose bisphosphate carboxylase small chain 3b
  misc_feature (1)..(162): Homolog of NCBI NO: 68060 NR Description: ribulose-bisphosphate carboxylase (EC 4.1.1.39)
  misc_feature (1)..(162): Homolog of NCBI NO: 15240912 NR Description: ribulose bisphosphate carboxylase small chain 1b
  misc_feature (1)..(162): Homolog of NCBI NO: 15240903 NR Description: ribulose bisphosphate carboxylase small chain 2b
  misc_feature (1)..(162): Homolog of NCBI NO: 68061 NR Description: ribulose-bisphosphate carboxylase (EC 4.1.1.39)
  misc_feature (1)..(160): Homolog of NCBI NO: 68063 NR Description: ribulose-bisphosphate carboxylase (EC 4.1.1.39)
  misc_feature (1)..(160): Homolog of NCBI NO: 15219826 NR Description: ribulose-bisphosphate carboxylase small unit,
  misc_feature (1)..(162): Homolog of NCBI NO: 132154 NR Description: Ribulose bisphosphate carboxylase small chain,
  misc_feature (1)..(162): Homolog of NCBI NO: 266891 NR Description: Ribulose bisphosphate carboxylase small chain,
  misc_feature (1)..(162): Homolog of NCBI NO: 132091 NR Description: Ribulose bisphosphate carboxylase small chain F1,
  misc_feature (1)..(162): Homolog of NCBI NO: 15240901 NR Description: ribulose bisphosphate carboxylase small chain 3b
  misc_feature (1)..(162): Homolog of NCBI NO: 68060 NR Description: ribulose-bisphosphate carboxylase (EC 4.1.1.39)
  misc_feature (1)..(162): Homolog of NCBI NO: 15240912 NR Description: ribulose bisphosphate carboxylase small chain 1b
  misc_feature (1)..(162): Homolog of NCBI NO: 15240903 NR Description: ribulose bisphosphate carboxylase small chain 2b
  misc_feature (1)..(162): Homolog of NCBI NO: 68061 NR Description: ribulose-bisphosphate carboxylase (EC 4.1.1.39)
  misc_feature (1)..(160): Homolog of NCBI NO: 68063 NR Description: ribulose-bisphosphate carboxylase (EC 4.1.1.39)
  misc_feature (1)..(160): Homolog of NCBI NO: 15219826 NR Description: ribulose-bisphosphate carboxylase small unit,
  misc_feature (1)..(162): Homolog of NCBI NO: 132154 NR Description: Ribulose bisphosphate carboxylase small chain,
  misc_feature (1)..(162): Homolog of NCBI NO: 266891 NR Description: Ribulose bisphosphate carboxylase small chain,
  misc_feature (1)..(162): Homolog of NCBI NO: 132091 NR Description: Ribulose bisphosphate carboxylase small chain F1,
  misc_feature (1)..(162): Homolog of NCBI NO: 15240901 NR Description: ribulose bisphosphate carboxylase small chain 3b
  misc_feature (1)..(162): Homolog of NCBI NO: 68060 NR Description: ribulose-bisphosphate carboxylase (EC 4.1.1.39)
  misc_feature (1)..(162): Homolog of NCBI NO: 15240912 NR Description: ribulose bisphosphate carboxylase small chain 1b
  misc_feature (1)..(162): Homolog of NCBI NO: 15240903 NR Description: ribulose bisphosphate carboxylase small chain 2b
  misc_feature (1)..(162): Homolog of NCBI NO: 68061 NR Description: ribulose-bisphosphate carboxylase (EC 4.1.1.39)
MVAPFTGLKSSASFPVTRKANNDITSITSNGGRVSCMKVWPPIGKKKFETLSYLPDLSDVELAKEVDYLLRNKWIPCVEFELEHGFVYREHGNTPGYYDGRYWTMWKLPLFGCTDSAQVLKEVEECKKEYPGAFIRIIGFDNTRQVQCISFIAYKPPSFTEA

SEQ ID NO: 47249 - DNA, 1605 bp, Arabidopsis thaliana
  misc_feature (1)..(1605): Ceres Seq. ID no. 13647999
  misc_feature: MA Experiment ID: 20000180 Result: Down-regulated in Transcription
  misc_feature: MA Experiment 20000180 PARAMETER Experiment Name: At_Germinating_Seeds_P Parameter: Age (hr) Value: 24 vs. 0
  misc_feature: MA Experiment 20000180 PARAMETER Experiment Name: At_Germinating_Seeds_P Parameter: Tissue Value: Germinating Seeds
  misc_feature: MA Experiment ID: 20000211 Result: Up-regulated in Transcription
  misc_feature: MA Experiment 20000211 PARAMETER Experiment Name: At_0.001percent_MeJA__P Parameter: Age (day) Value: 14
  misc_feature: MA Experiment 20000211 PARAMETER Experiment Name: At_0.001percent_MeJA__P Parameter: Organism Value: A. thaliana
  misc_feature: MA Experiment 20000211 PARAMETER Experiment Name: At_0.001percent_MeJA__P Parameter: Plant Line Value: WS
  misc_feature: MA Experiment 20000211 PARAMETER Experiment Name: At_0.001percent_MeJA__P Parameter: Timepoint (hr) Value: 1
  misc_feature: MA Experiment 20000211 PARAMETER Experiment Name: At_0.001percent_MeJA__P Parameter: Tissue Value: Aerial
  misc_feature: MA Experiment 20000211 PARAMETER Experiment Name: At_0.001percent_MeJA__P Parameter: Treatment Value: 0.001percent MeJA vs. No Treatment
  misc_feature: MA Experiment ID: 20000227 Result: Up-regulated in Transcription
  misc_feature: MA Experiment 20000227 PARAMETER Experiment Name: At_Root-Tips-vs-Tops_P Parameter: Tissue Value: Root Tips vs. Root Tops
  misc_feature: MA Experiment ID: 20000234 Result: Up-regulated in Transcription
  misc_feature: MA Experiment 20000234 PARAMETER Experiment Name: At_Siliques_P Parameter: Age (day) Value: 21
  misc_feature: MA Experiment 20000234 PARAMETER Experiment Name: At_Siliques_P Parameter: Organism Value: A. thaliana
  misc_feature: MA Experiment 20000234 PARAMETER Experiment Name: At_Siliques_P Parameter: Plant Line Value: WS
  misc_feature: MA Experiment 20000234 PARAMETER Experiment Name: At_Siliques_P Parameter: Tissue Value: Less Than 5mm Siliques vs. Whole Plant
  misc_feature: MA Experiment ID: 20000235 Result: Up-regulated in Transcription
  misc_feature: MA Experiment 20000235 PARAMETER Experiment Name: At_Siliques_P Parameter: Age (day) Value: 21
  misc_feature: MA Experiment 20000235 PARAMETER Experiment Name: At_Siliques_P Parameter: Organism Value: A. thaliana
  misc_feature: MA Experiment 20000235 PARAMETER Experiment Name: At_Siliques_P Parameter: Plant Line Value: WS
  misc_feature: MA Experiment 20000235 PARAMETER Experiment Name: At_Siliques_P Parameter: Tissue Value: 5-10mm Siliques vs. Whole Plant
  misc_feature: MA Experiment ID: 20000264 Result: Up-regulated in Transcription
  misc_feature: MA Experiment 20000264 PARAMETER Experiment Name: At_Open_Flower_P Parameter: Age (day) Value: 21
  misc_feature: MA Experiment 20000264 PARAMETER Experiment Name: At_Open_Flower_P Parameter: Plant Line Value: WS
  misc_feature: MA Experiment 20000264 PARAMETER Experiment Name: At_Open_Flower_P Parameter: Tissue Value: Open Flower vs. Whole Plant
  misc_feature: MA Experiment ID: 20000265 Result: Up-regulated in Transcription
  misc_feature: MA Experiment 20000265 PARAMETER Experiment Name: At_Open_Flower_P Parameter: Age (day) Value: 21
  misc_feature: MA Experiment 20000265 PARAMETER Experiment Name: At_Open_Flower_P Parameter: Plant Line Value: WS
  misc_feature: MA Experiment 20000265 PARAMETER Experiment Name: At_Open_Flower_P Parameter: Tissue Value: Closed Flower vs. Whole Plant
  misc_feature: MA Experiment ID: 20000286 Result: Up-regulated in Transcription
  misc_feature: MA Experiment 20000286 PARAMETER Experiment Name: At_Open_Flower_P Parameter: Age (day) Value: 21
  misc_feature: MA Experiment 20000286 PARAMETER Experiment Name: At_Open_Flower_P Parameter: Plant Line Value: WS
  misc_feature: MA Experiment 20000286 PARAMETER Experiment Name: At_Open_Flower_P Parameter: Tissue Value: Half Open vs. Whole Plant
  misc_feature: MA Experiment ID: 20000794 Result: Up-regulated in Transcription
  misc_feature: MA Experiment 20000794 PARAMETER Experiment Name: At_Petals_P Parameter: Age (day) Value: 23-25 days
  misc_feature: MA Experiment 20000794 PARAMETER Experiment Name: At_Petals_P Parameter: Plant Line Value: WS
  misc_feature: MA Experiment 20000794 PARAMETER Experiment Name: At_Petals_P Parameter: Tissue Value: Petals vs. Whole plant
aacccacccaaaatatcacaagcaccgactaaaacaattcggatctaaacccgacccggtaaaaccaatcccaaattttactccgttgtgaacgcatcaaacccagaaaatttcttcctccgatctcgcattctccacttccataatccccaaaattgtttcgttgatttttcgacaagatgaagctaacggacaacgaagagatcaccatgaacggaactcgagaaatggagacgacagagcaagagacatcgtcgccgtgttcgttagtaatcgaagcttttccggtgaagaaatccattattgtaggttacgctcttacatcaaagaagattaagagctttttacaaccaaaactcgaaggtttagctaggaataaggggatattaattgtggcaatagatcagaataagccactttcagagcagggtccgtttgatattgtgttgcataagcaaattggaaaagaatggcgtcgaattctcgaggaatttaggctagcacatccagatgtcacagttcttgatcctccagatgcaatactacatctccgtaatcgtcagtcaatgcttcagtgtgttgcggacatgaatctgtctgatagtaatggacgcgttggtgtgcccaagcaattggtaattaaaaaggatgcatcttcaattccggaggctgtcaataatgctggtctgagactacctcttgttgcaaagccattggttgctgatggaagtgcaaagtcacatgagctttcgctggcttacgatcaacactcccttctgaagctcgagcctcctcttgttcttcaggagtttgttaaccatggaggtgttcttttcaaggtttacattgttggggaggctattagagttgtccggcgcttctccctacctgatgtctctagacgagaactccccaaatcagctggtgtattccgcttcccacgggtctcttgtgctgcagcttcagctgatgatgcagatctggacccgagcattgccgagcttccaccacgtcctctgttggagagactggcaaaggaactccgtcgtggattgggtctaaggctgttcaatttagacataattagagagcacgggacaagagatcggttttatgtgatcgacatcaactatttcccagggtacgggaaaatgccagagtatgagcatgtattcactgatttcttactgagtgtggtacaaagccaatgtaagaaacgagctttggcagatcaatactaaactcaacggagagaccattgttcctccccaaagaaaaaaagaagattagtagtctatgcaatttatttctgtacaggacaaagcaccgatttccctcgatgttgttctttagcttcattgtgctgtacaaaagaacaatggaagattgcatttaaaagaaaatccttgggacctttagagatttaaggatagagaattgtctgaatctcactacaatgtcaccatatcaaaaagtgaatagaccttatgtcacacactactcatatgggcatggcttcactttgtgactgcttctatcttttgatttggttggctttgtaaaaaaaaaaaaaaaaaaaactcgagggggggcccggtacccaat

SEQ ID NO: 47250 - protein, 353 aa, Arabidopsis thaliana
  peptide (1)..(353): Ceres Seq. ID no. 15219520
  misc_feature (34)..(338): Pfam Name: Inositol 1, 3, 4-trisphosphate 5/6-kinase Pfam Description: Inositol 1, 3, 4-trisphosphate 5/6-kinase
  misc_feature (38)..(340): Homolog of NCBI NO: 37537118 NR Description: putative inositol 1,3,4-trisphosphate 5/6-kinase
  misc_feature (38)..(174): Homolog of NCBI NO: 7487088 NR Description: hypothetical protein T16L1.260 - Arabidopsis
  misc_feature (175)..(321): Homolog of NCBI NO: 7487088 NR Description: hypothetical protein T16L1.260 - Arabidopsis
  misc_feature (38)..(174): Homolog of NCBI NO: 30689810 NR Description: expressed protein [Arabidopsis thaliana]
  misc_feature (175)..(347): Homolog of NCBI NO: 30689810 NR Description: expressed protein [Arabidopsis thaliana]
  misc_feature (34)..(346): Homolog of NCBI NO: 27311236 NR Description: Putative inositol 1,3,4-trisphosphate 5/6-kinase
  misc_feature (41)..(347): Homolog of NCBI NO: 37530372 NR Description: putative inositol 1,3,4-trisphosphate 5/6-kinase
  misc_feature (92)..(353): Homolog of NCBI NO: 30680654 NR Description: inositol 1,3,4-trisphosphate 5/6-kinase-related
  misc_feature (1)..(321): Homolog of NCBI NO: 7487925 NR Description: inositol 1,3,4-trisphosphate 5/6-kinase homolog
  misc_feature (1)..(353): Homolog of NCBI NO: 18413088 NR Description: inositol 1,3,4-trisphosphate 5/6-kinase-related
MKLTDNEEITMNGTREMETTEQETSSPCSLVIEAFPVKKSIIVGYALTSKKIKSFLQPKLEGLARNKGILIVAIDQNKPLSEQGPFDIVLHKQIGKEWRRILEEFRLAHPDVTVLDPPDAILHLRNRQSMLQCVADMNLSDSNGRVGVPKQLVIKKDASSIPEAVNNAGLRLPLVAKPLVADGSAKSHELSLAYDQHSLLKLEPPLVLQEFVNHGGVLFKVYIVGEAIRVVRRFSLPDVSRRELPKSAGVFRFPRVSCAAASADDADLDPSIAELPPRPLLERLAKELRRGLGLRLFNLDIIREHGTRDRFYVIDINYFPGYGKMPEYEHVFTDFLLSVVQSQCKKRALADQY

SEQ ID NO: 47251 - protein, 343 aa, Arabidopsis thaliana
  peptide (1)..(343): Ceres Seq. ID no. 15219521
  misc_feature (24)..(328): Pfam Name: Inositol 1, 3, 4-trisphosphate 5/6-kinase Pfam Description: Inositol 1, 3, 4-trisphosphate 5/6-kinase
  misc_feature (28)..(330): Homolog of NCBI NO: 37537118 NR Description: putative inositol 1,3,4-trisphosphate 5/6-kinase
  misc_feature (28)..(164): Homolog of NCBI NO: 7487088 NR Description: hypothetical protein T16L1.260 - Arabidopsis
  misc_feature (165)..(311): Homolog of NCBI NO: 7487088 NR Description: hypothetical protein T16L1.260 - Arabidopsis
  misc_feature (28)..(164): Homolog of NCBI NO: 30689810 NR Description: expressed protein [Arabidopsis thaliana]
  misc_feature (165)..(337): Homolog of NCBI NO: 30689810 NR Description: expressed protein [Arabidopsis thaliana]
  misc_feature (24)..(336): Homolog of NCBI NO: 27311236 NR Description: Putative inositol 1,3,4-trisphosphate 5/6-kinase
  misc_feature (31)..(337): Homolog of NCBI NO: 37530372 NR Description: putative inositol 1,3,4-trisphosphate 5/6-kinase
  misc_feature (82)..(343): Homolog of NCBI NO: 30680654 NR Description: inositol 1,3,4-trisphosphate 5/6-kinase-related
  misc_feature (1)..(311): Homolog of NCBI NO: 7487925 NR Description: inositol 1,3,4-trisphosphate 5/6-kinase homolog
  misc_feature (1)..(343): Homolog of NCBI NO: 18413088 NR Description: inositol 1,3,4-trisphosphate 5/6-kinase-related
MNGTREMETTEQETSSPCSLVIEAFPVKKSIIVGYALTSKKIKSFLQPKLEGLARNKGILIVAIDQNKPLSEQGPFDIVLHKQIGKEWRRILEEFRLAHPDVTVLDPPDAILHLRNRQSMLQCVADMNLSDSNGRVGVPKQLVIKKDASSIPEAVNNAGLRLPLVAKPLVADGSAKSHELSLAYDQHSLLKLEPPLVLQEFVNHGGVLFKVYIVGEAIRVVRRFSLPDVSRRELPKSAGVFRFPRVSCAAASADDADLDPSIAELPPRPLLERLAKELRRGLGLRLFNLDIIREHGTRDRFYVIDINYFPGYGKMPEYEHVFTDFLLSVVQSQCKKRALADQY

SEQ ID NO: 47252 - protein, 337 aa, Arabidopsis thaliana
  peptide (1)..(337): Ceres Seq. ID no. 15219522
  misc_feature (18)..(322): Pfam Name: Inositol 1, 3, 4-trisphosphate 5/6-kinase Pfam Description: Inositol 1, 3, 4-trisphosphate 5/6-kinase
  misc_feature (22)..(324): Homolog of NCBI NO: 37537118 NR Description: putative inositol 1,3,4-trisphosphate 5/6-kinase
  misc_feature (22)..(158): Homolog of NCBI NO: 7487088 NR Description: hypothetical protein T16L1.260 - Arabidopsis
  misc_feature (159)..(305): Homolog of NCBI NO: 7487088 NR Description: hypothetical protein T16L1.260 - Arabidopsis
  misc_feature (22)..(158): Homolog of NCBI NO: 30689810 NR Description: expressed protein [Arabidopsis thaliana]
  misc_feature (159)..(331): Homolog of NCBI NO: 30689810 NR Description: expressed protein [Arabidopsis thaliana]
  misc_feature (18)..(330): Homolog of NCBI NO: 27311236 NR Description: Putative inositol 1,3,4-trisphosphate 5/6-kinase
  misc_feature (25)..(331): Homolog of NCBI NO: 37530372 NR Description: putative inositol 1,3,4-trisphosphate 5/6-kinase
  misc_feature (76)..(337): Homolog of NCBI NO: 30680654 NR Description: inositol 1,3,4-trisphosphate 5/6-kinase-related
  misc_feature (1)..(305): Homolog of NCBI NO: 7487925 NR Description: inositol 1,3,4-trisphosphate 5/6-kinase homolog
  misc_feature (1)..(337): Homolog of NCBI NO: 18413088 NR Description: inositol 1,3,4-trisphosphate 5/6-kinase-related
METTEQETSSPCSLVIEAFPVKKSIIVGYALTSKKIKSFLQPKLEGLARNKGILIVAIDQNKPLSEQGPFDIVLHKQIGKEWRRILEEFRLAHPDVTVLDPPDAILHLRNRQSMLQCVADMNLSDSNGRVGVPKQLVIKKDASSIPEAVNNAGLRLPLVAKPLVADGSAKSHELSLAYDQHSLLKLEPPLVLQEFVNHGGVLFKVYIVGEAIRVVRRFSLPDVSRRELPKSAGVFRFPRVSCAAASADDADLDPSIAELPPRPLLERLAKELRRGLGLRLFNLDIIREHGTRDRFYVIDINYFPGYGKMPEYEHVFTDFLLSVVQSQCKKRALADQY

SEQ ID NO: 47253 - DNA, 1177 bp, Arabidopsis thaliana
  misc_feature (1)..(1177): Ceres Seq. ID no. 13588287
  misc_feature: MA Experiment ID: 20000173 Result: Down-regulated in Transcription
  misc_feature: MA Experiment 20000173 PARAMETER Experiment Name: At_42deg_Heat_P Parameter: Age (day) Value: 14
  misc_feature: MA Experiment 20000173 PARAMETER Experiment Name: At_42deg_Heat_P Parameter: Organism Value: A. thaliana
  misc_feature: MA Experiment 20000173 PARAMETER Experiment Name: At_42deg_Heat_P Parameter: Plant Line Value: WS
  misc_feature: MA Experiment 20000173 PARAMETER Experiment Name: At_42deg_Heat_P Parameter: Temperature (deg C) Value: 42 vs. 22
  misc_feature: MA Experiment 20000173 PARAMETER Experiment Name: At_42deg_Heat_P Parameter: Timepoint (hr) Value: 6
  misc_feature: MA Experiment 20000173 PARAMETER Experiment Name: At_42deg_Heat_P Parameter: Tissue Value: Aerial
  misc_feature: MA Experiment ID: 20000182 Result: Down-regulated in Transcription
  misc_feature: MA Experiment 20000182 PARAMETER Experiment Name: At_2mM_SA_P Parameter: Age (day) Value: 14
  misc_feature: MA Experiment 20000182 PARAMETER Experiment Name: At_2mM_SA_P Parameter: Organism Value: A. thaliana
  misc_feature: MA Experiment 20000182 PARAMETER Experiment Name: At_2mM_SA_P Parameter: Plant Line Value: WS
  misc_feature: MA Experiment 20000182 PARAMETER Experiment Name: At_2mM_SA_P Parameter: Timepoint (hr) Value: 6
  misc_feature: MA Experiment 20000182 PARAMETER Experiment Name: At_2mM_SA_P Parameter: Tissue Value: Aerial
  misc_feature: MA Experiment 20000182 PARAMETER Experiment Name: At_2mM_SA_P Parameter: Treatment Value: 2mM SA vs. No Treatment
  misc_feature: MA Experiment ID: 20000227 Result: Down-regulated in Transcription
  misc_feature: MA Experiment 20000227 PARAMETER Experiment Name: At_Root-Tips-vs-Tops_P Parameter: Tissue Value: Root Tips vs. Root Tops
  misc_feature: MA Experiment ID: 20000264 Result: Down-regulated in Transcription
  misc_feature: MA Experiment 20000264 PARAMETER Experiment Name: At_Open_Flower_P Parameter: Age (day) Value: 21
  misc_feature: MA Experiment 20000264 PARAMETER Experiment Name: At_Open_Flower_P Parameter: Plant Line Value: WS
  misc_feature: MA Experiment 20000264 PARAMETER Experiment Name: At_Open_Flower_P Parameter: Tissue Value: Open Flower vs. Whole Plant
  misc_feature: MA Experiment ID: 20000265 Result: Down-regulated in Transcription
  misc_feature: MA Experiment 20000265 PARAMETER Experiment Name: At_Open_Flower_P Parameter: Age (day) Value: 21
  misc_feature: MA Experiment 20000265 PARAMETER Experiment Name: At_Open_Flower_P Parameter: Plant Line Value: WS
  misc_feature: MA Experiment 20000265 PARAMETER Experiment Name: At_Open_Flower_P Parameter: Tissue Value: Closed Flower vs. Whole Plant
  misc_feature: MA Experiment ID: 20000286 Result: Down-regulated in Transcription
  misc_feature: MA Experiment 20000286 PARAMETER Experiment Name: At_Open_Flower_P Parameter: Age (day) Value: 21
  misc_feature: MA Experiment 20000286 PARAMETER Experiment Name: At_Open_Flower_P Parameter: Plant Line Value: WS
  misc_feature: MA Experiment 20000286 PARAMETER Experiment Name: At_Open_Flower_P Parameter: Tissue Value: Half Open vs. Whole Plant
  misc_feature: MA Experiment ID: 20000444 Result: Up-regulated in Transcription
  misc_feature: MA Experiment 20000444 PARAMETER Experiment Name: At_100uM_NAA__P Parameter: Age (day) Value: 14
  misc_feature: MA Experiment 20000444 PARAMETER Experiment Name: At_100uM_NAA__P Parameter: Organism Value: A. thaliana
  misc_feature: MA Experiment 20000444 PARAMETER Experiment Name: At_100uM_NAA__P Parameter: Plant Line Value: WS
  misc_feature: MA Experiment 20000444 PARAMETER Experiment Name: At_100uM_NAA__P Parameter: Timepoint (hr) Value: 1
  misc_feature: MA Experiment 20000444 PARAMETER Experiment Name: At_100uM_NAA__P Parameter: Tissue Value: Aerial
  misc_feature: MA Experiment 20000444 PARAMETER Experiment Name: At_100uM_NAA__P Parameter: Treatment Value: 100uM NAA vs. No Treatment
  misc_feature: MA Experiment ID: 20000445 Result: Up-regulated in Transcription
  misc_feature: MA Experiment 20000445 PARAMETER Experiment Name: At_100uM_NAA__P Parameter: Age (day) Value: 14
  misc_feature: MA Experiment 20000445 PARAMETER Experiment Name: At_100uM_NAA__P Parameter: Organism Value: A. thaliana
  misc_feature: MA Experiment 20000445 PARAMETER Experiment Name: At_100uM_NAA__P Parameter: Plant Line Value: WS
  misc_feature: MA Experiment 20000445 PARAMETER Experiment Name: At_100uM_NAA__P Parameter: Timepoint (hr) Value: 6
  misc_feature: MA Experiment 20000445 PARAMETER Experiment Name: At_100uM_NAA__P Parameter: Tissue Value: Aerial
  misc_feature: MA Experiment 20000445 PARAMETER Experiment Name: At_100uM_NAA__P Parameter: Treatment Value: 100uM NAA vs. No Treatment
  misc_feature: MA Experiment ID: 20000794 Result: Down-regulated in Transcription
  misc_feature: MA Experiment 20000794 PARAMETER Experiment Name: At_Petals_P Parameter: Age (day) Value: 23-25 days
  misc_feature: MA Experiment 20000794 PARAMETER Experiment Name: At_Petals_P Parameter: Plant Line Value: WS
  misc_feature: MA Experiment 20000794 PARAMETER Experiment Name: At_Petals_P Parameter: Tissue Value: Petals vs. Whole plant
  misc_feature: MA Experiment ID: 20001247 Result: Up-regulated in Transcription
  misc_feature: MA Experiment 20001247 PARAMETER Experiment Name: At_Far-red-induction_P Parameter: Age (day) Value: 7
  misc_feature: MA Experiment 20001247 PARAMETER Experiment Name: At_Far-red-induction_P Parameter: Light Value: Far-red vs. White
  misc_feature: MA Experiment 20001247 PARAMETER Experiment Name: At_Far-red-induction_P Parameter: Organism Value: A. thaliana
  misc_feature: MA Experiment 20001247 PARAMETER Experiment Name: At_Far-red-induction_P Parameter: Plant Line Value: Columbia
  misc_feature: MA Experiment 20001247 PARAMETER Experiment Name: At_Far-red-induction_P Parameter: Timepoint (hr) Value: 1
  misc_feature: MA Experiment 20001247 PARAMETER Experiment Name: At_Far-red-induction_P Parameter: Tissue Value: Whole Plant
  misc_feature: MA Experiment ID: 20001248 Result: Up-regulated in Transcription
  misc_feature: MA Experiment 20001248 PARAMETER Experiment Name: At_Far-red-induction_P Parameter: Age (day) Value: 7
  misc_feature: MA Experiment 20001248 PARAMETER Experiment Name: At_Far-red-induction_P Parameter: Light Value: Far-red vs. White
  misc_feature: MA Experiment 20001248 PARAMETER Experiment Name: At_Far-red-induction_P Parameter: Organism Value: A. thaliana
  misc_feature: MA Experiment 20001248 PARAMETER Experiment Name: At_Far-red-induction_P Parameter: Plant Line Value: Columbia
  misc_feature: MA Experiment 20001248 PARAMETER Experiment Name: At_Far-red-induction_P Parameter: Timepoint (hr) Value: 4
  misc_feature: MA Experiment 20001248 PARAMETER Experiment Name: At_Far-red-induction_P Parameter: Tissue Value: Whole Plant
  misc_feature: MA Experiment ID: 20001450 Result: Up-regulated in Transcription
  misc_feature: MA Experiment 20001450 PARAMETER Experiment Name: At_Far-red-induction_P Parameter: Age (day) Value: 7
  misc_feature: MA Experiment 20001450 PARAMETER Experiment Name: At_Far-red-induction_P Parameter: Light Value: Far-red vs. White
  misc_feature: MA Experiment 20001450 PARAMETER Experiment Name: At_Far-red-induction_P Parameter: Organism Value: A. thaliana
  misc_feature: MA Experiment 20001450 PARAMETER Experiment Name: At_Far-red-induction_P Parameter: Plant Line Value: Columbia
  misc_feature: MA Experiment 20001450 PARAMETER Experiment Name: At_Far-red-induction_P Parameter: Timepoint (hr) Value: 8
  misc_feature: MA Experiment 20001450 PARAMETER Experiment Name: At_Far-red-induction_P Parameter: Tissue Value: Whole Plant
  misc_feature: MA Experiment ID: 20001560 Result: Down-regulated in Transcription
  misc_feature: MA Experiment 20001560 PARAMETER Experiment Name: At_Drought_Soil_Dry_P Parameter: Age (day) Value: 28
  misc_feature: MA Experiment 20001560 PARAMETER Experiment Name: At_Drought_Soil_Dry_P Parameter: Organism Value: A. thaliana
  misc_feature: MA Experiment 20001560 PARAMETER Experiment Name: At_Drought_Soil_Dry_P Parameter: Plant Line Value: WS
  misc_feature: MA Experiment 20001560 PARAMETER Experiment Name: At_Drought_Soil_Dry_P Parameter: Post Timepoint (hr) Value: None
  misc_feature: MA Experiment 20001560 PARAMETER Experiment Name: At_Drought_Soil_Dry_P Parameter: Post-Treatment Value: None
  misc_feature: MA Experiment 20001560 PARAMETER Experiment Name: At_Drought_Soil_Dry_P Parameter: Timepoint (day) Value: 14
  misc_feature: MA Experiment 20001560 PARAMETER Experiment Name: At_Drought_Soil_Dry_P Parameter: Treatment Value: Drought vs. No Drought
  misc_feature: MA Experiment ID: 20001904 Result: Down-regulated in Transcription
  misc_feature: MA Experiment 20001904 PARAMETER Experiment Name: At_Drought_Reproduction_P Parameter: Age (day) Value: 37
  misc_feature: MA Experiment 20001904 PARAMETER Experiment Name: At_Drought_Reproduction_P Parameter: Organism Value: A. thaliana
  misc_feature: MA Experiment 20001904 PARAMETER Experiment Name: At_Drought_Reproduction_P Parameter: Plant Line Value: WS
  misc_feature: MA Experiment 20001904 PARAMETER Experiment Name: At_Drought_Reproduction_P Parameter: Timepoint (day) Value: 7
  misc_feature: MA Experiment 20001904 PARAMETER Experiment Name: At_Drought_Reproduction_P Parameter: Tissue Value: Rosettes
  misc_feature: MA Experiment 20001904 PARAMETER Experiment Name: At_Drought_Reproduction_P Parameter: Treatment Value: Drought vs. No Drought
  misc_feature: MA Experiment ID: 20001905 Result: Down-regulated in Transcription
  misc_feature: MA Experiment 20001905 PARAMETER Experiment Name: At_Drought_Reproduction_P Parameter: Age (day) Value: 40
  misc_feature: MA Experiment 20001905 PARAMETER Experiment Name: At_Drought_Reproduction_P Parameter: Organism Value: A. thaliana
  misc_feature: MA Experiment 20001905 PARAMETER Experiment Name: At_Drought_Reproduction_P Parameter: Plant Line Value: WS
  misc_feature: MA Experiment 20001905 PARAMETER Experiment Name: At_Drought_Reproduction_P Parameter: Timepoint (day) Value: 10
  misc_feature: MA Experiment 20001905 PARAMETER Experiment Name: At_Drought_Reproduction_P Parameter: Tissue Value: Rosettes
  misc_feature: MA Experiment 20001905 PARAMETER Experiment Name: At_Drought_Reproduction_P Parameter: Treatment Value: Drought vs. No Drought
  misc_feature: MA Experiment ID: 20001906 Result: Down-regulated in Transcription
  misc_feature: MA Experiment 20001906 PARAMETER Experiment Name: At_Drought_Reproduction_P Parameter: Age (day) Value: 35
  misc_feature: MA Experiment 20001906 PARAMETER Experiment Name: At_Drought_Reproduction_P Parameter: Organism Value: A. thaliana
  misc_feature: MA Experiment 20001906 PARAMETER Experiment Name: At_Drought_Reproduction_P Parameter: Plant Line Value: WS
  misc_feature: MA Experiment 20001906 PARAMETER Experiment Name: At_Drought_Reproduction_P Parameter: Timepoint (day) Value: 5
  misc_feature: MA Experiment 20001906 PARAMETER Experiment Name: At_Drought_Reproduction_P Parameter: Tissue Value: Siliques
  misc_feature: MA Experiment 20001906 PARAMETER Experiment Name: At_Drought_Reproduction_P Parameter: Treatment Value: Drought vs. No Drought
gctgttactgctaccgacaagcttagctttttttcctttgtccttaattcagaaaacagtttcttctctctctaccagtatctatctttattctcctttaacttggataaaacactcagcttcctcgaagcctctcatcttcatcatcagcagcttctctatatctctcctctctttcaaggataataaccaaaagcttttctttttatcttctcctgcaattcttgaagaaatggatgagtttgttaacctcaaggaaacagagctgaggctgggattaccgggaacagataatgtatgtgaagcaaaagagagagtttcttgctgtaataacaacaataagagagtactatcaactgatactgagaaggagattgaatcatcatcaaggaaaactgaaacatcccctcctcgaaaggctcagattgttggatggccaccagttagatcttacaggaagaacaacattcagagtaagaagaatgaatctgagcatgagggtcaaggaatctatgtgaaagtaagtatggatggtgcaccatacttgaggaaaatagatctgagttgttacaaaggatactcagagttgcttaaagctttagaagtgatgttcaaattctctgtgggagagtactttgagagagatggatataaaggttcagactttgtgcctacttatgaagacaaagatggtgattggatgctcattggtgatgttccatgggagatgttcatatgtacgtgcaagagactaaggatcatgaaaggatcagaagccaaaggtttaggctgtggtgtatgagatatatcttcaagaaatctaacagagacacaaaagaacttgaagaaaaatagagtttcttttggttcagagaaatctctgtctgtgcttgggttgtcgggtttctcgggcaagatctatgttcattggattgaatccaattcatagcctttatttacctcatcggtaaaattcaaatgtaaacatgcttaatggtcttaagcatatgaaactggaacctaattacattttgtttcagaaacagggcaaaaggttgtccttaaatctttggttatgtgtattacattaattaaagtgttatgaagattgaagagttgtttttatatttgtagcaattctgttttgcgttctcattgatcaaagagattttcaagc

SEQ ID NO: 47254 - protein, 266 aa, Arabidopsis thaliana
  peptide (1)..(266): Ceres Seq. ID no. 13588288
  misc_feature (82)..(266): Pfam Name: AUX/IAA family Pfam Description: AUX/IAA family
  misc_feature (82)..(266): Homolog of NCBI NO: 452777 NR Description: auxin-induced protein [Pisum sativum]
  misc_feature (82)..(266): Homolog of NCBI NO: 1352057 NR Description: AUXIN-INDUCED PROTEIN IAA4
  misc_feature (77)..(266): Homolog of NCBI NO: 20269063 NR Description: aux/IAA protein [Populus tremula x Populus
  misc_feature (82)..(266): Homolog of NCBI NO: 4887012 NR Description: Nt-iaa2.3 deduced protein [Nicotiana tabacum]
  misc_feature (82)..(266): Homolog of NCBI NO: 416641 NR Description: Auxin-induced protein 22B (Indole-3-acetic acid
  misc_feature (75)..(264): Homolog of NCBI NO: 11131103 NR Description: Auxin-induced protein 22D (Indole-3-acetic acid
  misc_feature (79)..(266): Homolog of NCBI NO: 34550779 NR Description: Gbiaa-Re [Gossypium barbadense]
  misc_feature (79)..(265): Homolog of NCBI NO: 99663 NR Description: auxin-induced protein AUX2-11 - Arabidopsis
  misc_feature (79)..(265): Homolog of NCBI NO: 15239950 NR Description: auxin-responsive protein IAA4 (Indoleacetic
  misc_feature (78)..(266): Homolog of NCBI NO: 15219692 NR Description: auxin-responsive protein IAA3 (Indoleacetic
LLLLPTSLAFFPLSLIQKTVSSLSTSIYLYSPLTWIKHSASSKPLIFIISSFSISLLSFKDNNQKLFFLSSPAILEEMDEFVNLKETELRLGLPGTDNVCEAKERVSCCNNNNKRVLSTDTEKEIESSSRKTETSPPRKAQIVGWPPVRSYRKNNIQSKKNESEHEGQGIYVKVSMDGAPYLRKIDLSCYKGYSELLKALEVMFKFSVGEYFERDGYKGSDFVPTYEDKDGDWMLIGDVPWEMFICTCKRLRIMKGSEAKGLGCGV

SEQ ID NO: 47255 - protein, 189 aa, Arabidopsis thaliana
  peptide (1)..(189): Ceres Seq. ID no. 13588289
  misc_feature (5)..(189): Pfam Name: AUX/IAA family Pfam Description: AUX/IAA family
  misc_feature (5)..(189): Homolog of NCBI NO: 452777 NR Description: auxin-induced protein [Pisum sativum]
  misc_feature (5)..(189): Homolog of NCBI NO: 1352057 NR Description: AUXIN-INDUCED PROTEIN IAA4
  misc_feature (1)..(189): Homolog of NCBI NO: 20269063 NR Description: aux/IAA protein [Populus tremula x Populus
  misc_feature (5)..(189): Homolog of NCBI NO: 4887012 NR Description: Nt-iaa2.3 deduced protein [Nicotiana tabacum]
  misc_feature (5)..(189): Homolog of NCBI NO: 416641 NR Description: Auxin-induced protein 22B (Indole-3-acetic acid
  misc_feature (1)..(187): Homolog of NCBI NO: 11131103 NR Description: Auxin-induced protein 22D (Indole-3-acetic acid
  misc_feature (2)..(189): Homolog of NCBI NO: 34550779 NR Description: Gbiaa-Re [Gossypium barbadense]
  misc_feature (2)..(188): Homolog of NCBI NO: 99663 NR Description: auxin-induced protein AUX2-11 - Arabidopsis
  misc_feature (2)..(188): Homolog of NCBI NO: 15239950 NR Description: auxin-responsive protein IAA4 (Indoleacetic
  misc_feature (1)..(189): Homolog of NCBI NO: 15219692 NR Description: auxin-responsive protein IAA3 (Indoleacetic
MDEFVNLKETELRLGLPGTDNVCEAKERVSCCNNNNKRVLSTDTEKEIESSSRKTETSPPRKAQIVGWPPVRSYRKNNIQSKKNESEHEGQGIYVKVSMDGAPYLRKIDLSCYKGYSELLKALEVMFKFSVGEYFERDGYKGSDFVPTYEDKDGDWMLIGDVPWEMFICTCKRLRIMKGSEAKGLGCGV

SEQ ID NO: 47256 - DNA, 970 bp, Arabidopsis thaliana; identical to SEQ ID NO: 28292
  misc_feature (1)..(970): Ceres Seq. ID no. 13592472
  misc_feature: MA Experiment ID: 108595 Result: Down-regulated in Transcription
  misc_feature: MA Experiment 108595 PARAMETER Experiment Name: At_Ler-pi_Ovule_cDNA_P Parameter: Plant Line Value: null
  misc_feature: MA Experiment ID: 20000071 Result: Down-regulated in Transcription
  misc_feature: MA Experiment 20000071 PARAMETER Experiment Name: At_100uM_ABA_Mutants_cDNA_P Parameter: Plant Line Value: CS8104
  misc_feature: MA Experiment 20000071 PARAMETER Experiment Name: At_100uM_ABA_Mutants_cDNA_P Parameter: Timepoint (hr) Value: 6
  misc_feature: MA Experiment 20000071 PARAMETER Experiment Name: At_100uM_ABA_Mutants_cDNA_P Parameter: Tissue Value: Aerial
  misc_feature: MA Experiment 20000071 PARAMETER Experiment Name: At_100uM_ABA_Mutants_cDNA_P Parameter: Treatment Value: 100uM ABA vs. No Treatment
  misc_feature: MA Experiment ID: 20000180 Result: Down-regulated in Transcription
  misc_feature: MA Experiment 20000180 PARAMETER Experiment Name: At_Germinating_Seeds_P Parameter: Age (hr) Value: 24 vs. 0
  misc_feature: MA Experiment 20000180 PARAMETER Experiment Name: At_Germinating_Seeds_P Parameter: Tissue Value: Germinating Seeds
  misc_feature: MA Experiment ID: 20000184 Result: Up-regulated in Transcription
  misc_feature: MA Experiment 20000184 PARAMETER Experiment Name: At_Shoots__P Parameter: Age (day) Value: 7
  misc_feature: MA Experiment 20000184 PARAMETER Experiment Name: At_Shoots__P Parameter: Tissue Value: Shoots vs. Whole Plant
  misc_feature: MA Experiment ID: 20000234 Result: Up-regulated in Transcription
  misc_feature: MA Experiment 20000234 PARAMETER Experiment Name: At_Siliques_P Parameter: Age (day) Value: 21
  misc_feature: MA Experiment 20000234 PARAMETER Experiment Name: At_Siliques_P Parameter: Organism Value: A. thaliana
  misc_feature: MA Experiment 20000234 PARAMETER Experiment Name: At_Siliques_P Parameter: Plant Line Value: WS
  misc_feature: MA Experiment 20000234 PARAMETER Experiment Name: At_Siliques_P Parameter: Tissue Value: Less Than 5mm Siliques vs. Whole Plant
  misc_feature: MA Experiment ID: 20001451 Result: Down-regulated in Transcription
  misc_feature: MA Experiment 20001451 PARAMETER Experiment Name: At_Far-red-induction_P Parameter: Age (day) Value: 7
  misc_feature: MA Experiment 20001451 PARAMETER Experiment Name: At_Far-red-induction_P Parameter: Light Value: Far-red vs. White
  misc_feature: MA Experiment 20001451 PARAMETER Experiment Name: At_Far-red-induction_P Parameter: Organism Value: A. thaliana
  misc_feature: MA Experiment 20001451 PARAMETER Experiment Name: At_Far-red-induction_P Parameter: Plant Line Value: Columbia
  misc_feature: MA Experiment 20001451 PARAMETER Experiment Name: At_Far-red-induction_P Parameter: Timepoint (hr) Value: 24
  misc_feature: MA Experiment 20001451 PARAMETER Experiment Name: At_Far-red-induction_P Parameter: Tissue Value: Whole Plant
  misc_feature: MA Experiment ID: 20001557 Result: Up-regulated in Transcription
  misc_feature: MA Experiment 20001557 PARAMETER Experiment Name: At_Drought_Soil_Dry_P Parameter: Age (day) Value: 27
  misc_feature: MA Experiment 20001557 PARAMETER Experiment Name: At_Drought_Soil_Dry_P Parameter: Organism Value: A. thaliana
  misc_feature: MA Experiment 20001557 PARAMETER Experiment Name: At_Drought_Soil_Dry_P Parameter: Plant Line Value: WS
  misc_feature: MA Experiment 20001557 PARAMETER Experiment Name: At_Drought_Soil_Dry_P Parameter: Post Timepoint (hr) Value: 3
  misc_feature: MA Experiment 20001557 PARAMETER Experiment Name: At_Drought_Soil_Dry_P Parameter: Post-Treatment Value: Re-Water vs. No Drought
  misc_feature: MA Experiment 20001557 PARAMETER Experiment Name: At_Drought_Soil_Dry_P Parameter: Timepoint (day) Value: 13
  misc_feature: MA Experiment 20001557 PARAMETER Experiment Name: At_Drought_Soil_Dry_P Parameter: Treatment Value: Drought vs. No Drought
  misc_feature: MA Experiment ID: 20001558 Result: Up-regulated in Transcription
  misc_feature: MA Experiment 20001558 PARAMETER Experiment Name: At_Drought_Soil_Dry_P Parameter: Age (day) Value: 27
  misc_feature: MA Experiment 20001558 PARAMETER Experiment Name: At_Drought_Soil_Dry_P Parameter: Organism Value: A. thaliana
  misc_feature: MA Experiment 20001558 PARAMETER Experiment Name: At_Drought_Soil_Dry_P Parameter: Plant Line Value: WS
  misc_feature: MA Experiment 20001558 PARAMETER Experiment Name: At_Drought_Soil_Dry_P Parameter: Post Timepoint (hr) Value: 6
  misc_feature: MA Experiment 20001558 PARAMETER Experiment Name: At_Drought_Soil_Dry_P Parameter: Post-Treatment Value: Re-Water vs. No Drought
  misc_feature: MA Experiment 20001558 PARAMETER Experiment Name: At_Drought_Soil_Dry_P Parameter: Timepoint (day) Value: 13
  misc_feature: MA Experiment 20001558 PARAMETER Experiment Name: At_Drought_Soil_Dry_P Parameter: Treatment Value: Drought vs. No Drought
  misc_feature: MA Experiment ID: 20001757 Result: Up-regulated in Transcription
  misc_feature: MA Experiment 20001757 PARAMETER Experiment Name: At_50mM_NH4NO3_L-to-H_P Parameter: Timepoint (hr) Value: 6
  misc_feature: MA Experiment 20001757 PARAMETER Experiment Name: At_50mM_NH4NO3_L-to-H_P Parameter: Tissue Value: Leaf
  misc_feature: MA Experiment 20001757 PARAMETER Experiment Name: At_50mM_NH4NO3_L-to-H_P Parameter: Treatment Value: 50mM NH4NO3 vs 100mM Mannitol

SEQ ID NO: 47257 - protein, 249 aa, Arabidopsis thaliana; identical to SEQ ID NO: 28293
  peptide (1)..(249): Ceres Seq. ID no. 13592473
  misc_feature (104)..(188): Pfam Name: Ribosomal protein S3, C-terminal domain Pfam Description: Ribosomal protein S3, C-terminal domain
  misc_feature (104)..(188): Pfam Name: Ribosomal protein S3, C-terminal domain Pfam Description: Ribosomal protein S3, C-terminal domain
  misc_feature (1)..(216): Homolog of NCBI NO: 27735393 NR Description: Similar to ribosomal protein S3 [Xenopus laevis]
  misc_feature (1)..(216): Homolog of NCBI NO: 6755372 NR Description: ribosomal protein S3 [Mus musculus]
  misc_feature (1)..(249): Homolog of NCBI NO: 133940 NR Description: 40S ribosomal protein S3A (S1A)
  misc_feature (1)..(216): Homolog of NCBI NO: 12847921 NR Description: unnamed protein product [Mus musculus]
  misc_feature (1)..(249): Homolog of NCBI NO: 38512247 NR Description: Ribosomal protein S3 [Silurana tropicalis]
  misc_feature (1)..(216): Homolog of NCBI NO: 27735393 NR Description: Similar to ribosomal protein S3 [Xenopus laevis]
  misc_feature (1)..(249): Homolog of NCBI NO: 133940 NR Description: 40S ribosomal protein S3A (S1A)
  misc_feature (1)..(249): Homolog of NCBI NO: 38512247 NR Description: Ribosomal protein S3 [Silurana tropicalis]
  misc_feature (1)..(249): Homolog of NCBI NO: 15232352 NR Description: 40S ribosomal protein S3 (RPS3B) [Arabidopsis
  misc_feature (1)..(247): Homolog of NCBI NO: 15225107 NR Description: 40S ribosomal protein S3 (RPS3A) [Arabidopsis
  misc_feature (1)..(249): Homolog of NCBI NO: 15238533 NR Description: 40S ribosomal protein S3 (RPS3C) [Arabidopsis
  misc_feature (3)..(230): Homolog of NCBI NO: 14192875 NR Description: Putative 40S ribosomal protein; contains
  misc_feature (1)..(225): Homolog of NCBI NO: 22204124 NR Description: putative 40S ribosomal protein S3 [Triticum
  misc_feature (1)..(216): Homolog of NCBI NO: 12847921 NR Description: unnamed protein product [Mus musculus]
  misc_feature (1)..(216): Homolog of NCBI NO: 6755372 NR Description: ribosomal protein S3 [Mus musculus]
  misc_feature (1)..(225): Homolog of NCBI NO: 22204124 NR Description: putative 40S ribosomal protein S3 [Triticum
  misc_feature (3)..(230): Homolog of NCBI NO: 14192875 NR Description: Putative 40S ribosomal protein; contains
  misc_feature (1)..(249): Homolog of NCBI NO: 15238533 NR Description: 40S ribosomal protein S3 (RPS3C) [Arabidopsis
  misc_feature (1)..(247): Homolog of NCBI NO: 15225107 NR Description: 40S ribosomal protein S3 (RPS3A) [Arabidopsis
  misc_feature (1)..(249): Homolog of NCBI NO: 15232352 NR Description: 40S ribosomal protein S3 (RPS3B) [Arabidopsis

SEQ ID NO: 47258 - protein, 206 aa, Arabidopsis thaliana; identical to SEQ ID NO: 28294
  peptide (1)..(206): Ceres Seq. ID no. 13592474
  misc_feature (61)..(145): Pfam Name: Ribosomal protein S3, C-terminal domain Pfam Description: Ribosomal protein S3, C-terminal domain
  misc_feature (61)..(145): Pfam Name: Ribosomal protein S3, C-terminal domain Pfam Description: Ribosomal protein S3, C-terminal domain
  misc_feature (1)..(173): Homolog of NCBI NO: 27735393 NR Description: Similar to ribosomal protein S3 [Xenopus laevis]
  misc_feature (1)..(173): Homolog of NCBI NO: 6755372 NR Description: ribosomal protein S3 [Mus musculus]
  misc_feature (1)..(206): Homolog of NCBI NO: 133940 NR Description: 40S ribosomal protein S3A (S1A)
  misc_feature (1)..(173): Homolog of NCBI NO: 12847921 NR Description: unnamed protein product [Mus musculus]
  misc_feature (1)..(206): Homolog of NCBI NO: 38512247 NR Description: Ribosomal protein S3 [Silurana tropicalis]
  misc_feature (1)..(173): Homolog of NCBI NO: 27735393 NR Description: Similar to ribosomal protein S3 [Xenopus laevis]
  misc_feature (1)..(206): Homolog of NCBI NO: 133940 NR Description: 40S ribosomal protein S3A (S1A)
  misc_feature (1)..(206): Homolog of NCBI NO: 38512247 NR Description: Ribosomal protein S3 [Silurana tropicalis]
  misc_feature (1)..(206): Homolog of NCBI NO: 15232352 NR Description: 40S ribosomal protein S3 (RPS3B) [Arabidopsis
  misc_feature (1)..(204): Homolog of NCBI NO: 15225107 NR Description: 40S ribosomal protein S3 (RPS3A) [Arabidopsis
  misc_feature (1)..(206): Homolog of NCBI NO: 15238533 NR Description: 40S ribosomal protein S3 (RPS3C) [Arabidopsis
  misc_feature (1)..(187): Homolog of NCBI NO: 14192875 NR Description: Putative 40S ribosomal protein; contains
  misc_feature (1)..(182): Homolog of NCBI NO: 22204124 NR Description: putative 40S ribosomal protein S3 [Triticum
  misc_feature (1)..(173): Homolog of NCBI NO: 12847921 NR Description: unnamed protein product [Mus musculus]
  misc_feature (1)..(173): Homolog of NCBI NO: 6755372 NR Description: ribosomal protein S3 [Mus musculus]
  misc_feature (1)..(182): Homolog of NCBI NO: 22204124 NR Description: putative 40S ribosomal protein S3 [Triticum
  misc_feature (1)..(187): Homolog of NCBI NO: 14192875 NR Description: Putative 40S ribosomal protein; contains
  misc_feature (1)..(206): Homolog of NCBI NO: 15238533 NR Description: 40S ribosomal protein S3 (RPS3C) [Arabidopsis
  misc_feature (1)..(204): Homolog of NCBI NO: 15225107 NR Description: 40S ribosomal protein S3 (RPS3A) [Arabidopsis
  misc_feature (1)..(206): Homolog of NCBI NO: 15232352 NR Description: 40S ribosomal protein S3 (RPS3B) [Arabidopsis

SEQ ID NO: 47259 - DNA, 1480 bp, Arabidopsis thaliana; identical to SEQ ID NO: 45927
  misc_feature (1)..(1480): Ceres Seq. ID no. 13591502
  misc_feature: MA Experiment ID: 20000180 Result: Up-regulated in Transcription
  misc_feature: MA Experiment 20000180 PARAMETER Experiment Name: At_Germinating_Seeds_P Parameter: Age (hr) Value: 24 vs. 0
  misc_feature: MA Experiment 20000180 PARAMETER Experiment Name: At_Germinating_Seeds_P Parameter: Tissue Value: Germinating Seeds
  misc_feature: MA Experiment ID: 20000185 Result: Down-regulated in Transcription
  misc_feature: MA Experiment 20000185 PARAMETER Experiment Name: At_Roots__P Parameter: Age (day) Value: 7 vs. 21
  misc_feature: MA Experiment 20000185 PARAMETER Experiment Name: At_Roots__P Parameter: Organism Value: A. thaliana
  misc_feature: MA Experiment 20000185 PARAMETER Experiment Name: At_Roots__P Parameter: Tissue Value: Roots vs. Whole Plant
  misc_feature: MA Experiment ID: 20000227 Result: Down-regulated in Transcription
  misc_feature: MA Experiment 20000227 PARAMETER Experiment Name: At_Root-Tips-vs-Tops_P Parameter: Tissue Value: Root Tips vs. Root Tops
  misc_feature: MA Experiment ID: 20000437 Result: Down-regulated in Transcription
  misc_feature: MA Experiment 20000437 PARAMETER Experiment Name: At_Drought_P Parameter: Age (day) Value: 8
  misc_feature: MA Experiment 20000437 PARAMETER Experiment Name: At_Drought_P Parameter: Organism Value: A. thaliana
  misc_feature: MA Experiment 20000437 PARAMETER Experiment Name: At_Drought_P Parameter: Plant Line Value: WS
  misc_feature: MA Experiment 20000437 PARAMETER Experiment Name: At_Drought_P Parameter: Timepoint (hr) Value: 24
  misc_feature: MA Experiment 20000437 PARAMETER Experiment Name: At_Drought_P Parameter: Tissue Value: Whole Plant
  misc_feature: MA Experiment 20000437 PARAMETER Experiment Name: At_Drought_P Parameter: Treatment Value: Drought vs. No Drought
  misc_feature: MA Experiment ID: 20000439 Result: Down-regulated in Transcription
  misc_feature: MA Experiment 20000439 PARAMETER Experiment Name: At_Roots__P Parameter: Age (day) Value: 14 vs. 21
  misc_feature: MA Experiment 20000439 PARAMETER Experiment Name: At_Roots__P Parameter: Organism Value: A. thaliana
  misc_feature: MA Experiment 20000439 PARAMETER Experiment Name: At_Roots__P Parameter: Tissue Value: Roots vs. Whole Plant
  misc_feature: MA Experiment ID: 20000794 Result: Down-regulated in Transcription
  misc_feature: MA Experiment 20000794 PARAMETER Experiment Name: At_Petals_P Parameter: Age (day) Value: 23-25 days
  misc_feature: MA Experiment 20000794 PARAMETER Experiment Name: At_Petals_P Parameter: Plant Line Value: WS
  misc_feature: MA Experiment 20000794 PARAMETER Experiment Name: At_Petals_P Parameter: Tissue Value: Petals vs. Whole plant
  misc_feature: MA Experiment ID: 20001451 Result: Down-regulated in Transcription
  misc_feature: MA Experiment 20001451 PARAMETER Experiment Name: At_Far-red-induction_P Parameter: Age (day) Value: 7
  misc_feature: MA Experiment 20001451 PARAMETER Experiment Name: At_Far-red-induction_P Parameter: Light Value: Far-red vs. White
  misc_feature: MA Experiment 20001451 PARAMETER Experiment Name: At_Far-red-induction_P Parameter: Organism Value: A. thaliana
  misc_feature: MA Experiment 20001451 PARAMETER Experiment Name: At_Far-red-induction_P Parameter: Plant Line Value: Columbia
  misc_feature: MA Experiment 20001451 PARAMETER Experiment Name: At_Far-red-induction_P Parameter: Timepoint (hr) Value: 24
  misc_feature: MA Experiment 20001451 PARAMETER Experiment Name: At_Far-red-induction_P Parameter: Tissue Value: Whole Plant
  misc_feature: MA Experiment ID: 20001557 Result: Down-regulated in Transcription
  misc_feature: MA Experiment 20001557 PARAMETER Experiment Name: At_Drought_Soil_Dry_P Parameter: Age (day) Value: 27
  misc_feature: MA Experiment 20001557 PARAMETER Experiment Name: At_Drought_Soil_Dry_P Parameter: Organism Value: A. thaliana
  misc_feature: MA Experiment 20001557 PARAMETER Experiment Name: At_Drought_Soil_Dry_P Parameter: Plant Line Value: WS
  misc_feature: MA Experiment 20001557 PARAMETER Experiment Name: At_Drought_Soil_Dry_P Parameter: Post Timepoint (hr) Value: 3
  misc_feature: MA Experiment 20001557 PARAMETER Experiment Name: At_Drought_Soil_Dry_P Parameter: Post-Treatment Value: Re-Water vs. No Drought
  misc_feature: MA Experiment 20001557 PARAMETER Experiment Name: At_Drought_Soil_Dry_P Parameter: Timepoint (day) Value: 13
  misc_feature: MA Experiment 20001557 PARAMETER Experiment Name: At_Drought_Soil_Dry_P Parameter: Treatment Value: Drought vs. No Drought
  misc_feature: MA Experiment ID: 20001757 Result: Up-regulated in Transcription
  misc_feature: MA Experiment 20001757 PARAMETER Experiment Name: At_50mM_NH4NO3_L-to-H_P Parameter: Timepoint (hr) Value: 6
  misc_feature: MA Experiment 20001757 PARAMETER Experiment Name: At_50mM_NH4NO3_L-to-H_P Parameter: Tissue Value: Leaf
  misc_feature: MA Experiment 20001757 PARAMETER Experiment Name: At_50mM_NH4NO3_L-to-H_P Parameter: Treatment Value: 50mM NH4NO3 vs 100mM Mannitol
  misc_feature: MA Experiment ID: 20001904 Result: Down-regulated in Transcription
  misc_feature: MA Experiment 20001904 PARAMETER Experiment Name: At_Drought_Reproduction_P Parameter: Age (day) Value: 37
  misc_feature: MA Experiment 20001904 PARAMETER Experiment Name: At_Drought_Reproduction_P Parameter: Organism Value: A. thaliana
  misc_feature: MA Experiment 20001904 PARAMETER Experiment Name: At_Drought_Reproduction_P Parameter: Plant Line Value: WS
  misc_feature: MA Experiment 20001904 PARAMETER Experiment Name: At_Drought_Reproduction_P Parameter: Timepoint (day) Value: 7
  misc_feature: MA Experiment 20001904 PARAMETER Experiment Name: At_Drought_Reproduction_P Parameter: Tissue Value: Rosettes
  misc_feature: MA Experiment 20001904 PARAMETER Experiment Name: At_Drought_Reproduction_P Parameter: Treatment Value: Drought vs. No Drought
  misc_feature: MA Experiment ID: 20001906 Result: Down-regulated in Transcription
  misc_feature: MA Experiment 20001906 PARAMETER Experiment Name: At_Drought_Reproduction_P Parameter: Age (day) Value: 35
  misc_feature: MA Experiment 20001906 PARAMETER Experiment Name: At_Drought_Reproduction_P Parameter: Organism Value: A. thaliana
  misc_feature: MA Experiment 20001906 PARAMETER Experiment Name: At_Drought_Reproduction_P Parameter: Plant Line Value: WS
  misc_feature: MA Experiment 20001906 PARAMETER Experiment Name: At_Drought_Reproduction_P Parameter: Timepoint (day) Value: 5
  misc_feature: MA Experiment 20001906 PARAMETER Experiment Name: At_Drought_Reproduction_P Parameter: Tissue Value: Siliques
  misc_feature: MA Experiment 20001906 PARAMETER Experiment Name: At_Drought_Reproduction_P Parameter: Treatment Value: Drought vs. No Drought

SEQ ID NO: 47260 - protein, 396 aa, Arabidopsis thaliana; identical to SEQ ID NO: 45928
  peptide (1)..(396): Ceres Seq. ID no. 13591503
  misc_feature (214)..(374): Pfam Name: Glyceraldehyde 3-phosphate dehydrogenase, Pfam Description: Glyceraldehyde 3-phosphate dehydrogenase,
  misc_feature (214)..(374): Pfam Name: Glyceraldehyde 3-phosphate dehydrogenase, Pfam Description: Glyceraldehyde 3-phosphate dehydrogenase,
  misc_feature (214)..(374): Pfam Name: Glyceraldehyde 3-phosphate dehydrogenase, Pfam Description: Glyceraldehyde 3-phosphate dehydrogenase,
  misc_feature (1)..(396): Homolog of NCBI NO: 20455487 NR Description: Glyceraldehyde 3-phosphate dehydrogenase A, precursor (NADP-dependent glyceraldehydephosphate dehydrogenase
  misc_feature (10)..(396): Homolog of NCBI NO: 120661 NR Description: Glyceraldehyde 3-phosphate dehydrogenase A, precursor (NADP-dependent glyceraldehydephosphate dehydrogenase
  misc_feature (14)..(396): Homolog of NCBI NO: 22240 NR Description: GADPH (383 AA) [Zea mays]
  misc_feature (1)..(396): Homolog of NCBI NO: 120657 NR Description: Glyceraldehyde 3-phosphate dehydrogenase A, precursor (NADP-dependent glyceraldehydephosphate dehydrogenase
  misc_feature (1)..(396): Homolog of NCBI NO: 20729 NR Description: precursor (AA -68 to 337) [Pisum sativum]
  misc_feature (1)..(396): Homolog of NCBI NO: 20455487 NR Description: Glyceraldehyde 3-phosphate dehydrogenase A, precursor (NADP-dependent glyceraldehydephosphate dehydrogenase
  misc_feature (14)..(396): Homolog of NCBI NO: 22240 NR Description: GADPH (383 AA) [Zea mays]
  misc_feature (1)..(396): Homolog of NCBI NO: 20729 NR Description: precursor (AA -68 to 337) [Pisum sativum]
  misc_feature (1)..(396): Homolog of NCBI NO: 120657 NR Description: Glyceraldehyde 3-phosphate dehydrogenase A, precursor (NADP-dependent glyceraldehydephosphate dehydrogenase
  misc_feature (14)..(396): Homolog of NCBI NO: 22240 NR Description: GADPH (383 AA) [Zea mays]
  misc_feature (10)..(396): Homolog of NCBI NO: 120661 NR Description: Glyceraldehyde 3-phosphate dehydrogenase A, precursor (NADP-dependent glyceraldehydephosphate dehydrogenase
  misc_feature (1)..(396): Homolog of NCBI NO: 20455487 NR Description: Glyceraldehyde 3-phosphate dehydrogenase A, precursor (NADP-dependent glyceraldehydephosphate dehydrogenase
  misc_feature (1)..(396): Homolog of NCBI NO: 30688425 NR Description: glyceraldehyde 3-phosphate dehydrogenase A
  misc_feature (1)..(396): Homolog of NCBI NO: 2117520 NR Description: glyceraldehyde-3-phosphate dehydrogenase (NADP)
  misc_feature (1)..(396): Homolog of NCBI NO: 15222111 NR Description: calcium-binding protein, calreticulin -related
  misc_feature (47)..(396): Homolog of NCBI NO: 166702 NR Description: glyceraldehyde 3-phosphate dehydrogenase A
  misc_feature (1)..(396): Homolog of NCBI NO: 120658 NR Description: Glyceraldehyde 3-phosphate dehydrogenase A, precursor (NADP-dependent glyceraldehydephosphate dehydrogenase
  misc_feature (1)..(396): Homolog of NCBI NO: 30688425 NR Description: glyceraldehyde 3-phosphate dehydrogenase A
  misc_feature (1)..(396): Homolog of NCBI NO: 2117520 NR Description: glyceraldehyde-3-phosphate dehydrogenase (NADP)
  misc_feature (1)..(396): Homolog of NCBI NO: 15222111 NR Description: calcium-binding protein, calreticulin -related
  misc_feature (47)..(396): Homolog of NCBI NO: 166702 NR Description: glyceraldehyde 3-phosphate dehydrogenase A
  misc_feature (1)..(396): Homolog of NCBI NO: 120658 NR Description: Glyceraldehyde 3-phosphate dehydrogenase A, precursor (NADP-dependent glyceraldehydephosphate dehydrogenase
  misc_feature (1)..(396): Homolog of NCBI NO: 20729 NR Description: precursor (AA -68 to 337) [Pisum sativum]
  misc_feature (1)..(396): Homolog of NCBI NO: 120657 NR Description: Glyceraldehyde 3-phosphate dehydrogenase A, precursor (NADP-dependent glyceraldehydephosphate dehydrogenase
  misc_feature (10)..(396): Homolog of NCBI NO: 120661 NR Description: Glyceraldehyde 3-phosphate dehydrogenase A, precursor (NADP-dependent glyceraldehydephosphate dehydrogenase
  misc_feature (1)..(396): Homolog of NCBI NO: 120658 NR Description: Glyceraldehyde 3-phosphate dehydrogenase A, precursor (NADP-dependent glyceraldehydephosphate dehydrogenase
  misc_feature (47)..(396): Homolog of NCBI NO: 166702 NR Description: glyceraldehyde 3-phosphate dehydrogenase A
  misc_feature (1)..(396): Homolog of NCBI NO: 15222111 NR Description: calcium-binding protein, calreticulin -related
  misc_feature (1)..(396): Homolog of NCBI NO: 2117520 NR Description: glyceraldehyde-3-phosphate dehydrogenase (NADP)
  misc_feature (1)..(396): Homolog of NCBI NO: 30688425 NR Description: glyceraldehyde 3-phosphate dehydrogenase A

SEQ ID NO: 47261 - protein, 350 aa, Arabidopsis thaliana; identical to SEQ ID NO: 45929
  peptide (1)..(350): Ceres Seq. ID no. 13591504
  misc_feature (168)..(328): Pfam Name: Glyceraldehyde 3-phosphate dehydrogenase, Pfam Description: Glyceraldehyde 3-phosphate dehydrogenase,
  misc_feature (168)..(328): Pfam Name: Glyceraldehyde 3-phosphate dehydrogenase, Pfam Description: Glyceraldehyde 3-phosphate dehydrogenase,
  misc_feature (168)..(328): Pfam Name: Glyceraldehyde 3-phosphate dehydrogenase, Pfam Description: Glyceraldehyde 3-phosphate dehydrogenase,
  misc_feature (1)..(350): Homolog of NCBI NO: 20455487 NR Description: Glyceraldehyde 3-phosphate dehydrogenase A, precursor (NADP-dependent glyceraldehydephosphate dehydrogenase
  misc_feature (1)..(350): Homolog of NCBI NO: 120661 NR Description: Glyceraldehyde 3-phosphate dehydrogenase A, precursor (NADP-dependent glyceraldehydephosphate dehydrogenase
  misc_feature (1)..(350): Homolog of NCBI NO: 22240 NR Description: GADPH (383 AA) [Zea mays]
  misc_feature (1)..(350): Homolog of NCBI NO: 120657 NR Description: Glyceraldehyde 3-phosphate dehydrogenase A, precursor (NADP-dependent glyceraldehydephosphate dehydrogenase
  misc_feature (1)..(350): Homolog of NCBI NO: 20729 NR Description: precursor (AA -68 to 337) [Pisum sativum]
  misc_feature (1)..(350): Homolog of NCBI NO: 20455487 NR Description: Glyceraldehyde 3-phosphate dehydrogenase A, precursor (NADP-dependent glyceraldehydephosphate dehydrogenase
  misc_feature (1)..(350): Homolog of NCBI NO: 22240 NR Description: GADPH (383 AA) [Zea mays]
  misc_feature (1)..(350): Homolog of NCBI NO: 20729 NR Description: precursor (AA -68 to 337) [Pisum sativum]
  misc_feature (1)..(350): Homolog of NCBI NO: 120657 NR Description: Glyceraldehyde 3-phosphate dehydrogenase A, precursor (NADP-dependent glyceraldehydephosphate dehydrogenase
  misc_feature (1)..(350): Homolog of NCBI NO: 22240 NR Description: GADPH (383 AA) [Zea mays]
  misc_feature (1)..(350): Homolog of NCBI NO: 120661 NR Description: Glyceraldehyde 3-phosphate dehydrogenase A, precursor (NADP-dependent glyceraldehydephosphate dehydrogenase
  misc_feature (1)..(350): Homolog of NCBI NO: 20455487 NR Description: Glyceraldehyde 3-phosphate dehydrogenase A, precursor (NADP-dependent glyceraldehydephosphate dehydrogenase
  misc_feature (1)..(350): Homolog of NCBI NO: 30688425 NR Description: glyceraldehyde 3-phosphate dehydrogenase A
  misc_feature (1)..(350): Homolog of NCBI NO: 2117520 NR Description: glyceraldehyde-3-phosphate dehydrogenase (NADP)
  misc_feature (1)..(350): Homolog of NCBI NO: 15222111 NR Description: calcium-binding protein, calreticulin -related
  misc_feature (1)..(350): Homolog of NCBI NO: 166702 NR Description: glyceraldehyde 3-phosphate dehydrogenase A
  misc_feature (1)..(350): Homolog of NCBI NO: 120658 NR Description: Glyceraldehyde 3-phosphate dehydrogenase A, precursor (NADP-dependent glyceraldehydephosphate dehydrogenase
  misc_feature (1)..(350): Homolog of NCBI NO: 30688425 NR Description: glyceraldehyde 3-phosphate dehydrogenase A
  misc_feature (1)..(350): Homolog of NCBI NO: 2117520 NR Description: glyceraldehyde-3-phosphate dehydrogenase (NADP)
  misc_feature (1)..(350): Homolog of NCBI NO: 15222111 NR Description: calcium-binding protein, calreticulin -related
  misc_feature (1)..(350): Homolog of NCBI NO: 166702 NR Description: glyceraldehyde 3-phosphate dehydrogenase A
  misc_feature (1)..(350): Homolog of NCBI NO: 120658 NR Description: Glyceraldehyde 3-phosphate dehydrogenase A, precursor (NADP-dependent glyceraldehydephosphate dehydrogenase
  misc_feature (1)..(350): Homolog of NCBI NO: 20729 NR Description: precursor (AA -68 to 337) [Pisum sativum]
  misc_feature (1)..(350): Homolog of NCBI NO: 120657 NR Description: Glyceraldehyde 3-phosphate dehydrogenase A, precursor (NADP-dependent glyceraldehydephosphate dehydrogenase
  misc_feature (1)..(350): Homolog of NCBI NO: 120661 NR Description: Glyceraldehyde 3-phosphate dehydrogenase A, precursor (NADP-dependent glyceraldehydephosphate dehydrogenase
  misc_feature (1)..(350): Homolog of NCBI NO: 120658 NR Description: Glyceraldehyde 3-phosphate dehydrogenase A, precursor (NADP-dependent glyceraldehydephosphate dehydrogenase
  misc_feature (1)..(350): Homolog of NCBI NO: 166702 NR Description: glyceraldehyde 3-phosphate dehydrogenase A
  misc_feature (1)..(350): Homolog of NCBI NO: 15222111 NR Description: calcium-binding protein, calreticulin -related
  misc_feature (1)..(350): Homolog of NCBI NO: 2117520 NR Description: glyceraldehyde-3-phosphate dehydrogenase (NADP)
  misc_feature (1)..(350): Homolog of NCBI NO: 30688425 NR Description: glyceraldehyde 3-phosphate dehydrogenase A

SEQ ID NO: 47262 - DNA, 2025 bp, Arabidopsis thaliana
  misc_feature (1)..(2025): Ceres Seq. ID no. 12601957
  misc_feature: MA Experiment ID: 108577 Result: Down-regulated in Transcription
  misc_feature: MA Experiment 108577 PARAMETER Experiment Name: At_42deg_Heat_cDNA_P Parameter: Temperature (deg C) Value: 42 vs. 22
  misc_feature: MA Experiment 108577 PARAMETER Experiment Name: At_42deg_Heat_cDNA_P Parameter: Timepoint (hr) Value: 6
  misc_feature: MA Experiment 108577 PARAMETER Experiment Name: At_42deg_Heat_cDNA_P Parameter: Tissue Value: Aerial
  misc_feature: MA Experiment ID: 20000069 Result: Up-regulated in Transcription
  misc_feature: MA Experiment 20000069 PARAMETER Experiment Name: At_100uM_ABA_Mutants_cDNA_P Parameter: Plant Line Value: CS23
  misc_feature: MA Experiment 20000069 PARAMETER Experiment Name: At_100uM_ABA_Mutants_cDNA_P Parameter: Timepoint (hr) Value: 6
  misc_feature: MA Experiment 20000069 PARAMETER Experiment Name: At_100uM_ABA_Mutants_cDNA_P Parameter: Tissue Value: Aerial
  misc_feature: MA Experiment 20000069 PARAMETER Experiment Name: At_100uM_ABA_Mutants_cDNA_P Parameter: Treatment Value: 100uM ABA vs. No Treatment
  misc_feature: MA Experiment ID: 20000087 Result: Up-regulated in Transcription
  misc_feature: MA Experiment 20000087 PARAMETER Experiment Name: At_100uM_ABA_Mutants_cDNA_P Parameter: Plant Line Value: WS
  misc_feature: MA Experiment 20000087 PARAMETER Experiment Name: At_100uM_ABA_Mutants_cDNA_P Parameter: Timepoint (hr) Value: 6
  misc_feature: MA Experiment 20000087 PARAMETER Experiment Name: At_100uM_ABA_Mutants_cDNA_P Parameter: Tissue Value: Aerial
  misc_feature: MA Experiment 20000087 PARAMETER Experiment Name: At_100uM_ABA_Mutants_cDNA_P Parameter: Treatment Value: 100uM ABA vs. No Treatment
  misc_feature: MA Experiment ID: 20000171 Result: Down-regulated in Transcription
  misc_feature: MA Experiment 20000171 PARAMETER Experiment Name: At_42deg_Heat_P Parameter: Age (day) Value: 14
  misc_feature: MA Experiment 20000171 PARAMETER Experiment Name: At_42deg_Heat_P Parameter: Organism Value: A. thaliana
  misc_feature: MA Experiment 20000171 PARAMETER Experiment Name: At_42deg_Heat_P Parameter: Plant Line Value: WS
  misc_feature: MA Experiment 20000171 PARAMETER Experiment Name: At_42deg_Heat_P Parameter: Temperature (deg C) Value: 42 vs. 22
  misc_feature: MA Experiment 20000171 PARAMETER Experiment Name: At_42deg_Heat_P Parameter: Timepoint (hr) Value: 1
  misc_feature: MA Experiment 20000171 PARAMETER Experiment Name: At_42deg_Heat_P Parameter: Tissue Value: Aerial
  misc_feature: MA Experiment ID: 20000173 Result: Down-regulated in Transcription
  misc_feature: MA Experiment 20000173 PARAMETER Experiment Name: At_42deg_Heat_P Parameter: Age (day) Value: 14
  misc_feature: MA Experiment 20000173 PARAMETER Experiment Name: At_42deg_Heat_P Parameter: Organism Value: A. thaliana
  misc_feature: MA Experiment 20000173 PARAMETER Experiment Name: At_42deg_Heat_P Parameter: Plant Line Value: WS
  misc_feature: MA Experiment 20000173 PARAMETER Experiment Name: At_42deg_Heat_P Parameter: Temperature (deg C) Value: 42 vs. 22
  misc_feature: MA Experiment 20000173 PARAMETER Experiment Name: At_42deg_Heat_P Parameter: Timepoint (hr) Value: 6
  misc_feature: MA Experiment 20000173 PARAMETER Experiment Name: At_42deg_Heat_P Parameter: Tissue Value: Aerial
  misc_feature: MA Experiment ID: 20000184 Result: Down-regulated in Transcription
  misc_feature: MA Experiment 20000184 PARAMETER Experiment Name: At_Shoots__P Parameter: Age (day) Value: 7
  misc_feature: MA Experiment 20000184 PARAMETER Experiment Name: At_Shoots__P Parameter: Tissue Value: Shoots vs. Whole Plant
  misc_feature: MA Experiment ID: 20000794 Result: Up-regulated in Transcription
  misc_feature: MA Experiment 20000794 PARAMETER Experiment Name: At_Petals_P Parameter: Age (day) Value: 23-25 days
  misc_feature: MA Experiment 20000794 PARAMETER Experiment Name: At_Petals_P Parameter: Plant Line Value: WS
  misc_feature: MA Experiment 20000794 PARAMETER Experiment Name: At_Petals_P Parameter: Tissue Value: Petals vs. Whole plant
  misc_feature: MA Experiment ID: 20001451 Result: Up-regulated in Transcription
  misc_feature: MA Experiment 20001451 PARAMETER Experiment Name: At_Far-red-induction_P Parameter: Age (day) Value: 7
  misc_feature: MA Experiment 20001451 PARAMETER Experiment Name: At_Far-red-induction_P Parameter: Light Value: Far-red vs. White
  misc_feature: MA Experiment 20001451 PARAMETER Experiment Name: At_Far-red-induction_P Parameter: Organism Value: A. thaliana
  misc_feature: MA Experiment 20001451 PARAMETER Experiment Name: At_Far-red-induction_P Parameter: Plant Line Value: Columbia
  misc_feature: MA Experiment 20001451 PARAMETER Experiment Name: At_Far-red-induction_P Parameter: Timepoint (hr) Value: 24
  misc_feature: MA Experiment 20001451 PARAMETER Experiment Name: At_Far-red-induction_P Parameter: Tissue Value: Whole Plant
cccttcccttttgggatattttcgccgcgtggattgatatgacgactctctttcgccggaagtcaatcggaatccgcgacaacttcttccttcaatccctttgatttttttttggctctacttatcccaaacccttcaaatcttcaggtccaatctcttcttctatttgttttttaattaaaaaaatccggcgaaaggtgaagctcttggattcgagtggtggctagtaatcgatttcggtagtttagaagtagtttataggttttatcagctttcgatttgatggagccgcgagtcggaaacaagtttcggctcggaaggaagatcggcggtggatcattcggagagatctatcttggtaccaatatccagacgaatgaagaagtggctattaaacttgaaaatgtgaaaactaagcatcctcagttgctgtatgaatcaaagttgtacaaagtattacaaggaggaactggcgttccaaacgttaaatggtatggtgttgaaggggactataatgtcctcgtgatagacttgttggggcctagccttgaagatctattcaatttctgtagtaggaaactctcactaaagactgtactaatgcttgcagatcaaatgatcaatcgcattgagtttgtacatcagaagtcatttctacatcgggacatcaagcctgacaactttctgatgggtcttggaaggcgtgcaaatcaggtatacgtcatcgactttggtctggcaaagaagtacagagactcaaatcatcagcatattccatatagggaaaacaaaaacttgactggaactgctagatacgctagcatgaacactcaccttggcattgaacaaagtcgtagagatgatttggagtcacttggattcgttctcatgtacttcttaaaaggaagtcttccttggcaaggactgaaagctggcaataagaagcaaaagtatgagaaaatcagtgaaaagaaagtatcgacatctattgaggctttatgccgaggttatccatctgaatttgcatcttatttccattattgccgttctctgagatttgacgacaagccagactatgcctacctgaaacggcttttccgcgacctgtttattcgtgaaggcttccagtttgattatgtatttgattggacgatcttgaagtatcagcaatcacagatttctactcctcctcctcgtcatcatggtcctgtagttgggccaagctctgccctcccccctgccattaccagtgctgagaggccatcaggtggcgacgaagctagaccttctggctggtcatcaggaatccctagacgaaattctggacaaatttttaactcaggaagcttagctaaacaaaaagcaccagtttcaagtgatcctgcaatatctaaagatgtagtgttatcaagctctagctttctccgcgcaactgggtcatcaagacgtgctgctgtatccagtagtcgcgaagctgcagttctgggaactgattctgagccatcaaaccctcaaatcgttgaagctggatcaggctccaattcaaagatccctgttagtcgaaactcacctatcgtctcatctgagatcaacaagctatcatcaccttcaagggcgactacttcagtcatgaagaactatgaggctaatcttaaagggatcgagagtctgcatttttagtcgttggggccagtgaatgatcttgaaaccccgggacaagtgtaaattaaaagacaaagatgacctctcttaggccctcctcatgttttacgtgcatttgtgtttacagggagggagacttgtgcctctaagcacacactctaataacatagataaggaaaagactctgaagaagtgattttcagagaaagacaaactcaaaagagggcgagactaaaaagtcaaaagacttttaacacttttattccccatttggttttacactgtttatgttgtgtttgtcttgtttggtactgcaacagctaaaatcgtttgtgcttcaaaaaggttttaagttcttagaac

SEQ ID NO: 47263 - protein, 465 aa, Arabidopsis thaliana
  peptide (1)..(465): Ceres Seq. ID no. 12601958
  misc_feature (1)..(452): Homolog of NCBI NO: 30678728 NR Description: protein kinase (ADK1) [Arabidopsis thaliana]
  misc_feature (1)..(405): Homolog of NCBI NO: 15224781 NR Description: putative casein kinase I
  misc_feature (1)..(385): Homolog of NCBI NO: 549973 NR Description: casein kinase I-like protein
  misc_feature (1)..(421): Homolog of NCBI NO: 22327902 NR Description: similar to Col-0 casein kinase I-like protein
  misc_feature (1)..(454): Homolog of NCBI NO: 15236114 NR Description: Col-0 casein kinase I-like protein
  misc_feature (1)..(166): Homolog of NCBI NO: 20161073 NR Description: putative casein kinase [Oryza sativa (japonica
  misc_feature (167)..(465): Homolog of NCBI NO: 20161073 NR Description: putative casein kinase [Oryza sativa (japonica
  misc_feature (1)..(465): Homolog of NCBI NO: 34910448 NR Description: putative casein kinase I [Oryza sativa (japonica
  misc_feature (40)..(465): Homolog of NCBI NO: 6635385 NR Description: casein kinase I-like protein [Brassica oleracea]
  misc_feature (1)..(465): Homolog of NCBI NO: 15218569 NR Description: putative casein kinase I
MEPRVGNKFRLGRKIGGGSFGEIYLGTNIQTNEEVAIKLENVKTKHPQLLYESKLYKVLQGGTGVPNVKWYGVEGDYNVLVIDLLGPSLEDLFNFCSRKLSLKTVLMLADQMINRIEFVHQKSFLHRDIKPDNFLMGLGRRANQVYVIDFGLAKKYRDSNHQHIPYRENKNLTGTARYASMNTHLGIEQSRRDDLESLGFVLMYFLKGSLPWQGLKAGNKKQKYEKISEKKVSTSIEALCRGYPSEFASYFHYCRSLRFDDKPDYAYLKRLFRDLFIREGFQFDYVFDWTILKYQQSQISTPPPRHHGPVVGPSSALPPAITSAERPSGGDEARPSGWSSGIPRRNSGQIFNSGSLAKQKAPVSSDPAISKDVVLSSSSFLRATGSSRRAAVSSSREAAVLGTDSEPSNPQIVEAGSGSNSKIPVSRNSPIVSSEINKLSSPSRATTSVMKNYEANLKGIESLHF

SEQ ID NO: 47264 - protein, 359 aa, Arabidopsis thaliana
  peptide (1)..(359): Ceres Seq. ID no. 12601959
  misc_feature (1)..(346): Homolog of NCBI NO: 30678728 NR Description: protein kinase (ADK1) [Arabidopsis thaliana]
  misc_feature (1)..(299): Homolog of NCBI NO: 15224781 NR Description: putative casein kinase I
  misc_feature (1)..(279): Homolog of NCBI NO: 549973 NR Description: casein kinase I-like protein
  misc_feature (1)..(315): Homolog of NCBI NO: 22327902 NR Description: similar to Col-0 casein kinase I-like protein
  misc_feature (1)..(348): Homolog of NCBI NO: 15236114 NR Description: Col-0 casein kinase I-like protein
  misc_feature (1)..(60): Homolog of NCBI NO: 20161073 NR Description: putative casein kinase [Oryza sativa (japonica
  misc_feature (61)..(359): Homolog of NCBI NO: 20161073 NR Description: putative casein kinase [Oryza sativa (japonica
  misc_feature (1)..(359): Homolog of NCBI NO: 34910448 NR Description: putative casein kinase I [Oryza sativa (japonica
  misc_feature (1)..(359): Homolog of NCBI NO: 6635385 NR Description: casein kinase I-like protein [Brassica oleracea]
  misc_feature (1)..(359): Homolog of NCBI NO: 15218569 NR Description: putative casein kinase I
MLADQMINRIEFVHQKSFLHRDIKPDNFLMGLGRRANQVYVIDFGLAKKYRDSNHQHIPYRENKNLTGTARYASMNTHLGIEQSRRDDLESLGFVLMYFLKGSLPWQGLKAGNKKQKYEKISEKKVSTSIEALCRGYPSEFASYFHYCRSLRFDDKPDYAYLKRLFRDLFIREGFQFDYVFDWTILKYQQSQISTPPPRHHGPVVGPSSALPPAITSAERPSGGDEARPSGWSSGIPRRNSGQIFNSGSLAKQKAPVSSDPAISKDVVLSSSSFLRATGSSRRAAVSSSREAAVLGTDSEPSNPQIVEAGSGSNSKIPVSRNSPIVSSEINKLSSPSRATTSVMKNYEANLKGIESLHF

SEQ ID NO: 47265 - protein, 354 aa, Arabidopsis thaliana
  peptide (1)..(354): Ceres Seq. ID no. 12601960
  misc_feature (1)..(341): Homolog of NCBI NO: 30678728 NR Description: protein kinase (ADK1) [Arabidopsis thaliana]
  misc_feature (1)..(294): Homolog of NCBI NO: 15224781 NR Description: putative casein kinase I
  misc_feature (1)..(274): Homolog of NCBI NO: 549973 NR Description: casein kinase I-like protein
  misc_feature (1)..(310): Homolog of NCBI NO: 22327902 NR Description: similar to Col-0 casein kinase I-like protein
  misc_feature (1)..(343): Homolog of NCBI NO: 15236114 NR Description: Col-0 casein kinase I-like protein
  misc_feature (1)..(55): Homolog of NCBI NO: 20161073 NR Description: putative casein kinase [Oryza sativa (japonica
  misc_feature (56)..(354): Homolog of NCBI NO: 20161073 NR Description: putative casein kinase [Oryza sativa (japonica
  misc_feature (1)..(354): Homolog of NCBI NO: 34910448 NR Description: putative casein kinase I [Oryza sativa (japonica
  misc_feature (1)..(354): Homolog of NCBI NO: 6635385 NR Description: casein kinase I-like protein [Brassica oleracea]
  misc_feature (1)..(354): Homolog of NCBI NO: 15218569 NR Description: putative casein kinase I
MINRIEFVHQKSFLHRDIKPDNFLMGLGRRANQVYVIDFGLAKKYRDSNHQHIPYRENKNLTGTARYASMNTHLGIEQSRRDDLESLGFVLMYFLKGSLPWQGLKAGNKKQKYEKISEKKVSTSIEALCRGYPSEFASYFHYCRSLRFDDKPDYAYLKRLFRDLFIREGFQFDYVFDWTILKYQQSQISTPPPRHHGPVVGPSSALPPAITSAERPSGGDEARPSGWSSGIPRRNSGQIFNSGSLAKQKAPVSSDPAISKDVVLSSSSFLRATGSSRRAAVSSSREAAVLGTDSEPSNPQIVEAGSGSNSKIPVSRNSPIVSSEINKLSSPSRATTSVMKNYEANLKGIESLHF

SEQ ID NO: 47266 - DNA, 1568 bp, Arabidopsis thaliana
  misc_feature (1)..(1568): Ceres Seq. ID no. 12591434
  misc_feature: MA Experiment ID: 20000227 Result: Down-regulated in Transcription
  misc_feature: MA Experiment 20000227 PARAMETER Experiment Name: At_Root-Tips-vs-Tops_P Parameter: Tissue Value: Root Tips vs. Root Tops
  misc_feature: MA Experiment ID: 20000451 Result: Down-regulated in Transcription
  misc_feature: MA Experiment 20000451 PARAMETER Experiment Name: At_CS6879_Shoots-Roots_P Parameter: Age (day) Value: 14
  misc_feature: MA Experiment 20000451 PARAMETER Experiment Name: At_CS6879_Shoots-Roots_P Parameter: Organism Value: A. thaliana
  misc_feature: MA Experiment 20000451 PARAMETER Experiment Name: At_CS6879_Shoots-Roots_P Parameter: Plant Line Value: CS6879 vs. WS
  misc_feature: MA Experiment 20000451 PARAMETER Experiment Name: At_CS6879_Shoots-Roots_P Parameter: Tissue Value: Roots
ctcgttgctgatgtgtcgctctgcttgagagagtcagagagtcaagagagaaaaggggtcgagaatggcggtcgcaatatctgggagtagtttgatatcgtcgactcttcagcattataataatcggatttatatccgagattatccgattccgtgtcactcttctaatccaatttgcaattcttttaatttcaaaagacgttcgttctctccttcttcccccaaatttaacgaccatgtcgttaacccttcctcttcttatttatcctccaagctttctccaattcgaacccattcctctttcgctgcgtgtggctgctcctggattcaagacaattcaatggttcatgattatgctacaacaactaatgggacgtccaagcgttgctcggcgttaccaacaacaaacacagtggatgtctcttcggtgtcagatctttttgaattcatatgctcgggtcctctcgtaaacaagattggtatcactcctcaaagagttggccagtctattgacaaatggttactctacggctcacaactttgtagactgtttcagcttaatgagcttaagcttacaattcctcagaaagctaggctataccactactacatacccgtttttatttggtgcgaagatcagattgctttgcataattccaagtttaaagatggagatgatgtacctcctttagtgattggatttagcgctcctcaaggatgtggcaagactacacttgtgtttgcacttgattatcttttcaagacaacaaaaaagaagtcagcgacgatatccgtagacgatttttacttgactgcagaaggccaggctgaattgagaaaaaagaatccaggaaatgcacttctagagtatcgtggaaatgcaggaagtcatgatctgaaactttctgttgaaacactagaagccctgtcgaaactgaccaaagaaggcttaaagatgaaggtacctaggtacaataagtctgcctgtagtgggagaggtgacagagccgattcatcaacatggcctgaagttgaaggacctctatcggttattctctttgagggatggatgcttggttttaagcctcttccagctgacgttgttaaagcagttgacccacagctggaggttgtgaataagaaccttgaagcgtattacgacgcatgggacaagtacatcgatgcttgggtcgtcatcaaaatccaggacccaagttatgtataccggtggcgtcttcaggcggaaatcgccatgaggcaggatggccaagctgggatgtcggatgaggaggtgaatgactttgtgtcgcggtatttgccggcgtataaggcctatcttccaactctttacgcggaagggccaagcggctcagacccagaccgtgtccttgcgatagatatcgatgaagaaaggaacccgatactcgcaaactaatgcgatgctgtctccattgcctttatagtatatcatcattgtatgtaaaagagagtaacattacgttcttcttccttctatttgacattctttttcctacactatactttcacataaatacatattcttttct

SEQ ID NO: 47267 - protein, 456 aa, Arabidopsis thaliana
  peptide (1)..(456): Ceres Seq. ID no. 12591435
  misc_feature (210)..(443): Pfam Name: Phosphoribulokinase / Uridine kinase family Pfam Description: Phosphoribulokinase / Uridine kinase family
  misc_feature (210)..(443): Pfam Name: Phosphoribulokinase / Uridine kinase family Pfam Description: Phosphoribulokinase / Uridine kinase family
  misc_feature (353)..(453): Homolog of NCBI NO: 34911206 NR Description: P0019E03.19 [Oryza sativa (japonica
  misc_feature (59)..(329): Homolog of NCBI NO: 34911206 NR Description: P0019E03.19 [Oryza sativa (japonica
  misc_feature (93)..(242): Homolog of NCBI NO: 25406658 NR Description: unknown protein F5I6.13 [imported] - Arabidopsis
  misc_feature (237)..(456): Homolog of NCBI NO: 25406658 NR Description: unknown protein F5I6.13 [imported] - Arabidopsis
  misc_feature (300)..(456): Homolog of NCBI NO: 21537005 NR Description: unknown [Arabidopsis thaliana]
  misc_feature (353)..(453): Homolog of NCBI NO: 34911206 NR Description: P0019E03.19 [Oryza sativa (japonica
  misc_feature (93)..(242): Homolog of NCBI NO: 25406658 NR Description: unknown protein F5I6.13 [imported] - Arabidopsis
  misc_feature (300)..(456): Homolog of NCBI NO: 21537005 NR Description: unknown [Arabidopsis thaliana]
  misc_feature (1)..(456): Homolog of NCBI NO: 30699506 NR Description: auxin-regulated protein [Arabidopsis thaliana]
  misc_feature (1)..(456): Homolog of NCBI NO: 16226442 NR Description: At1g80380/F5I6_13 [Arabidopsis thaliana]
  misc_feature (1)..(207): Homolog of NCBI NO: 18412831 NR Description: auxin-regulated protein
  misc_feature (300)..(456): Homolog of NCBI NO: 18412831 NR Description: auxin-regulated protein
  misc_feature (1)..(207): Homolog of NCBI NO: 21537005 NR Description: unknown [Arabidopsis thaliana]
  misc_feature (237)..(456): Homolog of NCBI NO: 25406658 NR Description: unknown protein F5I6.13 [imported] - Arabidopsis
  misc_feature (59)..(329): Homolog of NCBI NO: 34911206 NR Description: P0019E03.19 [Oryza sativa (japonica
  misc_feature (1)..(207): Homolog of NCBI NO: 21537005 NR Description: unknown [Arabidopsis thaliana]
  misc_feature (300)..(456): Homolog of NCBI NO: 18412831 NR Description: auxin-regulated protein
  misc_feature (1)..(207): Homolog of NCBI NO: 18412831 NR Description: auxin-regulated protein
  misc_feature (1)..(456): Homolog of NCBI NO: 16226442 NR Description: At1g80380/F5I6_13 [Arabidopsis thaliana]
  misc_feature (1)..(456): Homolog of NCBI NO: 30699506 NR Description: auxin-regulated protein [Arabidopsis thaliana]
MAVAISGSSLISSTLQHYNNRIYIRDYPIPCHSSNPICNSFNFKRRSFSPSSPKFNDHVVNPSSSYLSSKLSPIRTHSSFAACGCSWIQDNSMVHDYATTTNGTSKRCSALPTTNTVDVSSVSDLFEFICSGPLVNKIGITPQRVGQSIDKWLLYGSQLCRLFQLNELKLTIPQKARLYHYYIPVFIWCEDQIALHNSKFKDGDDVPPLVIGFSAPQGCGKTTLVFALDYLFKTTKKKSATISVDDFYLTAEGQAELRKKNPGNALLEYRGNAGSHDLKLSVETLEALSKLTKEGLKMKVPRYNKSACSGRGDRADSSTWPEVEGPLSVILFEGWMLGFKPLPADVVKAVDPQLEVVNKNLEAYYDAWDKYIDAWVVIKIQDPSYVYRWRLQAEIAMRQDGQAGMSDEEVNDFVSRYLPAYKAYLPTLYAEGPSGSDPDRVLAIDIDEERNPILAN

SEQ ID NO: 47268 - protein, 364 aa, Arabidopsis thaliana
  peptide (1)..(364): Ceres Seq. ID no. 12591436
  misc_feature (118)..(351): Pfam Name: Phosphoribulokinase / Uridine kinase family Pfam Description: Phosphoribulokinase / Uridine kinase family
  misc_feature (118)..(351): Pfam Name: Phosphoribulokinase / Uridine kinase family Pfam Description: Phosphoribulokinase / Uridine kinase family
  misc_feature (261)..(361): Homolog of NCBI NO: 34911206 NR Description: P0019E03.19 [Oryza sativa (japonica
  misc_feature (1)..(237): Homolog of NCBI NO: 34911206 NR Description: P0019E03.19 [Oryza sativa (japonica
  misc_feature (1)..(150): Homolog of NCBI NO: 25406658 NR Description: unknown protein F5I6.13 [imported] - Arabidopsis
  misc_feature (145)..(364): Homolog of NCBI NO: 25406658 NR Description: unknown protein F5I6.13 [imported] - Arabidopsis
  misc_feature (208)..(364): Homolog of NCBI NO: 21537005 NR Description: unknown [Arabidopsis thaliana]
  misc_feature (261)..(361): Homolog of NCBI NO: 34911206 NR Description: P0019E03.19 [Oryza sativa (japonica
  misc_feature (1)..(150): Homolog of NCBI NO: 25406658 NR Description: unknown protein F5I6.13 [imported] - Arabidopsis
  misc_feature (208)..(364): Homolog of NCBI NO: 21537005 NR Description: unknown [Arabidopsis thaliana]
  misc_feature (1)..(364): Homolog of NCBI NO: 30699506 NR Description: auxin-regulated protein [Arabidopsis thaliana]
  misc_feature (1)..(364): Homolog of NCBI NO: 16226442 NR Description: At1g80380/F5I6_13 [Arabidopsis thaliana]
  misc_feature (1)..(115): Homolog of NCBI NO: 18412831 NR Description: auxin-regulated protein
  misc_feature (208)..(364): Homolog of NCBI NO: 18412831 NR Description: auxin-regulated protein
  misc_feature (1)..(115): Homolog of NCBI NO: 21537005 NR Description: unknown [Arabidopsis thaliana]
  misc_feature (145)..(364): Homolog of NCBI NO: 25406658 NR Description: unknown protein F5I6.13 [imported] - Arabidopsis
  misc_feature (1)..(237): Homolog of NCBI NO: 34911206 NR Description: P0019E03.19 [Oryza sativa (japonica
  misc_feature (1)..(115): Homolog of NCBI NO: 21537005 NR Description: unknown [Arabidopsis thaliana]
  misc_feature (208)..(364): Homolog of NCBI NO: 18412831 NR Description: auxin-regulated protein
  misc_feature (1)..(115): Homolog of NCBI NO: 18412831 NR Description: auxin-regulated protein
  misc_feature (1)..(364): Homolog of NCBI NO: 16226442 NR Description: At1g80380/F5I6_13 [Arabidopsis thaliana]
  misc_feature (1)..(364): Homolog of NCBI NO: 30699506 NR Description: auxin-regulated protein [Arabidopsis thaliana]
MVHDYATTTNGTSKRCSALPTTNTVDVSSVSDLFEFICSGPLVNKIGITPQRVGQSIDKWLLYGSQLCRLFQLNELKLTIPQKARLYHYYIPVFIWCEDQIALHNSKFKDGDDVPPLVIGFSAPQGCGKTTLVFALDYLFKTTKKKSATISVDDFYLTAEGQAELRKKNPGNALLEYRGNAGSHDLKLSVETLEALSKLTKEGLKMKVPRYNKSACSGRGDRADSSTWPEVEGPLSVILFEGWMLGFKPLPADVVKAVDPQLEVVNKNLEAYYDAWDKYIDAWVVIKIQDPSYVYRWRLQAEIAMRQDGQAGMSDEEVNDFVSRYLPAYKAYLPTLYAEGPSGSDPDRVLAIDIDEERNPILAN

SEQ ID NO: 47269 - DNA, 2435 bp, Arabidopsis thaliana
  misc_feature (1)..(2435): Ceres Seq. ID no. 12591646
  misc_feature: MA Experiment ID: 20000184 Result: Down-regulated in Transcription
  misc_feature: MA Experiment 20000184 PARAMETER Experiment Name: At_Shoots__P Parameter: Age (day) Value: 7
  misc_feature: MA Experiment 20000184 PARAMETER Experiment Name: At_Shoots__P Parameter: Tissue Value: Shoots vs. Whole Plant
  misc_feature: MA Experiment ID: 20001450 Result: Up-regulated in Transcription
  misc_feature: MA Experiment 20001450 PARAMETER Experiment Name: At_Far-red-induction_P Parameter: Age (day) Value: 7
  misc_feature: MA Experiment 20001450 PARAMETER Experiment Name: At_Far-red-induction_P Parameter: Light Value: Far-red vs. White
  misc_feature: MA Experiment 20001450 PARAMETER Experiment Name: At_Far-red-induction_P Parameter: Organism Value: A. thaliana
  misc_feature: MA Experiment 20001450 PARAMETER Experiment Name: At_Far-red-induction_P Parameter: Plant Line Value: Columbia
  misc_feature: MA Experiment 20001450 PARAMETER Experiment Name: At_Far-red-induction_P Parameter: Timepoint (hr) Value: 8
  misc_feature: MA Experiment 20001450 PARAMETER Experiment Name: At_Far-red-induction_P Parameter: Tissue Value: Whole Plant
  misc_feature: MA Experiment ID: 20001451 Result: Up-regulated in Transcription
  misc_feature: MA Experiment 20001451 PARAMETER Experiment Name: At_Far-red-induction_P Parameter: Age (day) Value: 7
  misc_feature: MA Experiment 20001451 PARAMETER Experiment Name: At_Far-red-induction_P Parameter: Light Value: Far-red vs. White
  misc_feature: MA Experiment 20001451 PARAMETER Experiment Name: At_Far-red-induction_P Parameter: Organism Value: A. thaliana
  misc_feature: MA Experiment 20001451 PARAMETER Experiment Name: At_Far-red-induction_P Parameter: Plant Line Value: Columbia
  misc_feature: MA Experiment 20001451 PARAMETER Experiment Name: At_Far-red-induction_P Parameter: Timepoint (hr) Value: 24
  misc_feature: MA Experiment 20001451 PARAMETER Experiment Name: At_Far-red-induction_P Parameter: Tissue Value: Whole Plant
gtcgctcctttttgttggtctgtttccacttcagttcttctccctccggaaaagctacaaccccaatctaaaaccctaacggccatttctaccatcggagctccgaaaatgccgggtatgtcttcggaatctggcggtggagaattggttctgttttcgaccaaggaaaaaactccggtgttgtatcctctaagctatggcctcaagtctccggttcacaggctctccatctcctggggttgcggaaacaacctacgcgtcacggttttaaggaatccagagttacgcgatgatgacgacggagaagttggtggtaaggtcgtaaacgttaggcttagcggcgaggatggcgaaatcagtgacccacagtggcgaaggatcgcttatggatcggtatctccgttcgcgcttttgcagagcagaagaaactcaatttccagtttgtctaagatggatatgagttcctctctgtatcagactgcgtggtgggagtacgtaatggaatacagcagagatattaaatctctccttagtaatacaatatctttgcccgctcctttgattgaagacccgagatcagttataaagaatgctgaggaaccaacttctttaaaggctgcgtgggagttgatggaattattttatgcagataagacatgtctgtcttggttgccagaacggctcgttgattggttatctgaatacgatatactcctttctagctcacatccaacaatctactcaaagctccaggatttccaaaaggaacttgttggcctgcaggccatcgaggatgatccaagatactgggaagtgatggcttctgctttatcagttggttggctagaaatagtggtgaagttgttacacctacatggttcttatcaactagaccagctgggacatcgtgagacagaaaatggtttggtagaagcggttgctgttctcatttcaaaaatgccacgaatgcggccacaactagaagatgggaaatttggtgaatgctctgcagcaaagcctgactttatgaagacacgagaaagatggcagtctcagataactaaactagagtgcagtgccttctgggttcaatgtgctcaccatcagacccgtgagggcttgagaaatatgttgaagatcatgataggaaatgctgattgcctcagagctgcgacatgtaactggatggagctttttgtttcacatcttctttatctcaggccatttacgaagggattagatggcatgcatagcctagcccagaagtgtgttcagtcaaagccagttaacacttcccataagcttctaagactgcttattggaattcttggagaaaatactgaggttgttctggcagagtgttccaaagaatttggctcctggatggttgcacatgccatggaattattgacagctggaagcgaagaaggagaagttcttgtacatgaggaacagcgtaagttgggtggaattaacatggaagagctccatagacttgtttatgctcaagttctttcttctcatgctttgacttggcagatagctcctatttatctagcatcgtgcgagaaacagggattaggcttattagagctgttgttctacaggcagcctgttcaagagaatcagatgcttattaagagcctagagatttgccgtctctatgaactcagtaatgtcagtgctaaactaatgaagatttctggagtgcatcattggaaacatgggaggaaaggctcagggattttctggctccagcaagctcgggacgaaaattgtctcagcgtgattgctcaacagctgtttgattctgttggaaaatcattgtctgatgaaagtctcaagcaatgggaaggcctagtcgagttgctgggttcggaatcacagatctctggtggtctcgattttcttcacaagtatagagatttcaagagatcgctgaaggtagtccatgatggaaaaactatagatgcagctcatgaagccgtagagagacttgtatcgctaatgaagagcccttctactcctcaacgcttctggcttcctcttctgcatgattcattgaagctgttgaattggcccgaacgttcgctgttgaatgtaacacagaccaacctgatgttgaacaaattacaagagctatcaatagcaaggttaagaccaggcttcatagaatctgagttgtctgctcaagctgtgggttcagtgagacttgctctagcaacaaatctcggacgtgcttttctcgaagaatgttagcgcgggttgaggctaataaatccatagctcgatatctatttgtgtgtatgggtttcgtactacatttagtctgtatttttccatatcaaaatagactgatagcactccagtttccatctttcactagtttgtaagctgattgcaaaagtaaagcagaaaagagaggtgttctgact

SEQ ID NO: 47270 - protein, 752 aa, Arabidopsis thaliana
  peptide (1)..(752): Ceres Seq. ID no. 12591647
  misc_feature (374)..(712): Homolog of NCBI NO: 31239561 NR Description: ENSANGP00000008989 [Anopheles gambiae]
  misc_feature (374)..(751): Homolog of NCBI NO: 34875101 NR Description: similar to pericentrin 1; frount; nucleoporin
  misc_feature (374)..(751): Homolog of NCBI NO: 12856972 NR Description: unnamed protein product [Mus musculus]
  misc_feature (374)..(751): Homolog of NCBI NO: 20271148 NR Description: frount protein [Mus musculus]
  misc_feature (357)..(751): Homolog of NCBI NO: 21739412 NR Description: hypothetical protein [Homo sapiens]
  misc_feature (357)..(751): Homolog of NCBI NO: 13376259 NR Description: pericentrin 1; frount; nucleoporin Nup75 [Homo
  misc_feature (357)..(751): Homolog of NCBI NO: 10434102 NR Description: unnamed protein product [Homo sapiens]
  misc_feature (59)..(751): Homolog of NCBI NO: 34909454 NR Description: OSJNBa0014K08.23 [Oryza sativa (japonica
  misc_feature (40)..(305): Homolog of NCBI NO: 7452449 NR Description: hypothetical protein F26P21.30 - Arabidopsis
  misc_feature (344)..(669): Homolog of NCBI NO: 7452449 NR Description: hypothetical protein F26P21.30 - Arabidopsis
VAPFCWSVSTSVLLPPEKLQPQSKTLTAISTIGAPKMPGMSSESGGGELVLFSTKEKTPVLYPLSYGLKSPVHRLSISWGCGNNLRVTVLRNPELRDDDDGEVGGKVVNVRLSGEDGEISDPQWRRIAYGSVSPFALLQSRRNSISSLSKMDMSSSLYQTAWWEYVMEYSRDIKSLLSNTISLPAPLIEDPRSVIKNAEEPTSLKAAWELMELFYADKTCLSWLPERLVDWLSEYDILLSSSHPTIYSKLQDFQKELVGLQAIEDDPRYWEVMASALSVGWLEIVVKLLHLHGSYQLDQLGHRETENGLVEAVAVLISKMPRMRPQLEDGKFGECSAAKPDFMKTRERWQSQITKLECSAFWVQCAHHQTREGLRNMLKIMIGNADCLRAATCNWMELFVSHLLYLRPFTKGLDGMHSLAQKCVQSKPVNTSHKLLRLLIGILGENTEVVLAECSKEFGSWMVAHAMELLTAGSEEGEVLVHEEQRKLGGINMEELHRLVYAQVLSSHALTWQIAPIYLASCEKQGLGLLELLFYRQPVQENQMLIKSLEICRLYELSNVSAKLMKISGVHHWKHGRKGSGIFWLQQARDENCLSVIAQQLFDSVGKSLSDESLKQWEGLVELLGSESQISGGLDFLHKYRDFKRSLKVVHDGKTIDAAHEAVERLVSLMKSPSTPQRFWLPLLHDSLKLLNWPERSLLNVTQTNLMLNKLQELSIARLRPGFIESELSAQAVGSVRLALATNLGRAFLEEC

SEQ ID NO: 47271 - protein, 716 aa, Arabidopsis thaliana
  peptide (1)..(716): Ceres Seq. ID no. 12591648
  misc_feature (338)..(676): Homolog of NCBI NO: 31239561 NR Description: ENSANGP00000008989 [Anopheles gambiae]
  misc_feature (338)..(715): Homolog of NCBI NO: 34875101 NR Description: similar to pericentrin 1; frount; nucleoporin
  misc_feature (338)..(715): Homolog of NCBI NO: 12856972 NR Description: unnamed protein product [Mus musculus]
  misc_feature (338)..(715): Homolog of NCBI NO: 20271148 NR Description: frount protein [Mus musculus]
  misc_feature (321)..(715): Homolog of NCBI NO: 21739412 NR Description: hypothetical protein [Homo sapiens]
  misc_feature (321)..(715): Homolog of NCBI NO: 13376259 NR Description: pericentrin 1; frount; nucleoporin Nup75 [Homo
  misc_feature (321)..(715): Homolog of NCBI NO: 10434102 NR Description: unnamed protein product [Homo sapiens]
  misc_feature (23)..(715): Homolog of NCBI NO: 34909454 NR Description: OSJNBa0014K08.23 [Oryza sativa (japonica
  misc_feature (4)..(269): Homolog of NCBI NO: 7452449 NR Description: hypothetical protein F26P21.30 - Arabidopsis
  misc_feature (308)..(633): Homolog of NCBI NO: 7452449 NR Description: hypothetical protein F26P21.30 - Arabidopsis
MPGMSSESGGGELVLFSTKEKTPVLYPLSYGLKSPVHRLSISWGCGNNLRVTVLRNPELRDDDDGEVGGKVVNVRLSGEDGEISDPQWRRIAYGSVSPFALLQSRRNSISSLSKMDMSSSLYQTAWWEYVMEYSRDIKSLLSNTISLPAPLIEDPRSVIKNAEEPTSLKAAWELMELFYADKTCLSWLPERLVDWLSEYDILLSSSHPTIYSKLQDFQKELVGLQAIEDDPRYWEVMASALSVGWLEIVVKLLHLHGSYQLDQLGHRETENGLVEAVAVLISKMPRMRPQLEDGKFGECSAAKPDFMKTRERWQSQITKLECSAFWVQCAHHQTREGLRNMLKIMIGNADCLRAATCNWMELFVSHLLYLRPFTKGLDGMHSLAQKCVQSKPVNTSHKLLRLLIGILGENTEVVLAECSKEFGSWMVAHAMELLTAGSEEGEVLVHEEQRKLGGINMEELHRLVYAQVLSSHALTWQIAPIYLASCEKQGLGLLELLFYRQPVQENQMLIKSLEICRLYELSNVSAKLMKISGVHHWKHGRKGSGIFWLQQARDENCLSVIAQQLFDSVGKSLSDESLKQWEGLVELLGSESQISGGLDFLHKYRDFKRSLKVVHDGKTIDAAHEAVERLVSLMKSPSTPQRFWLPLLHDSLKLLNWPERSLLNVTQTNLMLNKLQELSIARLRPGFIESELSAQAVGSVRLALATNLGRAFLEEC

SEQ ID NO: 47272 - protein, 713 aa, Arabidopsis thaliana
  peptide (1)..(713): Ceres Seq. ID no. 12591649
  misc_feature (335)..(673): Homolog of NCBI NO: 31239561 NR Description: ENSANGP00000008989 [Anopheles gambiae]
  misc_feature (335)..(712): Homolog of NCBI NO: 34875101 NR Description: similar to pericentrin 1; frount; nucleoporin
  misc_feature (335)..(712): Homolog of NCBI NO: 12856972 NR Description: unnamed protein product [Mus musculus]
  misc_feature (335)..(712): Homolog of NCBI NO: 20271148 NR Description: frount protein [Mus musculus]
  misc_feature (318)..(712): Homolog of NCBI NO: 21739412 NR Description: hypothetical protein [Homo sapiens]
  misc_feature (318)..(712): Homolog of NCBI NO: 13376259 NR Description: pericentrin 1; frount; nucleoporin Nup75 [Homo
  misc_feature (318)..(712): Homolog of NCBI NO: 10434102 NR Description: unnamed protein product [Homo sapiens]
  misc_feature (20)..(712): Homolog of NCBI NO: 34909454 NR Description: OSJNBa0014K08.23 [Oryza sativa (japonica
  misc_feature (1)..(266): Homolog of NCBI NO: 7452449 NR Description: hypothetical protein F26P21.30 - Arabidopsis
  misc_feature (305)..(630): Homolog of NCBI NO: 7452449 NR Description: hypothetical protein F26P21.30 - Arabidopsis
MSSESGGGELVLFSTKEKTPVLYPLSYGLKSPVHRLSISWGCGNNLRVTVLRNPELRDDDDGEVGGKVVNVRLSGEDGEISDPQWRRIAYGSVSPFALLQSRRNSISSLSKMDMSSSLYQTAWWEYVMEYSRDIKSLLSNTISLPAPLIEDPRSVIKNAEEPTSLKAAWELMELFYADKTCLSWLPERLVDWLSEYDILLSSSHPTIYSKLQDFQKELVGLQAIEDDPRYWEVMASALSVGWLEIVVKLLHLHGSYQLDQLGHRETENGLVEAVAVLISKMPRMRPQLEDGKFGECSAAKPDFMKTRERWQSQITKLECSAFWVQCAHHQTREGLRNMLKIMIGNADCLRAATCNWMELFVSHLLYLRPFTKGLDGMHSLAQKCVQSKPVNTSHKLLRLLIGILGENTEVVLAECSKEFGSWMVAHAMELLTAGSEEGEVLVHEEQRKLGGINMEELHRLVYAQVLSSHALTWQIAPIYLASCEKQGLGLLELLFYRQPVQENQMLIKSLEICRLYELSNVSAKLMKISGVHHWKHGRKGSGIFWLQQARDENCLSVIAQQLFDSVGKSLSDESLKQWEGLVELLGSESQISGGLDFLHKYRDFKRSLKVVHDGKTIDAAHEAVERLVSLMKSPSTPQRFWLPLLHDSLKLLNWPERSLLNVTQTNLMLNKLQELSIARLRPGFIESELSAQAVGSVRLALATNLGRAFLEEC

SEQ ID NO: 47273 - DNA, 894 bp, Arabidopsis thaliana
  misc_feature (1)..(894): Ceres Seq. ID no. 13588533
  misc_feature: MA Experiment ID: 20000171 Result: Down-regulated in Transcription
  misc_feature: MA Experiment 20000171 PARAMETER Experiment Name: At_42deg_Heat_P Parameter: Age (day) Value: 14
  misc_feature: MA Experiment 20000171 PARAMETER Experiment Name: At_42deg_Heat_P Parameter: Organism Value: A. thaliana
  misc_feature: MA Experiment 20000171 PARAMETER Experiment Name: At_42deg_Heat_P Parameter: Plant Line Value: WS
  misc_feature: MA Experiment 20000171 PARAMETER Experiment Name: At_42deg_Heat_P Parameter: Temperature (deg C) Value: 42 vs. 22
  misc_feature: MA Experiment 20000171 PARAMETER Experiment Name: At_42deg_Heat_P Parameter: Timepoint (hr) Value: 1
  misc_feature: MA Experiment 20000171 PARAMETER Experiment Name: At_42deg_Heat_P Parameter: Tissue Value: Aerial
  misc_feature: MA Experiment ID: 20000173 Result: Down-regulated in Transcription
  misc_feature: MA Experiment 20000173 PARAMETER Experiment Name: At_42deg_Heat_P Parameter: Age (day) Value: 14
  misc_feature: MA Experiment 20000173 PARAMETER Experiment Name: At_42deg_Heat_P Parameter: Organism Value: A. thaliana
  misc_feature: MA Experiment 20000173 PARAMETER Experiment Name: At_42deg_Heat_P Parameter: Plant Line Value: WS
  misc_feature: MA Experiment 20000173 PARAMETER Experiment Name: At_42deg_Heat_P Parameter: Temperature (deg C) Value: 42 vs. 22
  misc_feature: MA Experiment 20000173 PARAMETER Experiment Name: At_42deg_Heat_P Parameter: Timepoint (hr) Value: 6
  misc_feature: MA Experiment 20000173 PARAMETER Experiment Name: At_42deg_Heat_P Parameter: Tissue Value: Aerial
  misc_feature: MA Experiment ID: 20000182 Result: Up-regulated in Transcription
  misc_feature: MA Experiment 20000182 PARAMETER Experiment Name: At_2mM_SA_P Parameter: Age (day) Value: 14
  misc_feature: MA Experiment 20000182 PARAMETER Experiment Name: At_2mM_SA_P Parameter: Organism Value: A. thaliana
  misc_feature: MA Experiment 20000182 PARAMETER Experiment Name: At_2mM_SA_P Parameter: Plant Line Value: WS
  misc_feature: MA Experiment 20000182 PARAMETER Experiment Name: At_2mM_SA_P Parameter: Timepoint (hr) Value: 6
  misc_feature: MA Experiment 20000182 PARAMETER Experiment Name: At_2mM_SA_P Parameter: Tissue Value: Aerial
  misc_feature: MA Experiment 20000182 PARAMETER Experiment Name: At_2mM_SA_P Parameter: Treatment Value: 2mM SA vs. No Treatment
  misc_feature: MA Experiment ID: 20000184 Result: Down-regulated in Transcription
  misc_feature: MA Experiment 20000184 PARAMETER Experiment Name: At_Shoots__P Parameter: Age (day) Value: 7
  misc_feature: MA Experiment 20000184 PARAMETER Experiment Name: At_Shoots__P Parameter: Tissue Value: Shoots vs. Whole Plant
  misc_feature: MA Experiment ID: 20000185 Result: Down-regulated in Transcription
  misc_feature: MA Experiment 20000185 PARAMETER Experiment Name: At_Roots__P Parameter: Age (day) Value: 7 vs. 21
  misc_feature: MA Experiment 20000185 PARAMETER Experiment Name: At_Roots__P Parameter: Organism Value: A. thaliana
  misc_feature: MA Experiment 20000185 PARAMETER Experiment Name: At_Roots__P Parameter: Tissue Value: Roots vs. Whole Plant
  misc_feature: MA Experiment ID: 20000234 Result: Down-regulated in Transcription
  misc_feature: MA Experiment 20000234 PARAMETER Experiment Name: At_Siliques_P Parameter: Age (day) Value: 21
  misc_feature: MA Experiment 20000234 PARAMETER Experiment Name: At_Siliques_P Parameter: Organism Value: A. thaliana
  misc_feature: MA Experiment 20000234 PARAMETER Experiment Name: At_Siliques_P Parameter: Plant Line Value: WS
  misc_feature: MA Experiment 20000234 PARAMETER Experiment Name: At_Siliques_P Parameter: Tissue Value: Less Than 5mm Siliques vs. Whole Plant
  misc_feature: MA Experiment ID: 20000235 Result: Down-regulated in Transcription
  misc_feature: MA Experiment 20000235 PARAMETER Experiment Name: At_Siliques_P Parameter: Age (day) Value: 21
  misc_feature: MA Experiment 20000235 PARAMETER Experiment Name: At_Siliques_P Parameter: Organism Value: A. thaliana
  misc_feature: MA Experiment 20000235 PARAMETER Experiment Name: At_Siliques_P Parameter: Plant Line Value: WS
  misc_feature: MA Experiment 20000235 PARAMETER Experiment Name: At_Siliques_P Parameter: Tissue Value: 5-10mm Siliques vs. Whole Plant
  misc_feature: MA Experiment ID: 20000264 Result: Down-regulated in Transcription
  misc_feature: MA Experiment 20000264 PARAMETER Experiment Name: At_Open_Flower_P Parameter: Age (day) Value: 21
  misc_feature: MA Experiment 20000264 PARAMETER Experiment Name: At_Open_Flower_P Parameter: Plant Line Value: WS
  misc_feature: MA Experiment 20000264 PARAMETER Experiment Name: At_Open_Flower_P Parameter: Tissue Value: Open Flower vs. Whole Plant
  misc_feature: MA Experiment ID: 20000265 Result: Down-regulated in Transcription
  misc_feature: MA Experiment 20000265 PARAMETER Experiment Name: At_Open_Flower_P Parameter: Age (day) Value: 21
  misc_feature: MA Experiment 20000265 PARAMETER Experiment Name: At_Open_Flower_P Parameter: Plant Line Value: WS
  misc_feature: MA Experiment 20000265 PARAMETER Experiment Name: At_Open_Flower_P Parameter: Tissue Value: Closed Flower vs. Whole Plant
  misc_feature: MA Experiment ID: 20000286 Result: Down-regulated in Transcription
  misc_feature: MA Experiment 20000286 PARAMETER Experiment Name: At_Open_Flower_P Parameter: Age (day) Value: 21
  misc_feature: MA Experiment 20000286 PARAMETER Experiment Name: At_Open_Flower_P Parameter: Plant Line Value: WS
  misc_feature: MA Experiment 20000286 PARAMETER Experiment Name: At_Open_Flower_P Parameter: Tissue Value: Half Open vs. Whole Plant
  misc_feature: MA Experiment ID: 20000438 Result: Down-regulated in Transcription
  misc_feature: MA Experiment 20000438 PARAMETER Experiment Name: At_Shoots__P Parameter: Age (day) Value: 14
  misc_feature: MA Experiment 20000438 PARAMETER Experiment Name: At_Shoots__P Parameter: Tissue Value: Shoots vs. Whole Plant
  misc_feature: MA Experiment ID: 20000439 Result: Down-regulated in Transcription
  misc_feature: MA Experiment 20000439 PARAMETER Experiment Name: At_Roots__P Parameter: Age (day) Value: 14 vs. 21
  misc_feature: MA Experiment 20000439 PARAMETER Experiment Name: At_Roots__P Parameter: Organism Value: A. thaliana
  misc_feature: MA Experiment 20000439 PARAMETER Experiment Name: At_Roots__P Parameter: Tissue Value: Roots vs. Whole Plant
  misc_feature: MA Experiment ID: 20000441 Result: Up-regulated in Transcription
  misc_feature: MA Experiment 20000441 PARAMETER Experiment Name: At_1uM_BR-BRZ__P Parameter: Tissue Value: Shoot Apices
  misc_feature: MA Experiment 20000441 PARAMETER Experiment Name: At_1uM_BR-BRZ__P Parameter: Treatment Value: 1uM BR vs. No Treatment
  misc_feature: MA Experiment ID: 20000495 Result: Down-regulated in Transcription
  misc_feature: MA Experiment 20000495 PARAMETER Experiment Name: At_Guard_Cells_P Parameter: Harvest Date Value: 8/2/2002
  misc_feature: MA Experiment 20000495 PARAMETER Experiment Name: At_Guard_Cells_P Parameter: Organism Value: A. thaliana
  misc_feature: MA Experiment 20000495 PARAMETER Experiment Name: At_Guard_Cells_P Parameter: Tissue Value: Guard Cells vs. Leaves
  misc_feature: MA Experiment ID: 20000496 Result: Down-regulated in Transcription
  misc_feature: MA Experiment 20000496 PARAMETER Experiment Name: At_Guard_Cells_P Parameter: Harvest Date Value: 7/19/2002
  misc_feature: MA Experiment 20000496 PARAMETER Experiment Name: At_Guard_Cells_P Parameter: Organism Value: Canola
  misc_feature: MA Experiment 20000496 PARAMETER Experiment Name: At_Guard_Cells_P Parameter: Tissue Value: Guard Cells vs. Leaves
  misc_feature: MA Experiment ID: 20000527 Result: Up-regulated in Transcription
  misc_feature: MA Experiment 20000527 PARAMETER Experiment Name: At_10percent_PEG_P Parameter: Age (day) Value: 20
  misc_feature: MA Experiment 20000527 PARAMETER Experiment Name: At_10percent_PEG_P Parameter: Organism Value: A. thaliana
  misc_feature: MA Experiment 20000527 PARAMETER Experiment Name: At_10percent_PEG_P Parameter: Plant Line Value: WS
  misc_feature: MA Experiment 20000527 PARAMETER Experiment Name: At_10percent_PEG_P Parameter: Timepoint (day) Value: 20
  misc_feature: MA Experiment 20000527 PARAMETER Experiment Name: At_10percent_PEG_P Parameter: Tissue Value: Whole Plant
  misc_feature: MA Experiment 20000527 PARAMETER Experiment Name: At_10percent_PEG_P Parameter: Treatment Value: 10percent PEG vs. No Treatment
  misc_feature: MA Experiment ID: 20000794 Result: Down-regulated in Transcription
  misc_feature: MA Experiment 20000794 PARAMETER Experiment Name: At_Petals_P Parameter: Age (day) Value: 23-25 days
  misc_feature: MA Experiment 20000794 PARAMETER Experiment Name: At_Petals_P Parameter: Plant Line Value: WS
  misc_feature: MA Experiment 20000794 PARAMETER Experiment Name: At_Petals_P Parameter: Tissue Value: Petals vs. Whole plant
  misc_feature: MA Experiment ID: 20001450 Result: Down-regulated in Transcription
  misc_feature: MA Experiment 20001450 PARAMETER Experiment Name: At_Far-red-induction_P Parameter: Age (day) Value: 7
  misc_feature: MA Experiment 20001450 PARAMETER Experiment Name: At_Far-red-induction_P Parameter: Light Value: Far-red vs. White
  misc_feature: MA Experiment 20001450 PARAMETER Experiment Name: At_Far-red-induction_P Parameter: Organism Value: A. thaliana
  misc_feature: MA Experiment 20001450 PARAMETER Experiment Name: At_Far-red-induction_P Parameter: Plant Line Value: Columbia
  misc_feature: MA Experiment 20001450 PARAMETER Experiment Name: At_Far-red-induction_P Parameter: Timepoint (hr) Value: 8
  misc_feature: MA Experiment 20001450 PARAMETER Experiment Name: At_Far-red-induction_P Parameter: Tissue Value: Whole Plant
  misc_feature: MA Experiment ID: 20001554 Result: Down-regulated in Transcription
  misc_feature: MA Experiment 20001554 PARAMETER Experiment Name: At_Drought_Soil_Dry_P Parameter: Age (day) Value: 21
  misc_feature: MA Experiment 20001554 PARAMETER Experiment Name: At_Drought_Soil_Dry_P Parameter: Organism Value: A. thaliana
  misc_feature: MA Experiment 20001554 PARAMETER Experiment Name: At_Drought_Soil_Dry_P Parameter: Plant Line Value: WS
  misc_feature: MA Experiment 20001554 PARAMETER Experiment Name: At_Drought_Soil_Dry_P Parameter: Post Timepoint (hr) Value: None
  misc_feature: MA Experiment 20001554 PARAMETER Experiment Name: At_Drought_Soil_Dry_P Parameter: Post-Treatment Value: None
  misc_feature: MA Experiment 20001554 PARAMETER Experiment Name: At_Drought_Soil_Dry_P Parameter: Timepoint (day) Value: 7
  misc_feature: MA Experiment 20001554 PARAMETER Experiment Name: At_Drought_Soil_Dry_P Parameter: Treatment Value: Drought vs. No Drought
  misc_feature: MA Experiment ID: 20001556 Result: Down-regulated in Transcription
  misc_feature: MA Experiment 20001556 PARAMETER Experiment Name: At_Drought_Soil_Dry_P Parameter: Age (day) Value: 26
  misc_feature: MA Experiment 20001556 PARAMETER Experiment Name: At_Drought_Soil_Dry_P Parameter: Organism Value: A. thaliana
  misc_feature: MA Experiment 20001556 PARAMETER Experiment Name: At_Drought_Soil_Dry_P Parameter: Plant Line Value: WS
  misc_feature: MA Experiment 20001556 PARAMETER Experiment Name: At_Drought_Soil_Dry_P Parameter: Post Timepoint (hr) Value: None
  misc_feature: MA Experiment 20001556 PARAMETER Experiment Name: At_Drought_Soil_Dry_P Parameter: Post-Treatment Value: None
  misc_feature: MA Experiment 20001556 PARAMETER Experiment Name: At_Drought_Soil_Dry_P Parameter: Timepoint (day) Value: 12
  misc_feature: MA Experiment 20001556 PARAMETER Experiment Name: At_Drought_Soil_Dry_P Parameter: Treatment Value: Drought vs. No Drought
  misc_feature: MA Experiment ID: 20001560 Result: Down-regulated in Transcription
  misc_feature: MA Experiment 20001560 PARAMETER Experiment Name: At_Drought_Soil_Dry_P Parameter: Age (day) Value: 28
  misc_feature: MA Experiment 20001560 PARAMETER Experiment Name: At_Drought_Soil_Dry_P Parameter: Organism Value: A. thaliana
  misc_feature: MA Experiment 20001560 PARAMETER Experiment Name: At_Drought_Soil_Dry_P Parameter: Plant Line Value: WS
  misc_feature: MA Experiment 20001560 PARAMETER Experiment Name: At_Drought_Soil_Dry_P Parameter: Post Timepoint (hr) Value: None
  misc_feature: MA Experiment 20001560 PARAMETER Experiment Name: At_Drought_Soil_Dry_P Parameter: Post-Treatment Value: None
  misc_feature: MA Experiment 20001560 PARAMETER Experiment Name: At_Drought_Soil_Dry_P Parameter: Timepoint (day) Value: 14
  misc_feature: MA Experiment 20001560 PARAMETER Experiment Name: At_Drought_Soil_Dry_P Parameter: Treatment Value: Drought vs. No Drought
  misc_feature: MA Experiment ID: 20001760 Result: Down-regulated in Transcription
  misc_feature: MA Experiment 20001760 PARAMETER Experiment Name: At_50mM_NH4NO3_L-to-H_P Parameter: Timepoint (hr) Value: 2
  misc_feature: MA Experiment 20001760 PARAMETER Experiment Name: At_50mM_NH4NO3_L-to-H_P Parameter: Tissue Value: Siliques
  misc_feature: MA Experiment 20001760 PARAMETER Experiment Name: At_50mM_NH4NO3_L-to-H_P Parameter: Treatment Value: 50mM NH4NO3 vs 100mM Mannitol
  misc_feature: MA Experiment ID: 20001761 Result: Down-regulated in Transcription
  misc_feature: MA Experiment 20001761 PARAMETER Experiment Name: At_50mM_NH4NO3_L-to-H_P Parameter: Timepoint (hr) Value: 4
  misc_feature: MA Experiment 20001761 PARAMETER Experiment Name: At_50mM_NH4NO3_L-to-H_P Parameter: Tissue Value: Siliques
  misc_feature: MA Experiment 20001761 PARAMETER Experiment Name: At_50mM_NH4NO3_L-to-H_P Parameter: Treatment Value: 50mM NH4NO3 vs 100mM Mannitol
  misc_feature: MA Experiment ID: 20001904 Result: Down-regulated in Transcription
  misc_feature: MA Experiment 20001904 PARAMETER Experiment Name: At_Drought_Reproduction_P Parameter: Age (day) Value: 37
  misc_feature: MA Experiment 20001904 PARAMETER Experiment Name: At_Drought_Reproduction_P Parameter: Organism Value: A. thaliana
  misc_feature: MA Experiment 20001904 PARAMETER Experiment Name: At_Drought_Reproduction_P Parameter: Plant Line Value: WS
  misc_feature: MA Experiment 20001904 PARAMETER Experiment Name: At_Drought_Reproduction_P Parameter: Timepoint (day) Value: 7
  misc_feature: MA Experiment 20001904 PARAMETER Experiment Name: At_Drought_Reproduction_P Parameter: Tissue Value: Rosettes
  misc_feature: MA Experiment 20001904 PARAMETER Experiment Name: At_Drought_Reproduction_P Parameter: Treatment Value: Drought vs. No Drought
  misc_feature: MA Experiment ID: 20001910 Result: Down-regulated in Transcription
  misc_feature: MA Experiment 20001910 PARAMETER Experiment Name: At_Drought_Reproduction_P Parameter: Age (day) Value: 37
  misc_feature: MA Experiment 20001910 PARAMETER Experiment Name: At_Drought_Reproduction_P Parameter: Organism Value: A. thaliana
  misc_feature: MA Experiment 20001910 PARAMETER Experiment Name: At_Drought_Reproduction_P Parameter: Plant Line Value: WS
  misc_feature: MA Experiment 20001910 PARAMETER Experiment Name: At_Drought_Reproduction_P Parameter: Timepoint (day) Value: 7
  misc_feature: MA Experiment 20001910 PARAMETER Experiment Name: At_Drought_Reproduction_P Parameter: Tissue Value: Flowers
  misc_feature: MA Experiment 20001910 PARAMETER Experiment Name: At_Drought_Reproduction_P Parameter: Treatment Value: Drought vs. No Drought
gaaaaataccaaattcttgaaaacaaaaaaaaaaatgaataatcaaaatgaagacacagaaggtggtcgaaactgttgtacttgctgcttaagcttcatcttcacagctggtctcacctctcttttcttatggcttagtctccgtgcggacaaacccaaatgctcaatccaaaactttttcattcctgccctcggaaaagacccaaattcacgagacaataccactctaaatttcatggttcgttgtgacaatccaaatagagaccaaggaatctactacgacgatgtccaccttaatttttccaccatcaacacgaccaagatcaattcatctgctcttgtcttagttggtaactacacagtgcctaagttctatcaaggacacaagaagaaggccaagaagtggggtcaagtaaagccgctaaacaaccagacggttttacgagcggttttgcctaatggatcggctgttttcaggttggatctcaagactcaagttagattcaagattgttttttggaaaactaagaggtatggggttgaagttggagctgatgttgaagtcaacggtgatggagttaaagctcagaagaaaggaattaagatgaagaaatctgattcttcttttccattaagaagctcttttccgattagtgttttgatgaatttactcgtattctttgctattcgttaacttcattaatggtgttgattttcaggtttttcatttcttggttttgttgattttgattattgactatttcatgagttttgttgtgatccttagttccattttcttcattgcataatttatcccttattttttttgttttaactatgtattagtttccatcaacaaaattctatttgaaaatcattttatccattttttat

SEQ ID NO: 47274 - protein, 230 aa, Arabidopsis thaliana
  peptide (1)..(230): Ceres Seq. ID no. 13588534
  misc_feature (25)..(188): Homolog of NCBI NO: 15239999 NR Description: harpin-induced protein 1 family (NDR1/HIN1-like
  misc_feature (25)..(188): Homolog of NCBI NO: 21450870 NR Description: putative harpin-induced protein [Arabidopsis
  misc_feature (26)..(204): Homolog of NCBI NO: 27261042 NR Description: P0681F05.33 [Oryza sativa (japonica
  misc_feature (26)..(193): Homolog of NCBI NO: 15220603 NR Description: hypothetical protein [Arabidopsis thaliana]
  misc_feature (153)..(230): Homolog of NCBI NO: 22331213 NR Description: non-race specific disease resistance protein
  misc_feature (21)..(198): Homolog of NCBI NO: 38489222 NR Description: NDR1-like protein [Nicotiana benthamiana]
  misc_feature (12)..(105): Homolog of NCBI NO: 24417466 NR Description: unknown [Arabidopsis thaliana]
  misc_feature (30)..(230): Homolog of NCBI NO: 22331216 NR Description: ndr1-related protein [Arabidopsis thaliana]
  misc_feature (12)..(206): Homolog of NCBI NO: 22331213 NR Description: non-race specific disease resistance protein
  misc_feature (12)..(230): Homolog of NCBI NO: 15232308 NR Description: non-race specific disease resistance protein
KNTKFLKTKKKMNNQNEDTEGGRNCCTCCLSFIFTAGLTSLFLWLSLRADKPKCSIQNFFIPALGKDPNSRDNTTLNFMVRCDNPNRDQGIYYDDVHLNFSTINTTKINSSALVLVGNYTVPKFYQGHKKKAKKWGQVKPLNNQTVLRAVLPNGSAVFRLDLKTQVRFKIVFWKTKRYGVEVGADVEVNGDGVKAQKKGIKMKKSDSSFPLRSSFPISVLMNLLVFFAIR

SEQ ID NO: 47275 - protein, 219 aa, Arabidopsis thaliana
  peptide (1)..(219): Ceres Seq. ID no. 13588535
  misc_feature (14)..(177): Homolog of NCBI NO: 15239999 NR Description: harpin-induced protein 1 family (NDR1/HIN1-like
  misc_feature (14)..(177): Homolog of NCBI NO: 21450870 NR Description: putative harpin-induced protein [Arabidopsis
  misc_feature (15)..(193): Homolog of NCBI NO: 27261042 NR Description: P0681F05.33 [Oryza sativa (japonica
  misc_feature (15)..(182): Homolog of NCBI NO: 15220603 NR Description: hypothetical protein [Arabidopsis thaliana]
  misc_feature (142)..(219): Homolog of NCBI NO: 22331213 NR Description: non-race specific disease resistance protein
  misc_feature (10)..(187): Homolog of NCBI NO: 38489222 NR Description: NDR1-like protein [Nicotiana benthamiana]
  misc_feature (1)..(94): Homolog of NCBI NO: 24417466 NR Description: unknown [Arabidopsis thaliana]
  misc_feature (19)..(219): Homolog of NCBI NO: 22331216 NR Description: ndr1-related protein [Arabidopsis thaliana]
  misc_feature (1)..(195): Homolog of NCBI NO: 22331213 NR Description: non-race specific disease resistance protein
  misc_feature (1)..(219): Homolog of NCBI NO: 15232308 NR Description: non-race specific disease resistance protein
MNNQNEDTEGGRNCCTCCLSFIFTAGLTSLFLWLSLRADKPKCSIQNFFIPALGKDPNSRDNTTLNFMVRCDNPNRDQGIYYDDVHLNFSTINTTKINSSALVLVGNYTVPKFYQGHKKKAKKWGQVKPLNNQTVLRAVLPNGSAVFRLDLKTQVRFKIVFWKTKRYGVEVGADVEVNGDGVKAQKKGIKMKKSDSSFPLRSSFPISVLMNLLVFFAIR

SEQ ID NO: 47276 - protein, 152 aa, Arabidopsis thaliana
  peptide (1)..(152): Ceres Seq. ID no. 13588536
  misc_feature (1)..(110): Homolog of NCBI NO: 15239999 NR Description: harpin-induced protein 1 family (NDR1/HIN1-like
  misc_feature (1)..(110): Homolog of NCBI NO: 21450870 NR Description: putative harpin-induced protein [Arabidopsis
  misc_feature (1)..(126): Homolog of NCBI NO: 27261042 NR Description: P0681F05.33 [Oryza sativa (japonica
  misc_feature (1)..(115): Homolog of NCBI NO: 15220603 NR Description: hypothetical protein [Arabidopsis thaliana]
  misc_feature (75)..(152): Homolog of NCBI NO: 22331213 NR Description: non-race specific disease resistance protein
  misc_feature (1)..(120): Homolog of NCBI NO: 38489222 NR Description: NDR1-like protein [Nicotiana benthamiana]
  misc_feature (1)..(27): Homolog of NCBI NO: 24417466 NR Description: unknown [Arabidopsis thaliana]
  misc_feature (1)..(152): Homolog of NCBI NO: 22331216 NR Description: ndr1-related protein [Arabidopsis thaliana]
  misc_feature (1)..(128): Homolog of NCBI NO: 22331213 NR Description: non-race specific disease resistance protein
  misc_feature (1)..(152): Homolog of NCBI NO: 15232308 NR Description: non-race specific disease resistance protein
MVRCDNPNRDQGIYYDDVHLNFSTINTTKINSSALVLVGNYTVPKFYQGHKKKAKKWGQVKPLNNQTVLRAVLPNGSAVFRLDLKTQVRFKIVFWKTKRYGVEVGADVEVNGDGVKAQKKGIKMKKSDSSFPLRSSFPISVLMNLLVFFAIR

SEQ ID NO: 47277 - DNA, 1291 bp, Arabidopsis thaliana
  misc_feature (1)..(1291): Ceres Seq. ID no. 12602394
  misc_feature: MA Experiment ID: 20000307 Result: Down-regulated in Transcription
  misc_feature: MA Experiment 20000307 PARAMETER Experiment Name: At_Germinating_Seeds_Sub_P Parameter: Age (hr) Value: 24 vs. 0
  misc_feature: MA Experiment 20000307 PARAMETER Experiment Name: At_Germinating_Seeds_Sub_P Parameter: Organism Value: A. thaliana
  misc_feature: MA Experiment 20000307 PARAMETER Experiment Name: At_Germinating_Seeds_Sub_P Parameter: Plant Line Value: WS
  misc_feature: MA Experiment 20000307 PARAMETER Experiment Name: At_Germinating_Seeds_Sub_P Parameter: Tissue Value: Germinating Seeds
  misc_feature: MA Experiment ID: 20000314 Result: Up-regulated in Transcription
  misc_feature: MA Experiment 20000314 PARAMETER Experiment Name: At_14day_Shoots-Roots_Sub_P Parameter: Age (day) Value: 14
  misc_feature: MA Experiment 20000314 PARAMETER Experiment Name: At_14day_Shoots-Roots_Sub_P Parameter: Organism Value: A. thaliana
  misc_feature: MA Experiment 20000314 PARAMETER Experiment Name: At_14day_Shoots-Roots_Sub_P Parameter: Plant Line Value: WS
  misc_feature: MA Experiment 20000314 PARAMETER Experiment Name: At_14day_Shoots-Roots_Sub_P Parameter: Tissue Value: Roots vs. Whole Plant
  misc_feature: MA Experiment ID: 20000315 Result: Up-regulated in Transcription
  misc_feature: MA Experiment 20000315 PARAMETER Experiment Name: At_14day_Shoots-Roots_Sub_P Parameter: Age (day) Value: 14
  misc_feature: MA Experiment 20000315 PARAMETER Experiment Name: At_14day_Shoots-Roots_Sub_P Parameter: Organism Value: A. thaliana
  misc_feature: MA Experiment 20000315 PARAMETER Experiment Name: At_14day_Shoots-Roots_Sub_P Parameter: Plant Line Value: WS
  misc_feature: MA Experiment 20000315 PARAMETER Experiment Name: At_14day_Shoots-Roots_Sub_P Parameter: Tissue Value: Shoots vs. Whole Plant
  misc_feature: MA Experiment ID: 20000355 Result: Down-regulated in Transcription
  misc_feature: MA Experiment 20000355 PARAMETER Experiment Name: At_Siliques_Sub_P Parameter: Age (day) Value: 21
  misc_feature: MA Experiment 20000355 PARAMETER Experiment Name: At_Siliques_Sub_P Parameter: Organism Value: A. thaliana
  misc_feature: MA Experiment 20000355 PARAMETER Experiment Name: At_Siliques_Sub_P Parameter: Plant Line Value: WS
  misc_feature: MA Experiment 20000355 PARAMETER Experiment Name: At_Siliques_Sub_P Parameter: Tissue Value: Less Than 5mm Siliques vs. Whole Plant
  misc_feature: MA Experiment ID: 20000440 Result: Up-regulated in Transcription
  misc_feature: MA Experiment 20000440 PARAMETER Experiment Name: At_Closed-Flower__Sub_P Parameter: Tissue Value: Closed Flower vs. Whole Plant
atgggtagtgcaaaatcagccatgctgatcctcttagtagcaatggtcatcgcatcatgtgccacggccattgatatgtccgtggtttcctacgacgataacaaccgtctccatagcgttttcgatgctgaggcctcgttaatcttcgagtcatggatggtcaaacatgggaaagtgtacgggtccgttgccgagaaggaacggcgtttgacgatttttgaggacaacctccgttttatcaataaccggaacgctgagaatctcagttatcggcttggtttgaccgggtttgcggatttatctcttcatgagtataaagaagtttgccacggggctgatccaagacctcctaggaaccacgtctttatgactagtagcgaccgatacaagactagtgctgatgatgtgcttcctaagtcagttgattggagaaacgaaggagcagtgactgaagtcaaagatcaaggccattgcaggagttgttgggctttctcgactgtgggagcagtggaaggcttaaacaagatcgtgacgggagagttagtcactttgtctgagcaagatttgatcaattgtaacaaagaaaacaatggttgcggaggaggcaaactcgagactgcctatgagttcatcatgaaaaatggtggtcttggtaccgacaacgattatccttacaaagctgttaacggagtctgtgatggccgcctcaaggaaaacaacaagaatgttatgattgatgggtatgaaaatttgcccgcaaacgacgaatctgctctcatgaaagcggttgctcaccagcctgtgactgccgttatcgattccagtagccgagagtttcagctttatgaatcgggagtgtttgatggctcgtgtggaacaaacctaaaccatggagttgttgtggtcgggtatggaactgagaatggtcgtgactactggctcgtgaaaaactctaggggcattacatggggagaagctggctacatgaagatggctcgaaacattgccaatccaagaggcttatgtggcattgcaatgcgagcttcataccctctaaagaactccttttctaccgataaaagctccatcgcctaataaaatgagctaaatgtatgttatgcaaaggatccagtgagccagcaacctattcgattgtgaaatgaaaaataatgtagtcgatgggttttgttttgtaatatattttggatttgtatggagggcaatgtttgaagtttgtataatatttatggatatttcgttaggctctaattatgaatgccttctttttagg

SEQ ID NO: 47278 - protein, 364 aa, Arabidopsis thaliana
  peptide (1)..(364): Ceres Seq. ID no. 12602395
  misc_feature (137)..(352): Pfam Name: Papain family cysteine protease Pfam Description: Papain family cysteine protease
  misc_feature (1)..(353): Homolog of NCBI NO: 7435801 NR Description: cysteine proteinase (EC 3.4.22.-) precursor -
  misc_feature (8)..(357): Homolog of NCBI NO: 18416165 NR Description: cysteine proteinase; protein id: At4g23520.1
  misc_feature (1)..(353): Homolog of NCBI NO: 18141283 NR Description: senescence-associated cysteine protease [Brassica
  misc_feature (1)..(354): Homolog of NCBI NO: 18401614 NR Description: cysteine proteinase RD21A
  misc_feature (1)..(354): Homolog of NCBI NO: 14517542 NR Description: F2G19.31/F2G19.31 [Arabidopsis thaliana]
  misc_feature (1)..(353): Homolog of NCBI NO: 18422289 NR Description: cysteine proteinase RD21A
  misc_feature (6)..(354): Homolog of NCBI NO: 18141285 NR Description: senescence-associated cysteine protease [Brassica
  misc_feature (1)..(364): Homolog of NCBI NO: 18413507 NR Description: cysteine proteinase
  misc_feature (8)..(364): Homolog of NCBI NO: 20260334 NR Description: drought-inducible cysteine proteinase RD21A
  misc_feature (1)..(364): Homolog of NCBI NO: 18413505 NR Description: cysteine proteinase; protein id: At4g11310.1
MGSAKSAMLILLVAMVIASCATAIDMSVVSYDDNNRLHSVFDAEASLIFESWMVKHGKVYGSVAEKERRLTIFEDNLRFINNRNAENLSYRLGLTGFADLSLHEYKEVCHGADPRPPRNHVFMTSSDRYKTSADDVLPKSVDWRNEGAVTEVKDQGHCRSCWAFSTVGAVEGLNKIVTGELVTLSEQDLINCNKENNGCGGGKLETAYEFIMKNGGLGTDNDYPYKAVNGVCDGRLKENNKNVMIDGYENLPANDESALMKAVAHQPVTAVIDSSSREFQLYESGVFDGSCGTNLNHGVVVVGYGTENGRDYWLVKNSRGITWGEAGYMKMARNIANPRGLCGIAMRASYPLKNSFSTDKSSIA

SEQ ID NO: 47279 - protein, 357 aa, Arabidopsis thaliana
  peptide (1)..(357): Ceres Seq. ID no. 12602396
  misc_feature (130)..(345): Pfam Name: Papain family cysteine protease Pfam Description: Papain family cysteine protease
  misc_feature (1)..(346): Homolog of NCBI NO: 7435801 NR Description: cysteine proteinase (EC 3.4.22.-) precursor -
  misc_feature (1)..(350): Homolog of NCBI NO: 18416165 NR Description: cysteine proteinase; protein id: At4g23520.1
  misc_feature (1)..(346): Homolog of NCBI NO: 18141283 NR Description: senescence-associated cysteine protease [Brassica
  misc_feature (1)..(347): Homolog of NCBI NO: 18401614 NR Description: cysteine proteinase RD21A
  misc_feature (1)..(347): Homolog of NCBI NO: 14517542 NR Description: F2G19.31/F2G19.31 [Arabidopsis thaliana]
  misc_feature (1)..(346): Homolog of NCBI NO: 18422289 NR Description: cysteine proteinase RD21A
  misc_feature (1)..(347): Homolog of NCBI NO: 18141285 NR Description: senescence-associated cysteine protease [Brassica
  misc_feature (1)..(357): Homolog of NCBI NO: 18413507 NR Description: cysteine proteinase
  misc_feature (1)..(357): Homolog of NCBI NO: 20260334 NR Description: drought-inducible cysteine proteinase RD21A
  misc_feature (1)..(357): Homolog of NCBI NO: 18413505 NR Description: cysteine proteinase; protein id: At4g11310.1
MLILLVAMVIASCATAIDMSVVSYDDNNRLHSVFDAEASLIFESWMVKHGKVYGSVAEKERRLTIFEDNLRFINNRNAENLSYRLGLTGFADLSLHEYKEVCHGADPRPPRNHVFMTSSDRYKTSADDVLPKSVDWRNEGAVTEVKDQGHCRSCWAFSTVGAVEGLNKIVTGELVTLSEQDLINCNKENNGCGGGKLETAYEFIMKNGGLGTDNDYPYKAVNGVCDGRLKENNKNVMIDGYENLPANDESALMKAVAHQPVTAVIDSSSREFQLYESGVFDGSCGTNLNHGVVVVGYGTENGRDYWLVKNSRGITWGEAGYMKMARNIANPRGLCGIAMRASYPLKNSFSTDKSSIA

SEQ ID NO: 47280 - protein, 350 aa, Arabidopsis thaliana
  peptide (1)..(350): Ceres Seq. ID no. 12602397
  misc_feature (123)..(338): Pfam Name: Papain family cysteine protease Pfam Description: Papain family cysteine protease
  misc_feature (1)..(339): Homolog of NCBI NO: 7435801 NR Description: cysteine proteinase (EC 3.4.22.-) precursor -
  misc_feature (1)..(343): Homolog of NCBI NO: 18416165 NR Description: cysteine proteinase; protein id: At4g23520.1
  misc_feature (1)..(339): Homolog of NCBI NO: 18141283 NR Description: senescence-associated cysteine protease [Brassica
  misc_feature (1)..(340): Homolog of NCBI NO: 18401614 NR Description: cysteine proteinase RD21A
  misc_feature (1)..(340): Homolog of NCBI NO: 14517542 NR Description: F2G19.31/F2G19.31 [Arabidopsis thaliana]
  misc_feature (1)..(339): Homolog of NCBI NO: 18422289 NR Description: cysteine proteinase RD21A
  misc_feature (1)..(340): Homolog of NCBI NO: 18141285 NR Description: senescence-associated cysteine protease [Brassica
  misc_feature (1)..(350): Homolog of NCBI NO: 18413507 NR Description: cysteine proteinase
  misc_feature (1)..(350): Homolog of NCBI NO: 20260334 NR Description: drought-inducible cysteine proteinase RD21A
  misc_feature (1)..(350): Homolog of NCBI NO: 18413505 NR Description: cysteine proteinase; protein id: At4g11310.1
MVIASCATAIDMSVVSYDDNNRLHSVFDAEASLIFESWMVKHGKVYGSVAEKERRLTIFEDNLRFINNRNAENLSYRLGLTGFADLSLHEYKEVCHGADPRPPRNHVFMTSSDRYKTSADDVLPKSVDWRNEGAVTEVKDQGHCRSCWAFSTVGAVEGLNKIVTGELVTLSEQDLINCNKENNGCGGGKLETAYEFIMKNGGLGTDNDYPYKAVNGVCDGRLKENNKNVMIDGYENLPANDESALMKAVAHQPVTAVIDSSSREFQLYESGVFDGSCGTNLNHGVVVVGYGTENGRDYWLVKNSRGITWGEAGYMKMARNIANPRGLCGIAMRASYPLKNSFSTDKSSIA

SEQ ID NO: 47281 - DNA, 1382 bp, Arabidopsis thaliana
  misc_feature (1)..(1382): Ceres Seq. ID no. 13600777
  misc_feature: MA Experiment ID: 20000173 Result: Up-regulated in Transcription
  misc_feature: MA Experiment 20000173 PARAMETER Experiment Name: At_42deg_Heat_P Parameter: Age (day) Value: 14
  misc_feature: MA Experiment 20000173 PARAMETER Experiment Name: At_42deg_Heat_P Parameter: Organism Value: A. thaliana
  misc_feature: MA Experiment 20000173 PARAMETER Experiment Name: At_42deg_Heat_P Parameter: Plant Line Value: WS
  misc_feature: MA Experiment 20000173 PARAMETER Experiment Name: At_42deg_Heat_P Parameter: Temperature (deg C) Value: 42 vs. 22
  misc_feature: MA Experiment 20000173 PARAMETER Experiment Name: At_42deg_Heat_P Parameter: Timepoint (hr) Value: 6
  misc_feature: MA Experiment 20000173 PARAMETER Experiment Name: At_42deg_Heat_P Parameter: Tissue Value: Aerial
  misc_feature: MA Experiment ID: 20000184 Result: Down-regulated in Transcription
  misc_feature: MA Experiment 20000184 PARAMETER Experiment Name: At_Shoots__P Parameter: Age (day) Value: 7
  misc_feature: MA Experiment 20000184 PARAMETER Experiment Name: At_Shoots__P Parameter: Tissue Value: Shoots vs. Whole Plant
  misc_feature: MA Experiment ID: 20000185 Result: Down-regulated in Transcription
  misc_feature: MA Experiment 20000185 PARAMETER Experiment Name: At_Roots__P Parameter: Age (day) Value: 7 vs. 21
  misc_feature: MA Experiment 20000185 PARAMETER Experiment Name: At_Roots__P Parameter: Organism Value: A. thaliana
  misc_feature: MA Experiment 20000185 PARAMETER Experiment Name: At_Roots__P Parameter: Tissue Value: Roots vs. Whole Plant
  misc_feature: MA Experiment ID: 20000234 Result: Down-regulated in Transcription
  misc_feature: MA Experiment 20000234 PARAMETER Experiment Name: At_Siliques_P Parameter: Age (day) Value: 21
  misc_feature: MA Experiment 20000234 PARAMETER Experiment Name: At_Siliques_P Parameter: Organism Value: A. thaliana
  misc_feature: MA Experiment 20000234 PARAMETER Experiment Name: At_Siliques_P Parameter: Plant Line Value: WS
  misc_feature: MA Experiment 20000234 PARAMETER Experiment Name: At_Siliques_P Parameter: Tissue Value: Less Than 5mm Siliques vs. Whole Plant
  misc_feature: MA Experiment ID: 20000235 Result: Down-regulated in Transcription
  misc_feature: MA Experiment 20000235 PARAMETER Experiment Name: At_Siliques_P Parameter: Age (day) Value: 21
  misc_feature: MA Experiment 20000235 PARAMETER Experiment Name: At_Siliques_P Parameter: Organism Value: A. thaliana
  misc_feature: MA Experiment 20000235 PARAMETER Experiment Name: At_Siliques_P Parameter: Plant Line Value: WS
  misc_feature: MA Experiment 20000235 PARAMETER Experiment Name: At_Siliques_P Parameter: Tissue Value: 5-10mm Siliques vs. Whole Plant
  misc_feature: MA Experiment ID: 20000265 Result: Up-regulated in Transcription
  misc_feature: MA Experiment 20000265 PARAMETER Experiment Name: At_Open_Flower_P Parameter: Age (day) Value: 21
  misc_feature: MA Experiment 20000265 PARAMETER Experiment Name: At_Open_Flower_P Parameter: Plant Line Value: WS
  misc_feature: MA Experiment 20000265 PARAMETER Experiment Name: At_Open_Flower_P Parameter: Tissue Value: Closed Flower vs. Whole Plant
  misc_feature: MA Experiment ID: 20000286 Result: Up-regulated in Transcription
  misc_feature: MA Experiment 20000286 PARAMETER Experiment Name: At_Open_Flower_P Parameter: Age (day) Value: 21
  misc_feature: MA Experiment 20000286 PARAMETER Experiment Name: At_Open_Flower_P Parameter: Plant Line Value: WS
  misc_feature: MA Experiment 20000286 PARAMETER Experiment Name: At_Open_Flower_P Parameter: Tissue Value: Half Open vs. Whole Plant
  misc_feature: MA Experiment ID: 20000439 Result: Down-regulated in Transcription
  misc_feature: MA Experiment 20000439 PARAMETER Experiment Name: At_Roots__P Parameter: Age (day) Value: 14 vs. 21
  misc_feature: MA Experiment 20000439 PARAMETER Experiment Name: At_Roots__P Parameter: Organism Value: A. thaliana
  misc_feature: MA Experiment 20000439 PARAMETER Experiment Name: At_Roots__P Parameter: Tissue Value: Roots vs. Whole Plant
  misc_feature: MA Experiment ID: 20001761 Result: Up-regulated in Transcription
  misc_feature: MA Experiment 20001761 PARAMETER Experiment Name: At_50mM_NH4NO3_L-to-H_P Parameter: Timepoint (hr) Value: 4
  misc_feature: MA Experiment 20001761 PARAMETER Experiment Name: At_50mM_NH4NO3_L-to-H_P Parameter: Tissue Value: Siliques
  misc_feature: MA Experiment 20001761 PARAMETER Experiment Name: At_50mM_NH4NO3_L-to-H_P Parameter: Treatment Value: 50mM NH4NO3 vs 100mM Mannitol
  misc_feature: MA Experiment ID: 20001911 Result: Down-regulated in Transcription
  misc_feature: MA Experiment 20001911 PARAMETER Experiment Name: At_Drought_Reproduction_P Parameter: Age (day) Value: 40
  misc_feature: MA Experiment 20001911 PARAMETER Experiment Name: At_Drought_Reproduction_P Parameter: Organism Value: A. thaliana
  misc_feature: MA Experiment 20001911 PARAMETER Experiment Name: At_Drought_Reproduction_P Parameter: Plant Line Value: WS
  misc_feature: MA Experiment 20001911 PARAMETER Experiment Name: At_Drought_Reproduction_P Parameter: Timepoint (day) Value: 10
  misc_feature: MA Experiment 20001911 PARAMETER Experiment Name: At_Drought_Reproduction_P Parameter: Tissue Value: Flowers
  misc_feature: MA Experiment 20001911 PARAMETER Experiment Name: At_Drought_Reproduction_P Parameter: Treatment Value: Drought vs. No Drought
gataagaaagaaagtcgtgaagatgagaggcgtaacaccaaactattaccattcttacactttcttcttcttcttcttcgttgtcttattagctctgtttcttcatgttttctcgataaacactttgtcatctacagaaactctaacaatctcaagcaaccgaaccattgtgtctcccggtaacatcttcgagctaggtttcttcaaaactacaacaagctctcgaaatggtgatcattggtatcttgggatttggtacaagtcaatctctgagagaacttatgtatgggttgccaacagagataaccctctttccaagtctatcggaacattaaagatctcttacgctaacctcgtccttcttgatcattctggtactcttgtttggtcaacgaatctaacgagaacggtgaaatctccagtggtggcagagctgctcgataacggcaacttcgtgcttagagactccaaaggcaactatcaaaaccgattcttgtggcaaagctttgattatccggtggacacattactcccggagatgaaaattggtcgggatctcaaaacaggacacgagactttcctcagttcttggagaagcccttatgatccctcaagcggagacttctcgttcaaactcggaactcaagggctacctgagttttatcttttcaagaaagagtttctattgtaccgatccggtccgtggaatggagtcgggtttagtggcataccgacgatgcaaaactggagctactttgacgttgttaacaacttcatagagaacagaggggaagttgcttatagtttcaaagtcaccgaccatagcatgcactacgtgagatttacactgactaccgaaagattattacagatatccagatgggatacgacatcatcggaatggaacttgtttggcgttttaccgaccgagaaatgcgatttgtaccaaatatgtggtcgtgatagttattgtgacacgaaaacatcaccgacgtgtaactgtatcaaaggctttgttccaaagaatgtgacggcttgggctttgggagatacatttgagggatgtgtgaggaagtcacgactgaactgccacagagatgggttttttcttttgatgaagaggatgaagctgcctggtacaagcacagcaattgtggacaagacaattgggttgaatgaatgtaaggagaggtgttctaaggattgtaattgtaccgggtttgcgaataaggatatccaaaatggtgggtcgggttgtgtgatttggaccggaggagctcatggatatgaggaattacgtcgtcggaggtcaagatctatatgtcaaaataggcctctataattagacatgaaaattggatatcttgatatatttttagaat

SEQ ID NO: 47282 - protein, 446 aa, Arabidopsis thaliana
  peptide (1)..(446): Ceres Seq. ID no. 13600778
  misc_feature (91)..(204): Pfam Name: D-mannose binding lectin Pfam Description: D-mannose binding lectin
  misc_feature (15)..(424): Homolog of NCBI NO: 81671 NR Description: S-locus-specific glycoprotein NS1 precursor -
  misc_feature (8)..(424): Homolog of NCBI NO: 5688937 NR Description: glycoprotein [Brassica rapa]
  misc_feature (8)..(424): Homolog of NCBI NO: 484112 NR Description: S-locus related protein
  misc_feature (15)..(424): Homolog of NCBI NO: 21321208 NR Description: S-locus-related I [Brassica amplexicaulis]
  misc_feature (8)..(424): Homolog of NCBI NO: 3426188 NR Description: NS3-glycoprotein [Brassica rapa]
  misc_feature (130)..(423): Homolog of NCBI NO: 27545459 NR Description: S-related kinase 9 [Arabidopsis lyrata]
  misc_feature (15)..(423): Homolog of NCBI NO: 21321240 NR Description: S-locus-related I [Lunaria annua]
  misc_feature (15)..(424): Homolog of NCBI NO: 3327858 NR Description: SLR1 [Erysimum cheiri]
  misc_feature (8)..(446): Homolog of NCBI NO: 99660 NR Description: S-locus-specific glycoprotein SLR1 precursor -
  misc_feature (8)..(446): Homolog of NCBI NO: 15229924 NR Description: S-locus related protein SLR1 homolog (S1)
IRKKVVKMRGVTPNYYHSYTFFFFFFVVLLALFLHVFSINTLSSTETLTISSNRTIVSPGNIFELGFFKTTTSSRNGDHWYLGIWYKSISERTYVWVANRDNPLSKSIGTLKISYANLVLLDHSGTLVWSTNLTRTVKSPVVAELLDNGNFVLRDSKGNYQNRFLWQSFDYPVDTLLPEMKIGRDLKTGHETFLSSWRSPYDPSSGDFSFKLGTQGLPEFYLFKKEFLLYRSGPWNGVGFSGIPTMQNWSYFDVVNNFIENRGEVAYSFKVTDHSMHYVRFTLTTERLLQISRWDTTSSEWNLFGVLPTEKCDLYQICGRDSYCDTKTSPTCNCIKGFVPKNVTAWALGDTFEGCVRKSRLNCHRDGFFLLMKRMKLPGTSTAIVDKTIGLNECKERCSKDCNCTGFANKDIQNGGSGCVIWTGGAHGYEELRRRRSRSICQNRPL

SEQ ID NO: 47283 - protein, 439 aa, Arabidopsis thaliana
  peptide (1)..(439): Ceres Seq. ID no. 13600779
  misc_feature (84)..(197): Pfam Name: D-mannose binding lectin Pfam Description: D-mannose binding lectin
  misc_feature (8)..(417): Homolog of NCBI NO: 81671 NR Description: S-locus-specific glycoprotein NS1 precursor -
  misc_feature (1)..(417): Homolog of NCBI NO: 5688937 NR Description: glycoprotein [Brassica rapa]
  misc_feature (1)..(417): Homolog of NCBI NO: 484112 NR Description: S-locus related protein
  misc_feature (8)..(417): Homolog of NCBI NO: 21321208 NR Description: S-locus-related I [Brassica amplexicaulis]
  misc_feature (1)..(417): Homolog of NCBI NO: 3426188 NR Description: NS3-glycoprotein [Brassica rapa]
  misc_feature (123)..(416): Homolog of NCBI NO: 27545459 NR Description: S-related kinase 9 [Arabidopsis lyrata]
  misc_feature (8)..(416): Homolog of NCBI NO: 21321240 NR Description: S-locus-related I [Lunaria annua]
  misc_feature (8)..(417): Homolog of NCBI NO: 3327858 NR Description: SLR1 [Erysimum cheiri]
  misc_feature (1)..(439): Homolog of NCBI NO: 99660 NR Description: S-locus-specific glycoprotein SLR1 precursor -
  misc_feature (1)..(439): Homolog of NCBI NO: 15229924 NR Description: S-locus related protein SLR1 homolog (S1)
MRGVTPNYYHSYTFFFFFFVVLLALFLHVFSINTLSSTETLTISSNRTIVSPGNIFELGFFKTTTSSRNGDHWYLGIWYKSISERTYVWVANRDNPLSKSIGTLKISYANLVLLDHSGTLVWSTNLTRTVKSPVVAELLDNGNFVLRDSKGNYQNRFLWQSFDYPVDTLLPEMKIGRDLKTGHETFLSSWRSPYDPSSGDFSFKLGTQGLPEFYLFKKEFLLYRSGPWNGVGFSGIPTMQNWSYFDVVNNFIENRGEVAYSFKVTDHSMHYVRFTLTTERLLQISRWDTTSSEWNLFGVLPTEKCDLYQICGRDSYCDTKTSPTCNCIKGFVPKNVTAWALGDTFEGCVRKSRLNCHRDGFFLLMKRMKLPGTSTAIVDKTIGLNECKERCSKDCNCTGFANKDIQNGGSGCVIWTGGAHGYEELRRRRSRSICQNRPL

SEQ ID NO: 47284 - protein, 267 aa, Arabidopsis thaliana
  peptide (1)..(267): Ceres Seq. ID no. 13600780
  misc_feature (184)..(245): Pfam Name: PAN domain Pfam Description: PAN domain
  misc_feature (1)..(245): Homolog of NCBI NO: 81671 NR Description: S-locus-specific glycoprotein NS1 precursor -
  misc_feature (1)..(245): Homolog of NCBI NO: 5688937 NR Description: glycoprotein [Brassica rapa]
  misc_feature (1)..(245): Homolog of NCBI NO: 484112 NR Description: S-locus related protein
  misc_feature (1)..(245): Homolog of NCBI NO: 21321208 NR Description: S-locus-related I [Brassica amplexicaulis]
  misc_feature (1)..(245): Homolog of NCBI NO: 3426188 NR Description: NS3-glycoprotein [Brassica rapa]
  misc_feature (1)..(244): Homolog of NCBI NO: 27545459 NR Description: S-related kinase 9 [Arabidopsis lyrata]
  misc_feature (1)..(244): Homolog of NCBI NO: 21321240 NR Description: S-locus-related I [Lunaria annua]
  misc_feature (1)..(245): Homolog of NCBI NO: 3327858 NR Description: SLR1 [Erysimum cheiri]
  misc_feature (1)..(267): Homolog of NCBI NO: 99660 NR Description: S-locus-specific glycoprotein SLR1 precursor -
  misc_feature (1)..(267): Homolog of NCBI NO: 15229924 NR Description: S-locus related protein SLR1 homolog (S1)
MKIGRDLKTGHETFLSSWRSPYDPSSGDFSFKLGTQGLPEFYLFKKEFLLYRSGPWNGVGFSGIPTMQNWSYFDVVNNFIENRGEVAYSFKVTDHSMHYVRFTLTTERLLQISRWDTTSSEWNLFGVLPTEKCDLYQICGRDSYCDTKTSPTCNCIKGFVPKNVTAWALGDTFEGCVRKSRLNCHRDGFFLLMKRMKLPGTSTAIVDKTIGLNECKERCSKDCNCTGFANKDIQNGGSGCVIWTGGAHGYEELRRRRSRSICQNRPL

SEQ ID NO: 47285 - DNA, 1669 bp, Arabidopsis thaliana
  misc_feature (1)..(1669): Ceres Seq. ID no. 13588613
  misc_feature: MA Experiment ID: 20000179 Result: Up-regulated in Transcription
  misc_feature: MA Experiment 20000179 PARAMETER Experiment Name: At_Germinating_Seeds_P Parameter: Age (hr) Value: 6 vs. 0
  misc_feature: MA Experiment 20000179 PARAMETER Experiment Name: At_Germinating_Seeds_P Parameter: Tissue Value: Germinating Seeds
  misc_feature: MA Experiment ID: 20000185 Result: Down-regulated in Transcription
  misc_feature: MA Experiment 20000185 PARAMETER Experiment Name: At_Roots__P Parameter: Age (day) Value: 7 vs. 21
  misc_feature: MA Experiment 20000185 PARAMETER Experiment Name: At_Roots__P Parameter: Organism Value: A. thaliana
  misc_feature: MA Experiment 20000185 PARAMETER Experiment Name: At_Roots__P Parameter: Tissue Value: Roots vs. Whole Plant
  misc_feature: MA Experiment ID: 20000439 Result: Down-regulated in Transcription
  misc_feature: MA Experiment 20000439 PARAMETER Experiment Name: At_Roots__P Parameter: Age (day) Value: 14 vs. 21
  misc_feature: MA Experiment 20000439 PARAMETER Experiment Name: At_Roots__P Parameter: Organism Value: A. thaliana
  misc_feature: MA Experiment 20000439 PARAMETER Experiment Name: At_Roots__P Parameter: Tissue Value: Roots vs. Whole Plant
  misc_feature: MA Experiment ID: 20001247 Result: Up-regulated in Transcription
  misc_feature: MA Experiment 20001247 PARAMETER Experiment Name: At_Far-red-induction_P Parameter: Age (day) Value: 7
  misc_feature: MA Experiment 20001247 PARAMETER Experiment Name: At_Far-red-induction_P Parameter: Light Value: Far-red vs. White
  misc_feature: MA Experiment 20001247 PARAMETER Experiment Name: At_Far-red-induction_P Parameter: Organism Value: A. thaliana
  misc_feature: MA Experiment 20001247 PARAMETER Experiment Name: At_Far-red-induction_P Parameter: Plant Line Value: Columbia
  misc_feature: MA Experiment 20001247 PARAMETER Experiment Name: At_Far-red-induction_P Parameter: Timepoint (hr) Value: 1
  misc_feature: MA Experiment 20001247 PARAMETER Experiment Name: At_Far-red-induction_P Parameter: Tissue Value: Whole Plant
  misc_feature: MA Experiment ID: 20001905 Result: Down-regulated in Transcription
  misc_feature: MA Experiment 20001905 PARAMETER Experiment Name: At_Drought_Reproduction_P Parameter: Age (day) Value: 40
  misc_feature: MA Experiment 20001905 PARAMETER Experiment Name: At_Drought_Reproduction_P Parameter: Organism Value: A. thaliana
  misc_feature: MA Experiment 20001905 PARAMETER Experiment Name: At_Drought_Reproduction_P Parameter: Plant Line Value: WS
  misc_feature: MA Experiment 20001905 PARAMETER Experiment Name: At_Drought_Reproduction_P Parameter: Timepoint (day) Value: 10
  misc_feature: MA Experiment 20001905 PARAMETER Experiment Name: At_Drought_Reproduction_P Parameter: Tissue Value: Rosettes
  misc_feature: MA Experiment 20001905 PARAMETER Experiment Name: At_Drought_Reproduction_P Parameter: Treatment Value: Drought vs. No Drought
gaagaaagaaagagagagaaccctagaaaacttttttttttcttcaccattgttgattgatggatgagaaagcttattcacacttcatttctttgcttttggtgagagaatgaaacagagaagaagagatgaagaaaactaaagttctttccttttctcttttggatctaatttcatcttgagattttctcatagcttgatactaaagctacataaaaaaacaattaggggaaatgaaagtttgtgtgttttgataagttttcagagattttcggttgcatgttgttatcttgctcttgaagtctatcgaacccttttagattctgattttgttctcttcttatccctcctcctataagttagccatttagggtccccatcgaattttactaagttaaagtcagagtctttttggttaagctatggatcgaagagacgcaatggcgttatccgggtcgggttcttactatatccaaagaggaatccccggttctggtcctcctcctcctcaaactcaaccaacgtttcacggatcacaaggatttcatcatttcaccaattccatctctccttttgggtcaaacccaaacccaaatccaaaccctggaggtgtctctactggattcgtgtctcctcctttacccgttgactcttctccggctgattcgtcagcggcggcggcgggagctttggttgctcctccttcaggtgacacgtctgtgaagcggaagagaggacggcctagaaaatatggacaagatggtggttctgtttcgttggcattgtctccttctatctccaacgtttccccgaactctaacaaacgtggccgtggaagacctcctggctccggcaagaagcaacggctatcttccattggtgaaatgatgccttcatcaactgggatgagcttcacaccgcatgtaatcgtagtttccattggtgaagacattgcttcaaaggttatatcgttctcgcatcaaggtccacgagcgatatgtgtcttatccgcaagtggtgctgtctctactgcaactcttcttcagccagcaccttctcatggaactattatatacgagggtctattcgagctcatatctctctcaacttcttatctgaacacaactgacaatgactacccaaaccgcactggaagtctagcggtctcacttgctagccccgatggtcgtgtcattggtggtggaattggaggtcctctaatagcagcaagccaagtccaggtcattgttggcagcttcatttgggcaattccgaaagggaagattaaaaaacgtgaagaaacttctgaagatgtccaagatactgatgctttggaaaacaacaacgataacacagcagcaacgtcacctcctgttcctcagcaaagtcagaacattgttcagactcctgtaggcatttggtcaactggttcaaggtcaatggatatgcatcacccccatatggacattgatctaatgcgtggatgattcatgtatatataagcattgaatctaggagaagaagaagaaacttgagctaacctccctgaaacaaagtagtctattggtattgtttaggaaagaaaaagacaattagtaagtttaggaatttctgcgtgttttcgagctttcagttagttgatttggtctcttgacttgttatgaatggg

SEQ ID NO: 47286 - protein, 354 aa, Arabidopsis thaliana
  peptide (1)..(354): Ceres Seq. ID no. 13588614
  misc_feature (1)..(316): Homolog of NCBI NO: 6633838 NR Description: F2K11.15 [Arabidopsis thaliana]
  misc_feature (15)..(354): Homolog of NCBI NO: 6633838 NR Description: F2K11.15 [Arabidopsis thaliana]
  misc_feature (7)..(354): Homolog of NCBI NO: 17979309 NR Description: putative DNA-binding protein [Arabidopsis
  misc_feature (1)..(354): Homolog of NCBI NO: 22330402 NR Description: DNA-binding protein -related [Arabidopsis
  misc_feature (1)..(354): Homolog of NCBI NO: 30696854 NR Description: DNA-binding protein -related [Arabidopsis
  misc_feature (1)..(342): Homolog of NCBI NO: 2213534 NR Description: DNA-binding PD1-like protein [Pisum sativum]
  misc_feature (1)..(354): Homolog of NCBI NO: 7488825 NR Description: probable DNA-binding protein - garden pea
  misc_feature (1)..(354): Homolog of NCBI NO: 15225902 NR Description: AT-hook DNA-binding protein -related [Arabidopsis
  misc_feature (7)..(354): Homolog of NCBI NO: 11281387 NR Description: probable DNA-binding protein - Arabidopsis
  misc_feature (1)..(354): Homolog of NCBI NO: 30695388 NR Description: DNA-binding protein -related [Arabidopsis
MDRRDAMALSGSGSYYIQRGIPGSGPPPPQTQPTFHGSQGFHHFTNSISPFGSNPNPNPNPGGVSTGFVSPPLPVDSSPADSSAAAAGALVAPPSGDTSVKRKRGRPRKYGQDGGSVSLALSPSISNVSPNSNKRGRGRPPGSGKKQRLSSIGEMMPSSTGMSFTPHVIVVSIGEDIASKVISFSHQGPRAICVLSASGAVSTATLLQPAPSHGTIIYEGLFELISLSTSYLNTTDNDYPNRTGSLAVSLASPDGRVIGGGIGGPLIAASQVQVIVGSFIWAIPKGKIKKREETSEDVQDTDALENNNDNTAATSPPVPQQSQNIVQTPVGIWSTGSRSMDMHHPHMDIDLMRG

SEQ ID NO: 47287 - protein, 348 aa, Arabidopsis thaliana
  peptide (1)..(348): Ceres Seq. ID no. 13588615
  misc_feature (1)..(310): Homolog of NCBI NO: 6633838 NR Description: F2K11.15 [Arabidopsis thaliana]
  misc_feature (9)..(348): Homolog of NCBI NO: 6633838 NR Description: F2K11.15 [Arabidopsis thaliana]
  misc_feature (1)..(348): Homolog of NCBI NO: 17979309 NR Description: putative DNA-binding protein [Arabidopsis
  misc_feature (1)..(348): Homolog of NCBI NO: 22330402 NR Description: DNA-binding protein -related [Arabidopsis
  misc_feature (1)..(348): Homolog of NCBI NO: 30696854 NR Description: DNA-binding protein -related [Arabidopsis
  misc_feature (1)..(336): Homolog of NCBI NO: 2213534 NR Description: DNA-binding PD1-like protein [Pisum sativum]
  misc_feature (1)..(348): Homolog of NCBI NO: 7488825 NR Description: probable DNA-binding protein - garden pea
  misc_feature (1)..(348): Homolog of NCBI NO: 15225902 NR Description: AT-hook DNA-binding protein -related [Arabidopsis
  misc_feature (1)..(348): Homolog of NCBI NO: 11281387 NR Description: probable DNA-binding protein - Arabidopsis
  misc_feature (1)..(348): Homolog of NCBI NO: 30695388 NR Description: DNA-binding protein -related [Arabidopsis
MALSGSGSYYIQRGIPGSGPPPPQTQPTFHGSQGFHHFTNSISPFGSNPNPNPNPGGVSTGFVSPPLPVDSSPADSSAAAAGALVAPPSGDTSVKRKRGRPRKYGQDGGSVSLALSPSISNVSPNSNKRGRGRPPGSGKKQRLSSIGEMMPSSTGMSFTPHVIVVSIGEDIASKVISFSHQGPRAICVLSASGAVSTATLLQPAPSHGTIIYEGLFELISLSTSYLNTTDNDYPNRTGSLAVSLASPDGRVIGGGIGGPLIAASQVQVIVGSFIWAIPKGKIKKREETSEDVQDTDALENNNDNTAATSPPVPQQSQNIVQTPVGIWSTGSRSMDMHHPHMDIDLMRG

SEQ ID NO: 47288 - protein, 200 aa, Arabidopsis thaliana
  peptide (1)..(200): Ceres Seq. ID no. 13588616
  misc_feature (1)..(162): Homolog of NCBI NO: 6633838 NR Description: F2K11.15 [Arabidopsis thaliana]
  misc_feature (1)..(200): Homolog of NCBI NO: 6633838 NR Description: F2K11.15 [Arabidopsis thaliana]
  misc_feature (1)..(200): Homolog of NCBI NO: 17979309 NR Description: putative DNA-binding protein [Arabidopsis
  misc_feature (1)..(200): Homolog of NCBI NO: 22330402 NR Description: DNA-binding protein -related [Arabidopsis
  misc_feature (1)..(200): Homolog of NCBI NO: 30696854 NR Description: DNA-binding protein -related [Arabidopsis
  misc_feature (1)..(188): Homolog of NCBI NO: 2213534 NR Description: DNA-binding PD1-like protein [Pisum sativum]
  misc_feature (1)..(200): Homolog of NCBI NO: 7488825 NR Description: probable DNA-binding protein - garden pea
  misc_feature (1)..(200): Homolog of NCBI NO: 15225902 NR Description: AT-hook DNA-binding protein -related [Arabidopsis
  misc_feature (1)..(200): Homolog of NCBI NO: 11281387 NR Description: probable DNA-binding protein - Arabidopsis
  misc_feature (1)..(200): Homolog of NCBI NO: 30695388 NR Description: DNA-binding protein -related [Arabidopsis
MMPSSTGMSFTPHVIVVSIGEDIASKVISFSHQGPRAICVLSASGAVSTATLLQPAPSHGTIIYEGLFELISLSTSYLNTTDNDYPNRTGSLAVSLASPDGRVIGGGIGGPLIAASQVQVIVGSFIWAIPKGKIKKREETSEDVQDTDALENNNDNTAATSPPVPQQSQNIVQTPVGIWSTGSRSMDMHHPHMDIDLMRG

SEQ ID NO: 47289 - DNA, 1074 bp, Arabidopsis thaliana
  misc_feature (1)..(1074): Ceres Seq. ID no. 13648295
  misc_feature: MA Experiment ID: 20000179 Result: Up-regulated in Transcription
  misc_feature: MA Experiment 20000179 PARAMETER Experiment Name: At_Germinating_Seeds_P Parameter: Age (hr) Value: 6 vs. 0
  misc_feature: MA Experiment 20000179 PARAMETER Experiment Name: At_Germinating_Seeds_P Parameter: Tissue Value: Germinating Seeds
agagagagagagagagagctcactagtcccccccccccccgatctacgtctctgtctctctccaatctctctgcgccacagaattctgcgatttacgaaaatctctgaaacctccgatcgttaacggcgaccgccgattttcccggtaaaaatgaacgacggagatgtatcgaggcagatccagcagatggtgagatttatccgccaagaagcggaagagaaagcaaacgagatctcggtttctgctgaagaagaattcaacattgagaaactccagcttgttgaggcggagaagaagaagatcaggcaagattatgagaagaaggagaagcaagctgatgttcgcaagaagattgattactctatgcagctaaatgcatcaaggatcaaagttcttcaagcgcaggacgatattgtcaatgccatgaaagaccaagcagctaaggatcttctgaacgttagtcgcgatgagtatgcctacaaacagctcctcaaggatctaattgttcagtgtttgcttcggttgaaagaaccttctgtgttgttgcgttgtcgtgaagaggacttgggtttagtcgaagctgtacttgatgacgcaaaggaggaatatgctggtaaagcaaaggttcatgccccagaggttgctgttgacacaaaaatattccttccccctcctcctaaatctaatgatcctcatggtctccactgctctggaggtgttgtgttagcttctcgtgatgggaaaatcgtgtgcgagaacacacttgatgcgcgtcttgatgtggcattccgtatgaaactcccagtgatccgtaagtcgttgttcggccaagttactgcctgatgaaagaaaggaaaagaggaaagagatgattcaaaccggtttgcgtttggttatttacctattttgggagagatttctctttgttgtgattctttgtattttgcaaaatcttacttttgtgccaaacccatcgaacgcttctttttttcgaattcctttttttcattcctcctcgaatgtgtgttatcatggctatacaaataaataaaatgaaagacttcttttcttwc

SEQ ID NO: 47290 - protein, 230 aa, Arabidopsis thaliana
  peptide (1)..(230): Ceres Seq. ID no. 15219535
  misc_feature (16)..(225): Pfam Name: ATP synthase (E/31 kDa) subunit Pfam Description: ATP synthase (E/31 kDa) subunit
  misc_feature (7)..(230): Homolog of NCBI NO: 29290712 NR Description: vacuolar ATPase subunit E [Phaseolus acutifolius]
  misc_feature (1)..(230): Homolog of NCBI NO: 12585474 NR Description: Vacuolar ATP synthase subunit E (V-ATPase E
  misc_feature (1)..(230): Homolog of NCBI NO: 3334405 NR Description: Vacuolar ATP synthase subunit E (V-ATPase E
  misc_feature (1)..(230): Homolog of NCBI NO: 34912000 NR Description: putative YLP [Oryza sativa (japonica
  misc_feature (1)..(230): Homolog of NCBI NO: 12585492 NR Description: Vacuolar ATP synthase subunit E (V-ATPase E
  misc_feature (1)..(218): Homolog of NCBI NO: 25528534 NR Description: protein F22C12.4 [imported] - Arabidopsis
  misc_feature (1)..(230): Homolog of NCBI NO: 15222641 NR Description: H+-transporting ATPase protein -related
  misc_feature (1)..(230): Homolog of NCBI NO: 20340245 NR Description: vacuolar ATPase subunit E-like protein
  misc_feature (1)..(230): Homolog of NCBI NO: 1143394 NR Description: V-type proton-ATPase [Arabidopsis thaliana]
  misc_feature (1)..(230): Homolog of NCBI NO: 15237054 NR Description: H+-transporting ATPase chain E, vacuolar
MNDGDVSRQIQQMVRFIRQEAEEKANEISVSAEEEFNIEKLQLVEAEKKKIRQDYEKKEKQADVRKKIDYSMQLNASRIKVLQAQDDIVNAMKDQAAKDLLNVSRDEYAYKQLLKDLIVQCLLRLKEPSVLLRCREEDLGLVEAVLDDAKEEYAGKAKVHAPEVAVDTKIFLPPPPKSNDPHGLHCSGGVVLASRDGKIVCENTLDARLDVAFRMKLPVIRKSLFGQVTA

SEQ ID NO: 47291 - protein, 218 aa, Arabidopsis thaliana
  peptide (1)..(218): Ceres Seq. ID no. 15219536
  misc_feature (4)..(213): Pfam Name: ATP synthase (E/31 kDa) subunit Pfam Description: ATP synthase (E/31 kDa) subunit
  misc_feature (1)..(218): Homolog of NCBI NO: 29290712 NR Description: vacuolar ATPase subunit E [Phaseolus acutifolius]
  misc_feature (1)..(218): Homolog of NCBI NO: 12585474 NR Description: Vacuolar ATP synthase subunit E (V-ATPase E
  misc_feature (1)..(218): Homolog of NCBI NO: 3334405 NR Description: Vacuolar ATP synthase subunit E (V-ATPase E
  misc_feature (1)..(218): Homolog of NCBI NO: 34912000 NR Description: putative YLP [Oryza sativa (japonica
  misc_feature (1)..(218): Homolog of NCBI NO: 12585492 NR Description: Vacuolar ATP synthase subunit E (V-ATPase E
  misc_feature (1)..(206): Homolog of NCBI NO: 25528534 NR Description: protein F22C12.4 [imported] - Arabidopsis
  misc_feature (1)..(218): Homolog of NCBI NO: 15222641 NR Description: H+-transporting ATPase protein -related
  misc_feature (1)..(218): Homolog of NCBI NO: 20340245 NR Description: vacuolar ATPase subunit E-like protein
  misc_feature (1)..(218): Homolog of NCBI NO: 1143394 NR Description: V-type proton-ATPase [Arabidopsis thaliana]
  misc_feature (1)..(218): Homolog of NCBI NO: 15237054 NR Description: H+-transporting ATPase chain E, vacuolar
MVRFIRQEAEEKANEISVSAEEEFNIEKLQLVEAEKKKIRQDYEKKEKQADVRKKIDYSMQLNASRIKVLQAQDDIVNAMKDQAAKDLLNVSRDEYAYKQLLKDLIVQCLLRLKEPSVLLRCREEDLGLVEAVLDDAKEEYAGKAKVHAPEVAVDTKIFLPPPPKSNDPHGLHCSGGVVLASRDGKIVCENTLDARLDVAFRMKLPVIRKSLFGQVTA

SEQ ID NO: 47292 - protein, 159 aa, Arabidopsis thaliana
  peptide (1)..(159): Ceres Seq. ID no. 15219537
  misc_feature (1)..(154): Pfam Name: ATP synthase (E/31 kDa) subunit Pfam Description: ATP synthase (E/31 kDa) subunit
  misc_feature (1)..(159): Homolog of NCBI NO: 29290712 NR Description: vacuolar ATPase subunit E [Phaseolus acutifolius]
  misc_feature (1)..(159): Homolog of NCBI NO: 12585474 NR Description: Vacuolar ATP synthase subunit E (V-ATPase E
  misc_feature (1)..(159): Homolog of NCBI NO: 3334405 NR Description: Vacuolar ATP synthase subunit E (V-ATPase E
  misc_feature (1)..(159): Homolog of NCBI NO: 34912000 NR Description: putative YLP [Oryza sativa (japonica
  misc_feature (1)..(159): Homolog of NCBI NO: 12585492 NR Description: Vacuolar ATP synthase subunit E (V-ATPase E
  misc_feature (1)..(147): Homolog of NCBI NO: 25528534 NR Description: protein F22C12.4 [imported] - Arabidopsis
  misc_feature (1)..(159): Homolog of NCBI NO: 15222641 NR Description: H+-transporting ATPase protein -related
  misc_feature (1)..(159): Homolog of NCBI NO: 20340245 NR Description: vacuolar ATPase subunit E-like protein
  misc_feature (1)..(159): Homolog of NCBI NO: 1143394 NR Description: V-type proton-ATPase [Arabidopsis thaliana]
  misc_feature (1)..(159): Homolog of NCBI NO: 15237054 NR Description: H+-transporting ATPase chain E, vacuolar
MQLNASRIKVLQAQDDIVNAMKDQAAKDLLNVSRDEYAYKQLLKDLIVQCLLRLKEPSVLLRCREEDLGLVEAVLDDAKEEYAGKAKVHAPEVAVDTKIFLPPPPKSNDPHGLHCSGGVVLASRDGKIVCENTLDARLDVAFRMKLPVIRKSLFGQVTA

SEQ ID NO: 47293 - DNA, 714 bp, Arabidopsis thaliana
  misc_feature (1)..(714): Ceres Seq. ID no. 13588298
  misc_feature: MA Experiment ID: 20000264 Result: Up-regulated in Transcription
  misc_feature: MA Experiment 20000264 PARAMETER Experiment Name: At_Open_Flower_P Parameter: Age (day) Value: 21
  misc_feature: MA Experiment 20000264 PARAMETER Experiment Name: At_Open_Flower_P Parameter: Plant Line Value: WS
  misc_feature: MA Experiment 20000264 PARAMETER Experiment Name: At_Open_Flower_P Parameter: Tissue Value: Open Flower vs. Whole Plant
  misc_feature: MA Experiment ID: 20000436 Result: Up-regulated in Transcription
  misc_feature: MA Experiment 20000436 PARAMETER Experiment Name: At_Drought_P Parameter: Age (day) Value: 7
  misc_feature: MA Experiment 20000436 PARAMETER Experiment Name: At_Drought_P Parameter: Organism Value: A. thaliana
  misc_feature: MA Experiment 20000436 PARAMETER Experiment Name: At_Drought_P Parameter: Plant Line Value: WS
  misc_feature: MA Experiment 20000436 PARAMETER Experiment Name: At_Drought_P Parameter: Timepoint (hr) Value: 12
  misc_feature: MA Experiment 20000436 PARAMETER Experiment Name: At_Drought_P Parameter: Tissue Value: Whole Plant
  misc_feature: MA Experiment 20000436 PARAMETER Experiment Name: At_Drought_P Parameter: Treatment Value: Drought vs. No Drought
  misc_feature: MA Experiment ID: 20000437 Result: Up-regulated in Transcription
  misc_feature: MA Experiment 20000437 PARAMETER Experiment Name: At_Drought_P Parameter: Age (day) Value: 8
  misc_feature: MA Experiment 20000437 PARAMETER Experiment Name: At_Drought_P Parameter: Organism Value: A. thaliana
  misc_feature: MA Experiment 20000437 PARAMETER Experiment Name: At_Drought_P Parameter: Plant Line Value: WS
  misc_feature: MA Experiment 20000437 PARAMETER Experiment Name: At_Drought_P Parameter: Timepoint (hr) Value: 24
  misc_feature: MA Experiment 20000437 PARAMETER Experiment Name: At_Drought_P Parameter: Tissue Value: Whole Plant
  misc_feature: MA Experiment 20000437 PARAMETER Experiment Name: At_Drought_P Parameter: Treatment Value: Drought vs. No Drought
  misc_feature: MA Experiment ID: 20000438 Result: Down-regulated in Transcription
  misc_feature: MA Experiment 20000438 PARAMETER Experiment Name: At_Shoots__P Parameter: Age (day) Value: 14
  misc_feature: MA Experiment 20000438 PARAMETER Experiment Name: At_Shoots__P Parameter: Tissue Value: Shoots vs. Whole Plant
  misc_feature: MA Experiment ID: 20000451 Result: Up-regulated in Transcription
  misc_feature: MA Experiment 20000451 PARAMETER Experiment Name: At_CS6879_Shoots-Roots_P Parameter: Age (day) Value: 14
  misc_feature: MA Experiment 20000451 PARAMETER Experiment Name: At_CS6879_Shoots-Roots_P Parameter: Organism Value: A. thaliana
  misc_feature: MA Experiment 20000451 PARAMETER Experiment Name: At_CS6879_Shoots-Roots_P Parameter: Plant Line Value: CS6879 vs. WS
  misc_feature: MA Experiment 20000451 PARAMETER Experiment Name: At_CS6879_Shoots-Roots_P Parameter: Tissue Value: Roots
  misc_feature: MA Experiment ID: 20001554 Result: Up-regulated in Transcription
  misc_feature: MA Experiment 20001554 PARAMETER Experiment Name: At_Drought_Soil_Dry_P Parameter: Age (day) Value: 21
  misc_feature: MA Experiment 20001554 PARAMETER Experiment Name: At_Drought_Soil_Dry_P Parameter: Organism Value: A. thaliana
  misc_feature: MA Experiment 20001554 PARAMETER Experiment Name: At_Drought_Soil_Dry_P Parameter: Plant Line Value: WS
  misc_feature: MA Experiment 20001554 PARAMETER Experiment Name: At_Drought_Soil_Dry_P Parameter: Post Timepoint (hr) Value: None
  misc_feature: MA Experiment 20001554 PARAMETER Experiment Name: At_Drought_Soil_Dry_P Parameter: Post-Treatment Value: None
  misc_feature: MA Experiment 20001554 PARAMETER Experiment Name: At_Drought_Soil_Dry_P Parameter: Timepoint (day) Value: 7
  misc_feature: MA Experiment 20001554 PARAMETER Experiment Name: At_Drought_Soil_Dry_P Parameter: Treatment Value: Drought vs. No Drought
  misc_feature: MA Experiment ID: 20001906 Result: Up-regulated in Transcription
  misc_feature: MA Experiment 20001906 PARAMETER Experiment Name: At_Drought_Reproduction_P Parameter: Age (day) Value: 35
  misc_feature: MA Experiment 20001906 PARAMETER Experiment Name: At_Drought_Reproduction_P Parameter: Organism Value: A. thaliana
  misc_feature: MA Experiment 20001906 PARAMETER Experiment Name: At_Drought_Reproduction_P Parameter: Plant Line Value: WS
  misc_feature: MA Experiment 20001906 PARAMETER Experiment Name: At_Drought_Reproduction_P Parameter: Timepoint (day) Value: 5
  misc_feature: MA Experiment 20001906 PARAMETER Experiment Name: At_Drought_Reproduction_P Parameter: Tissue Value: Siliques
  misc_feature: MA Experiment 20001906 PARAMETER Experiment Name: At_Drought_Reproduction_P Parameter: Treatment Value: Drought vs. No Drought
  misc_feature: MA Experiment ID: 20001907 Result: Up-regulated in Transcription
  misc_feature: MA Experiment 20001907 PARAMETER Experiment Name: At_Drought_Reproduction_P Parameter: Age (day) Value: 37
  misc_feature: MA Experiment 20001907 PARAMETER Experiment Name: At_Drought_Reproduction_P Parameter: Organism Value: A. thaliana
  misc_feature: MA Experiment 20001907 PARAMETER Experiment Name: At_Drought_Reproduction_P Parameter: Plant Line Value: WS
  misc_feature: MA Experiment 20001907 PARAMETER Experiment Name: At_Drought_Reproduction_P Parameter: Timepoint (day) Value: 7
  misc_feature: MA Experiment 20001907 PARAMETER Experiment Name: At_Drought_Reproduction_P Parameter: Tissue Value: Siliques
  misc_feature: MA Experiment 20001907 PARAMETER Experiment Name: At_Drought_Reproduction_P Parameter: Treatment Value: Drought vs. No Drought
  misc_feature: MA Experiment ID: 20001909 Result: Up-regulated in Transcription
  misc_feature: MA Experiment 20001909 PARAMETER Experiment Name: At_Drought_Reproduction_P Parameter: Age (day) Value: 35
  misc_feature: MA Experiment 20001909 PARAMETER Experiment Name: At_Drought_Reproduction_P Parameter: Organism Value: A. thaliana
  misc_feature: MA Experiment 20001909 PARAMETER Experiment Name: At_Drought_Reproduction_P Parameter: Plant Line Value: WS
  misc_feature: MA Experiment 20001909 PARAMETER Experiment Name: At_Drought_Reproduction_P Parameter: Timepoint (day) Value: 5
  misc_feature: MA Experiment 20001909 PARAMETER Experiment Name: At_Drought_Reproduction_P Parameter: Tissue Value: Flowers
  misc_feature: MA Experiment 20001909 PARAMETER Experiment Name: At_Drought_Reproduction_P Parameter: Treatment Value: Drought vs. No Drought
  misc_feature: MA Experiment ID: 20001910 Result: Up-regulated in Transcription
  misc_feature: MA Experiment 20001910 PARAMETER Experiment Name: At_Drought_Reproduction_P Parameter: Age (day) Value: 37
  misc_feature: MA Experiment 20001910 PARAMETER Experiment Name: At_Drought_Reproduction_P Parameter: Organism Value: A. thaliana
  misc_feature: MA Experiment 20001910 PARAMETER Experiment Name: At_Drought_Reproduction_P Parameter: Plant Line Value: WS
  misc_feature: MA Experiment 20001910 PARAMETER Experiment Name: At_Drought_Reproduction_P Parameter: Timepoint (day) Value: 7
  misc_feature: MA Experiment 20001910 PARAMETER Experiment Name: At_Drought_Reproduction_P Parameter: Tissue Value: Flowers
  misc_feature: MA Experiment 20001910 PARAMETER Experiment Name: At_Drought_Reproduction_P Parameter: Treatment Value: Drought vs. No Drought
  misc_feature: MA Experiment ID: 20001911 Result: Up-regulated in Transcription
  misc_feature: MA Experiment 20001911 PARAMETER Experiment Name: At_Drought_Reproduction_P Parameter: Age (day) Value: 40
  misc_feature: MA Experiment 20001911 PARAMETER Experiment Name: At_Drought_Reproduction_P Parameter: Organism Value: A. thaliana
  misc_feature: MA Experiment 20001911 PARAMETER Experiment Name: At_Drought_Reproduction_P Parameter: Plant Line Value: WS
  misc_feature: MA Experiment 20001911 PARAMETER Experiment Name: At_Drought_Reproduction_P Parameter: Timepoint (day) Value: 10
  misc_feature: MA Experiment 20001911 PARAMETER Experiment Name: At_Drought_Reproduction_P Parameter: Tissue Value: Flowers
  misc_feature: MA Experiment 20001911 PARAMETER Experiment Name: At_Drought_Reproduction_P Parameter: Treatment Value: Drought vs. No Drought
aacacttctcacatttcataaaaagtgagacaaattaaagacagagagagatccaagaacatgaactacacggtggatgatcagaacatggcttttatctctcaactgtaccctgatgtctacactcagatagtacaaccagtaggagaagtgaagcagccgaagcggaggaggaagaagaccaaaggatccgtggcttccgcagatggaggcaacggtttgtttagaaagaggaagctgaccgatgaacaagtgaacatgttggagatgagttttggggatgaacacaaacttgagtcggagaggaaagatagacttgcggcagagctagggcttgaccctcgtcaagttgccgtttggtttcagaaccgtcgcgcacggtggaagaacaaaaggctcgaggaagagtacaataaactcaagaactcacatgataacgtcgttgtcgacaagtgccgacttgaatctgaggttattcagctcaaagaacaactctatgatgcagagagggaaatccaaagattagcagaaagagtagaaggaggctcaagcaacagtccaatttcgtcttccgtttccgtcgaagctaatgaaacgccattttttggagactataaagtcggagatgatggcgatgactatgatcacttgttttatccggtgccggaaaatagttacatcgatgaagcggaatggatgagtctatacatataa

SEQ ID NO: 47294 - protein, 217 aa, Arabidopsis thaliana
  peptide (1)..(217): Ceres Seq. ID no. 13588299
  misc_feature (57)..(110): Pfam Name: Homeobox domain Pfam Description: Homeobox domain
  misc_feature (56)..(145): Homolog of NCBI NO: 15232122 NR Description: homeobox-leucine zipper protein HAT5 (HD-ZIP
  misc_feature (56)..(152): Homolog of NCBI NO: 15148920 NR Description: homeodomain leucine zipper protein HDZ3
  misc_feature (56)..(180): Homolog of NCBI NO: 18034441 NR Description: homeodomain leucine zipper protein CPHB-5
  misc_feature (32)..(173): Homolog of NCBI NO: 3868841 NR Description: CRHB7 [Ceratopteris richardii]
  misc_feature (56)..(180): Homolog of NCBI NO: 7446256 NR Description: homeotic protein VAHOX1 - tomato
  misc_feature (100)..(213): Homolog of NCBI NO: 11231049 NR Description: homeobox-leucine zipper protein [Zinnia elegans]
  misc_feature (8)..(216): Homolog of NCBI NO: 33146844 NR Description: homeodomain protein-like [Oryza sativa (japonica
  misc_feature (5)..(217): Homolog of NCBI NO: 15240052 NR Description: homeodomain protein [Arabidopsis thaliana]
  misc_feature (2)..(217): Homolog of NCBI NO: 15224190 NR Description: homeodomain protein [Arabidopsis thaliana]
  misc_feature (1)..(217): Homolog of NCBI NO: 15234508 NR Description: homeodomain protein [Arabidopsis thaliana]
MNYTVDDQNMAFISQLYPDVYTQIVQPVGEVKQPKRRRKKTKGSVASADGGNGLFRKRKLTDEQVNMLEMSFGDEHKLESERKDRLAAELGLDPRQVAVWFQNRRARWKNKRLEEEYNKLKNSHDNVVVDKCRLESEVIQLKEQLYDAEREIQRLAERVEGGSSNSPISSSVSVEANETPFFGDYKVGDDGDDYDHLFYPVPENSYIDEAEWMSLYI

SEQ ID NO: 47295 - protein, 208 aa, Arabidopsis thaliana
  peptide (1)..(208): Ceres Seq. ID no. 13588300
  misc_feature (48)..(101): Pfam Name: Homeobox domain Pfam Description: Homeobox domain
  misc_feature (47)..(136): Homolog of NCBI NO: 15232122 NR Description: homeobox-leucine zipper protein HAT5 (HD-ZIP
  misc_feature (47)..(143): Homolog of NCBI NO: 15148920 NR Description: homeodomain leucine zipper protein HDZ3
  misc_feature (47)..(171): Homolog of NCBI NO: 18034441 NR Description: homeodomain leucine zipper protein CPHB-5
  misc_feature (23)..(164): Homolog of NCBI NO: 3868841 NR Description: CRHB7 [Ceratopteris richardii]
  misc_feature (47)..(171): Homolog of NCBI NO: 7446256 NR Description: homeotic protein VAHOX1 - tomato
  misc_feature (91)..(204): Homolog of NCBI NO: 11231049 NR Description: homeobox-leucine zipper protein [Zinnia elegans]
  misc_feature (1)..(207): Homolog of NCBI NO: 33146844 NR Description: homeodomain protein-like [Oryza sativa (japonica
  misc_feature (1)..(208): Homolog of NCBI NO: 15240052 NR Description: homeodomain protein [Arabidopsis thaliana]
  misc_feature (1)..(208): Homolog of NCBI NO: 15224190 NR Description: homeodomain protein [Arabidopsis thaliana]
  misc_feature (1)..(208): Homolog of NCBI NO: 15234508 NR Description: homeodomain protein [Arabidopsis thaliana]
MAFISQLYPDVYTQIVQPVGEVKQPKRRRKKTKGSVASADGGNGLFRKRKLTDEQVNMLEMSFGDEHKLESERKDRLAAELGLDPRQVAVWFQNRRARWKNKRLEEEYNKLKNSHDNVVVDKCRLESEVIQLKEQLYDAEREIQRLAERVEGGSSNSPISSSVSVEANETPFFGDYKVGDDGDDYDHLFYPVPENSYIDEAEWMSLYI

SEQ ID NO: 47296 - protein, 151 aa, Arabidopsis thaliana
  peptide (1)..(151): Ceres Seq. ID no. 13588301
  misc_feature (1)..(44): Pfam Name: Homeobox domain Pfam Description: Homeobox domain
  misc_feature (1)..(79): Homolog of NCBI NO: 15232122 NR Description: homeobox-leucine zipper protein HAT5 (HD-ZIP
  misc_feature (1)..(86): Homolog of NCBI NO: 15148920 NR Description: homeodomain leucine zipper protein HDZ3
  misc_feature (1)..(114): Homolog of NCBI NO: 18034441 NR Description: homeodomain leucine zipper protein CPHB-5
  misc_feature (1)..(107): Homolog of NCBI NO: 3868841 NR Description: CRHB7 [Ceratopteris richardii]
  misc_feature (1)..(114): Homolog of NCBI NO: 7446256 NR Description: homeotic protein VAHOX1 - tomato
  misc_feature (34)..(147): Homolog of NCBI NO: 11231049 NR Description: homeobox-leucine zipper protein [Zinnia elegans]
  misc_feature (1)..(150): Homolog of NCBI NO: 33146844 NR Description: homeodomain protein-like [Oryza sativa (japonica
  misc_feature (1)..(151): Homolog of NCBI NO: 15240052 NR Description: homeodomain protein [Arabidopsis thaliana]
  misc_feature (1)..(151): Homolog of NCBI NO: 15224190 NR Description: homeodomain protein [Arabidopsis thaliana]
  misc_feature (1)..(151): Homolog of NCBI NO: 15234508 NR Description: homeodomain protein [Arabidopsis thaliana]
MLEMSFGDEHKLESERKDRLAAELGLDPRQVAVWFQNRRARWKNKRLEEEYNKLKNSHDNVVVDKCRLESEVIQLKEQLYDAEREIQRLAERVEGGSSNSPISSSVSVEANETPFFGDYKVGDDGDDYDHLFYPVPENSYIDEAEWMSLYI

SEQ ID NO: 47297 - DNA, 1701 bp, Arabidopsis thaliana
  misc_feature (1)..(1701): Ceres Seq. ID no. 13592655
  misc_feature: MA Experiment ID: 20000307 Result: Up-regulated in Transcription
  misc_feature: MA Experiment 20000307 PARAMETER Experiment Name: At_Germinating_Seeds_Sub_P Parameter: Age (hr) Value: 24 vs. 0
  misc_feature: MA Experiment 20000307 PARAMETER Experiment Name: At_Germinating_Seeds_Sub_P Parameter: Organism Value: A. thaliana
  misc_feature: MA Experiment 20000307 PARAMETER Experiment Name: At_Germinating_Seeds_Sub_P Parameter: Plant Line Value: WS
  misc_feature: MA Experiment 20000307 PARAMETER Experiment Name: At_Germinating_Seeds_Sub_P Parameter: Tissue Value: Germinating Seeds
gactctctcgttcaaggtccgactcagttcccggcgagttcgactcggtgattgatttttttctagaaaataaaaattcttcttaacgattgatcgattttggttttctatctttcgattctagatctagaactcaatttgtgaggtttggagatggcgagcgagctgatcaatcggcgacacgagacggatcaaccaaccgccgatgcttattacccgaaaccaatcaaaccatggttcacggtgactcgtccgatgcgttacatgctccgtgaacagagacttatcttcgttctcgttggcattgcaatcgctactttggttttcacaattttccctcgctccacacaatcaaccccttactcggatcctttctccggttacggaatccgacccgacgaatcgtacgttccggctatacaagctcagaggaaacctagcctcgagtacctgaaccggatcggagcaacaggcgggaaaatcccactgggattgaaacgcaaagggctaagagtggttgtgaccggtggtgctggattcgttggatcgcatctcgtggatcgtttgatggctagaggagatactgtgattgttgttgataatttcttcactggaaggaaagagaacgttatgcaccatttcagtaaccctaactttgagatgatccgtcacgatgtggttgagccgattcttcttgaggttgatcagatctaccatttggcttgccctgcttctcctgttcattacaaattcaatcccgtcaagactatcaagacgaatgtggttggaacattgaacatgcttggtttggctaagcgagttggggctagatttcttctgacgagtaccagtgaggtttatggtgatcctctgcagcatcctcaggttgagacttactggggcaacgttaatcccattggtgttcgtagttgctacgatgaaggaaaacgtacggcagagacgttgaccatggactatcaccgaggtgccaatgttgaggtcagaattgctaggatcttcaacacctatggtccaagaatgtgtatagatgatgggcgtgttgttagtaacttcgttgcacaggcactaaggaaagagccattgactgtttacggtgatgggaagcagacaaggagtttccaatttgtttctgatctggttgaaggtttgatgagactgatggaaggagaacatgtcggcccattcaacctcggtaaccctggtgaattcacgatgctcgagctcgctaaggtggtccaagagacaattgatccgaatgcaaacatagagttcagaccaaacacagaagacgaccctcacaagagaaagcctgacatcacaaaggccaaagagcttttaggttgggaaccaaaggtctctcttcgtcagggactgcctctcatggtcaaagatttccgtcaacgtgtctttggtgaccagaaggaaggctcctccgcagctgcaaccaccaccaagacaacttcagcttgagcaaatgcagaatctgagtagcagccactgcggctggtagtgggtttataacaaaattgcaagagcgtcgtttctttaaatttatttcgcttttgatttctgttttgataatcgtgtaaacgtagagtaagaatttggtacctttacttactactattcatggacctcactacagttttaaaagaaaaaagaacttctcttttgataaag

SEQ ID NO: 47298 - protein, 445 aa, Arabidopsis thaliana
  peptide (1)..(445): Ceres Seq. ID no. 13592656
  misc_feature (121)..(425): Pfam Name: NAD dependent epimerase/dehydratase family Pfam Description: NAD dependent epimerase/dehydratase family
  misc_feature (121)..(425): Pfam Name: NAD dependent epimerase/dehydratase family Pfam Description: NAD dependent epimerase/dehydratase family
  misc_feature (77)..(167): Homolog of NCBI NO: 34908082 NR Description: P0506B12.30 [Oryza sativa (japonica
  misc_feature (208)..(428): Homolog of NCBI NO: 34908082 NR Description: P0506B12.30 [Oryza sativa (japonica
  misc_feature (1)..(432): Homolog of NCBI NO: 30693847 NR Description: NAD-dependent epimerase/dehydratase family
  misc_feature (37)..(71): Homolog of NCBI NO: 25396402 NR Description: UDP-glucuronic acid decarboxylase
  misc_feature (77)..(428): Homolog of NCBI NO: 25396402 NR Description: UDP-glucuronic acid decarboxylase
  misc_feature (77)..(167): Homolog of NCBI NO: 34908082 NR Description: P0506B12.30 [Oryza sativa (japonica
  misc_feature (1)..(432): Homolog of NCBI NO: 30693847 NR Description: NAD-dependent epimerase/dehydratase family
  misc_feature (77)..(428): Homolog of NCBI NO: 25396402 NR Description: UDP-glucuronic acid decarboxylase
  misc_feature (1)..(445): Homolog of NCBI NO: 15229334 NR Description: NAD-dependent epimerase/dehydratase family
  misc_feature (1)..(445): Homolog of NCBI NO: 2129578 NR Description: dTDP-glucose 4-6-dehydratase homolog D18 -
  misc_feature (1)..(441): Homolog of NCBI NO: 15227109 NR Description: NAD-dependent epimerase/dehydratase family
  misc_feature (1)..(432): Homolog of NCBI NO: 17473549 NR Description: dTDP-glucose 4-6-dehydratase-like protein
  misc_feature (1)..(432): Homolog of NCBI NO: 11270116 NR Description: dTDP-glucose 4-6-dehydratase-like protein -
  misc_feature (37)..(71): Homolog of NCBI NO: 25396402 NR Description: UDP-glucuronic acid decarboxylase
  misc_feature (208)..(428): Homolog of NCBI NO: 34908082 NR Description: P0506B12.30 [Oryza sativa (japonica
  misc_feature (1)..(432): Homolog of NCBI NO: 11270116 NR Description: dTDP-glucose 4-6-dehydratase-like protein -
  misc_feature (1)..(432): Homolog of NCBI NO: 17473549 NR Description: dTDP-glucose 4-6-dehydratase-like protein
  misc_feature (1)..(441): Homolog of NCBI NO: 15227109 NR Description: NAD-dependent epimerase/dehydratase family
  misc_feature (1)..(445): Homolog of NCBI NO: 2129578 NR Description: dTDP-glucose 4-6-dehydratase homolog D18 -
  misc_feature (1)..(445): Homolog of NCBI NO: 15229334 NR Description: NAD-dependent epimerase/dehydratase family
MASELINRRHETDQPTADAYYPKPIKPWFTVTRPMRYMLREQRLIFVLVGIAIATLVFTIFPRSTQSTPYSDPFSGYGIRPDESYVPAIQAQRKPSLEYLNRIGATGGKIPLGLKRKGLRVVVTGGAGFVGSHLVDRLMARGDTVIVVDNFFTGRKENVMHHFSNPNFEMIRHDVVEPILLEVDQIYHLACPASPVHYKFNPVKTIKTNVVGTLNMLGLAKRVGARFLLTSTSEVYGDPLQHPQVETYWGNVNPIGVRSCYDEGKRTAETLTMDYHRGANVEVRIARIFNTYGPRMCIDDGRVVSNFVAQALRKEPLTVYGDGKQTRSFQFVSDLVEGLMRLMEGEHVGPFNLGNPGEFTMLELAKVVQETIDPNANIEFRPNTEDDPHKRKPDITKAKELLGWEPKVSLRQGLPLMVKDFRQRVFGDQKEGSSAAATTTKTTSA

SEQ ID NO: 47299 - protein, 411 aa, Arabidopsis thaliana
  peptide (1)..(411): Ceres Seq. ID no. 13592657
  misc_feature (87)..(391): Pfam Name: NAD dependent epimerase/dehydratase family Pfam Description: NAD dependent epimerase/dehydratase family
  misc_feature (87)..(391): Pfam Name: NAD dependent epimerase/dehydratase family Pfam Description: NAD dependent epimerase/dehydratase family
  misc_feature (43)..(133): Homolog of NCBI NO: 34908082 NR Description: P0506B12.30 [Oryza sativa (japonica
  misc_feature (174)..(394): Homolog of NCBI NO: 34908082 NR Description: P0506B12.30 [Oryza sativa (japonica
  misc_feature (1)..(398): Homolog of NCBI NO: 30693847 NR Description: NAD-dependent epimerase/dehydratase family
  misc_feature (3)..(37): Homolog of NCBI NO: 25396402 NR Description: UDP-glucuronic acid decarboxylase
  misc_feature (43)..(394): Homolog of NCBI NO: 25396402 NR Description: UDP-glucuronic acid decarboxylase
  misc_feature (43)..(133): Homolog of NCBI NO: 34908082 NR Description: P0506B12.30 [Oryza sativa (japonica
  misc_feature (1)..(398): Homolog of NCBI NO: 30693847 NR Description: NAD-dependent epimerase/dehydratase family
  misc_feature (43)..(394): Homolog of NCBI NO: 25396402 NR Description: UDP-glucuronic acid decarboxylase
  misc_feature (1)..(411): Homolog of NCBI NO: 15229334 NR Description: NAD-dependent epimerase/dehydratase family
  misc_feature (1)..(411): Homolog of NCBI NO: 2129578 NR Description: dTDP-glucose 4-6-dehydratase homolog D18 -
  misc_feature (1)..(407): Homolog of NCBI NO: 15227109 NR Description: NAD-dependent epimerase/dehydratase family
  misc_feature (1)..(398): Homolog of NCBI NO: 17473549 NR Description: dTDP-glucose 4-6-dehydratase-like protein
  misc_feature (1)..(398): Homolog of NCBI NO: 11270116 NR Description: dTDP-glucose 4-6-dehydratase-like protein -
  misc_feature (3)..(37): Homolog of NCBI NO: 25396402 NR Description: UDP-glucuronic acid decarboxylase
  misc_feature (174)..(394): Homolog of NCBI NO: 34908082 NR Description: P0506B12.30 [Oryza sativa (japonica
  misc_feature (1)..(398): Homolog of NCBI NO: 11270116 NR Description: dTDP-glucose 4-6-dehydratase-like protein -
  misc_feature (1)..(398): Homolog of NCBI NO: 17473549 NR Description: dTDP-glucose 4-6-dehydratase-like protein
  misc_feature (1)..(407): Homolog of NCBI NO: 15227109 NR Description: NAD-dependent epimerase/dehydratase family
  misc_feature (1)..(411): Homolog of NCBI NO: 2129578 NR Description: dTDP-glucose 4-6-dehydratase homolog D18 -
  misc_feature (1)..(411): Homolog of NCBI NO: 15229334 NR Description: NAD-dependent epimerase/dehydratase family
MRYMLREQRLIFVLVGIAIATLVFTIFPRSTQSTPYSDPFSGYGIRPDESYVPAIQAQRKPSLEYLNRIGATGGKIPLGLKRKGLRVVVTGGAGFVGSHLVDRLMARGDTVIVVDNFFTGRKENVMHHFSNPNFEMIRHDVVEPILLEVDQIYHLACPASPVHYKFNPVKTIKTNVVGTLNMLGLAKRVGARFLLTSTSEVYGDPLQHPQVETYWGNVNPIGVRSCYDEGKRTAETLTMDYHRGANVEVRIARIFNTYGPRMCIDDGRVVSNFVAQALRKEPLTVYGDGKQTRSFQFVSDLVEGLMRLMEGEHVGPFNLGNPGEFTMLELAKVVQETIDPNANIEFRPNTEDDPHKRKPDITKAKELLGWEPKVSLRQGLPLMVKDFRQRVFGDQKEGSSAAATTTKTTSA

SEQ ID NO: 47300 - protein, 408 aa, Arabidopsis thaliana
  peptide (1)..(408): Ceres Seq. ID no. 13592658
  misc_feature (84)..(388): Pfam Name: NAD dependent epimerase/dehydratase family Pfam Description: NAD dependent epimerase/dehydratase family
  misc_feature (84)..(388): Pfam Name: NAD dependent epimerase/dehydratase family Pfam Description: NAD dependent epimerase/dehydratase family
  misc_feature (40)..(130): Homolog of NCBI NO: 34908082 NR Description: P0506B12.30 [Oryza sativa (japonica
  misc_feature (171)..(391): Homolog of NCBI NO: 34908082 NR Description: P0506B12.30 [Oryza sativa (japonica
  misc_feature (1)..(395): Homolog of NCBI NO: 30693847 NR Description: NAD-dependent epimerase/dehydratase family
  misc_feature (1)..(34): Homolog of NCBI NO: 25396402 NR Description: UDP-glucuronic acid decarboxylase
  misc_feature (40)..(391): Homolog of NCBI NO: 25396402 NR Description: UDP-glucuronic acid decarboxylase
  misc_feature (40)..(130): Homolog of NCBI NO: 34908082 NR Description: P0506B12.30 [Oryza sativa (japonica
  misc_feature (1)..(395): Homolog of NCBI NO: 30693847 NR Description: NAD-dependent epimerase/dehydratase family
  misc_feature (40)..(391): Homolog of NCBI NO: 25396402 NR Description: UDP-glucuronic acid decarboxylase
  misc_feature (1)..(408): Homolog of NCBI NO: 15229334 NR Description: NAD-dependent epimerase/dehydratase family
  misc_feature (1)..(408): Homolog of NCBI NO: 2129578 NR Description: dTDP-glucose 4-6-dehydratase homolog D18 -
  misc_feature (1)..(404): Homolog of NCBI NO: 15227109 NR Description: NAD-dependent epimerase/dehydratase family
  misc_feature (1)..(395): Homolog of NCBI NO: 17473549 NR Description: dTDP-glucose 4-6-dehydratase-like protein
  misc_feature (1)..(395): Homolog of NCBI NO: 11270116 NR Description: dTDP-glucose 4-6-dehydratase-like protein -
  misc_feature (1)..(34): Homolog of NCBI NO: 25396402 NR Description: UDP-glucuronic acid decarboxylase
  misc_feature (171)..(391): Homolog of NCBI NO: 34908082 NR Description: P0506B12.30 [Oryza sativa (japonica
  misc_feature (1)..(395): Homolog of NCBI NO: 11270116 NR Description: dTDP-glucose 4-6-dehydratase-like protein -
  misc_feature (1)..(395): Homolog of NCBI NO: 17473549 NR Description: dTDP-glucose 4-6-dehydratase-like protein
  misc_feature (1)..(404): Homolog of NCBI NO: 15227109 NR Description: NAD-dependent epimerase/dehydratase family
  misc_feature (1)..(408): Homolog of NCBI NO: 2129578 NR Description: dTDP-glucose 4-6-dehydratase homolog D18 -
  misc_feature (1)..(408): Homolog of NCBI NO: 15229334 NR Description: NAD-dependent epimerase/dehydratase family
MLREQRLIFVLVGIAIATLVFTIFPRSTQSTPYSDPFSGYGIRPDESYVPAIQAQRKPSLEYLNRIGATGGKIPLGLKRKGLRVVVTGGAGFVGSHLVDRLMARGDTVIVVDNFFTGRKENVMHHFSNPNFEMIRHDVVEPILLEVDQIYHLACPASPVHYKFNPVKTIKTNVVGTLNMLGLAKRVGARFLLTSTSEVYGDPLQHPQVETYWGNVNPIGVRSCYDEGKRTAETLTMDYHRGANVEVRIARIFNTYGPRMCIDDGRVVSNFVAQALRKEPLTVYGDGKQTRSFQFVSDLVEGLMRLMEGEHVGPFNLGNPGEFTMLELAKVVQETIDPNANIEFRPNTEDDPHKRKPDITKAKELLGWEPKVSLRQGLPLMVKDFRQRVFGDQKEGSSAAATTTKTTSA

SEQ ID NO: 47301 - DNA, 549 bp, Arabidopsis thaliana
  misc_feature (1)..(549): Ceres Seq. ID no. 11406331
  misc_feature: MA Experiment ID: 20000185 Result: Up-regulated in Transcription
  misc_feature: MA Experiment 20000185 PARAMETER Experiment Name: At_Roots__P Parameter: Age (day) Value: 7 vs. 21
  misc_feature: MA Experiment 20000185 PARAMETER Experiment Name: At_Roots__P Parameter: Organism Value: A. thaliana
  misc_feature: MA Experiment 20000185 PARAMETER Experiment Name: At_Roots__P Parameter: Tissue Value: Roots vs. Whole Plant
  misc_feature: MA Experiment ID: 20000438 Result: Up-regulated in Transcription
  misc_feature: MA Experiment 20000438 PARAMETER Experiment Name: At_Shoots__P Parameter: Age (day) Value: 14
  misc_feature: MA Experiment 20000438 PARAMETER Experiment Name: At_Shoots__P Parameter: Tissue Value: Shoots vs. Whole Plant
  misc_feature: MA Experiment ID: 20000439 Result: Up-regulated in Transcription
  misc_feature: MA Experiment 20000439 PARAMETER Experiment Name: At_Roots__P Parameter: Age (day) Value: 14 vs. 21
  misc_feature: MA Experiment 20000439 PARAMETER Experiment Name: At_Roots__P Parameter: Organism Value: A. thaliana
  misc_feature: MA Experiment 20000439 PARAMETER Experiment Name: At_Roots__P Parameter: Tissue Value: Roots vs. Whole Plant
  misc_feature: MA Experiment ID: 20000441 Result: Up-regulated in Transcription
  misc_feature: MA Experiment 20000441 PARAMETER Experiment Name: At_1uM_BR-BRZ__P Parameter: Tissue Value: Shoot Apices
  misc_feature: MA Experiment 20000441 PARAMETER Experiment Name: At_1uM_BR-BRZ__P Parameter: Treatment Value: 1uM BR vs. No Treatment
  misc_feature: MA Experiment ID: 20000443 Result: Up-regulated in Transcription
  misc_feature: MA Experiment 20000443 PARAMETER Experiment Name: At_1uM_BR-BRZ__P Parameter: Tissue Value: Shoot Apices
  misc_feature: MA Experiment 20000443 PARAMETER Experiment Name: At_1uM_BR-BRZ__P Parameter: Treatment Value: 1uM BRZ vs. No Treatment
  misc_feature: MA Experiment ID: 20000794 Result: Up-regulated in Transcription
  misc_feature: MA Experiment 20000794 PARAMETER Experiment Name: At_Petals_P Parameter: Age (day) Value: 23-25 days
  misc_feature: MA Experiment 20000794 PARAMETER Experiment Name: At_Petals_P Parameter: Plant Line Value: WS
  misc_feature: MA Experiment 20000794 PARAMETER Experiment Name: At_Petals_P Parameter: Tissue Value: Petals vs. Whole plant
  misc_feature: MA Experiment ID: 20001450 Result: Up-regulated in Transcription
  misc_feature: MA Experiment 20001450 PARAMETER Experiment Name: At_Far-red-induction_P Parameter: Age (day) Value: 7
  misc_feature: MA Experiment 20001450 PARAMETER Experiment Name: At_Far-red-induction_P Parameter: Light Value: Far-red vs. White
  misc_feature: MA Experiment 20001450 PARAMETER Experiment Name: At_Far-red-induction_P Parameter: Organism Value: A. thaliana
  misc_feature: MA Experiment 20001450 PARAMETER Experiment Name: At_Far-red-induction_P Parameter: Plant Line Value: Columbia
  misc_feature: MA Experiment 20001450 PARAMETER Experiment Name: At_Far-red-induction_P Parameter: Timepoint (hr) Value: 8
  misc_feature: MA Experiment 20001450 PARAMETER Experiment Name: At_Far-red-induction_P Parameter: Tissue Value: Whole Plant
  misc_feature: MA Experiment ID: 20001556 Result: Down-regulated in Transcription
  misc_feature: MA Experiment 20001556 PARAMETER Experiment Name: At_Drought_Soil_Dry_P Parameter: Age (day) Value: 26
  misc_feature: MA Experiment 20001556 PARAMETER Experiment Name: At_Drought_Soil_Dry_P Parameter: Organism Value: A. thaliana
  misc_feature: MA Experiment 20001556 PARAMETER Experiment Name: At_Drought_Soil_Dry_P Parameter: Plant Line Value: WS
  misc_feature: MA Experiment 20001556 PARAMETER Experiment Name: At_Drought_Soil_Dry_P Parameter: Post Timepoint (hr) Value: None
  misc_feature: MA Experiment 20001556 PARAMETER Experiment Name: At_Drought_Soil_Dry_P Parameter: Post-Treatment Value: None
  misc_feature: MA Experiment 20001556 PARAMETER Experiment Name: At_Drought_Soil_Dry_P Parameter: Timepoint (day) Value: 12
  misc_feature: MA Experiment 20001556 PARAMETER Experiment Name: At_Drought_Soil_Dry_P Parameter: Treatment Value: Drought vs. No Drought
  misc_feature: MA Experiment ID: 20001904 Result: Down-regulated in Transcription
  misc_feature: MA Experiment 20001904 PARAMETER Experiment Name: At_Drought_Reproduction_P Parameter: Age (day) Value: 37
  misc_feature: MA Experiment 20001904 PARAMETER Experiment Name: At_Drought_Reproduction_P Parameter: Organism Value: A. thaliana
  misc_feature: MA Experiment 20001904 PARAMETER Experiment Name: At_Drought_Reproduction_P Parameter: Plant Line Value: WS
  misc_feature: MA Experiment 20001904 PARAMETER Experiment Name: At_Drought_Reproduction_P Parameter: Timepoint (day) Value: 7
  misc_feature: MA Experiment 20001904 PARAMETER Experiment Name: At_Drought_Reproduction_P Parameter: Tissue Value: Rosettes
  misc_feature: MA Experiment 20001904 PARAMETER Experiment Name: At_Drought_Reproduction_P Parameter: Treatment Value: Drought vs. No Drought
tgaggtaacatattacttgtattcaggctcgtggaatgaactatttgcacagctgtaatccgatgattgtccatcgcgatcttaagtccccaaaccttctagttgacaaaaactgggtcgtgaaggtgtgtgattttggattgtctaggatgaaacacagtacatacctctcttcaaagtcaacagcagggacggctgaatggatggctccagaagtgctaagaaacgaacctgctgatgagaagtgcgatgtttacagctacggtgtgatcttatgggaactctttacgttacaacaaccgtggggaaagatgaacccgatgcaagtagttggggcagttgggtttcagcatcgacgtcttgacattcccgactttgtagatccagcaattgcagatctcatcagtaaatgctggcagacggattcaaagttaaggccaagttttgcagagataatggcgtctctaaagcggctacagaaacctgtaacaggttctaacatcccaagaccagtccccagttcctcttcattaccaactgaacatgaac

SEQ ID NO: 47302 - protein, 171 aa, Arabidopsis thaliana
  peptide (1)..(171): Ceres Seq. ID no. 11406332
  misc_feature (1)..(144): Pfam Name: Protein kinase domain Pfam Description: Protein kinase domain
  misc_feature (1)..(167): Homolog of NCBI NO: 11127921 NR Description: EDR1 [Oryza sativa]
  misc_feature (1)..(166): Homolog of NCBI NO: 25387032 NR Description: probable mitogen-activated protein kinase MAP3K
  misc_feature (1)..(166): Homolog of NCBI NO: 22326737 NR Description: MAP3K delta-1 protein kinase
  misc_feature (1)..(170): Homolog of NCBI NO: 9719730 NR Description: Contains similarity to ethylene-inducible protein kinase from Lycopersicon esculentum gb|AF110518 and
  misc_feature (1)..(170): Homolog of NCBI NO: 20466652 NR Description: MAP kinase, putative [Arabidopsis thaliana]
  misc_feature (1)..(170): Homolog of NCBI NO: 25402842 NR Description: protein T10O22.13 [imported] - Arabidopsis
  misc_feature (1)..(170): Homolog of NCBI NO: 22329643 NR Description: MAP kinase, putative
  misc_feature (1)..(170): Homolog of NCBI NO: 32527767 NR Description: shoot regeneration-related mitogen activated
  misc_feature (1)..(170): Homolog of NCBI NO: 20466322 NR Description: putative protein kinase [Arabidopsis thaliana]
  misc_feature (1)..(170): Homolog of NCBI NO: 15219517 NR Description: putative protein kinase
MNYLHSCNPMIVHRDLKSPNLLVDKNWVVKVCDFGLSRMKHSTYLSSKSTAGTAEWMAPEVLRNEPADEKCDVYSYGVILWELFTLQQPWGKMNPMQVVGAVGFQHRRLDIPDFVDPAIADLISKCWQTDSKLRPSFAEIMASLKRLQKPVTGSNIPRPVPSSSSLPTEHE

SEQ ID NO: 47303 - protein, 162 aa, Arabidopsis thaliana
  peptide (1)..(162): Ceres Seq. ID no. 11406333
  misc_feature (1)..(135): Pfam Name: Protein kinase domain Pfam Description: Protein kinase domain
  misc_feature (1)..(158): Homolog of NCBI NO: 11127921 NR Description: EDR1 [Oryza sativa]
  misc_feature (1)..(157): Homolog of NCBI NO: 25387032 NR Description: probable mitogen-activated protein kinase MAP3K
  misc_feature (1)..(157): Homolog of NCBI NO: 22326737 NR Description: MAP3K delta-1 protein kinase
  misc_feature (1)..(161): Homolog of NCBI NO: 9719730 NR Description: Contains similarity to ethylene-inducible protein kinase from Lycopersicon esculentum gb|AF110518 and
  misc_feature (1)..(161): Homolog of NCBI NO: 20466652 NR Description: MAP kinase, putative [Arabidopsis thaliana]
  misc_feature (1)..(161): Homolog of NCBI NO: 25402842 NR Description: protein T10O22.13 [imported] - Arabidopsis
  misc_feature (1)..(161): Homolog of NCBI NO: 22329643 NR Description: MAP kinase, putative
  misc_feature (1)..(161): Homolog of NCBI NO: 32527767 NR Description: shoot regeneration-related mitogen activated
  misc_feature (1)..(161): Homolog of NCBI NO: 20466322 NR Description: putative protein kinase [Arabidopsis thaliana]
  misc_feature (1)..(161): Homolog of NCBI NO: 15219517 NR Description: putative protein kinase
MIVHRDLKSPNLLVDKNWVVKVCDFGLSRMKHSTYLSSKSTAGTAEWMAPEVLRNEPADEKCDVYSYGVILWELFTLQQPWGKMNPMQVVGAVGFQHRRLDIPDFVDPAIADLISKCWQTDSKLRPSFAEIMASLKRLQKPVTGSNIPRPVPSSSSLPTEHE

SEQ ID NO: 47304 - protein, 133 aa, Arabidopsis thaliana
  peptide (1)..(133): Ceres Seq. ID no. 11406334
  misc_feature (1)..(106): Pfam Name: Protein kinase domain Pfam Description: Protein kinase domain
  misc_feature (1)..(129): Homolog of NCBI NO: 11127921 NR Description: EDR1 [Oryza sativa]
  misc_feature (1)..(128): Homolog of NCBI NO: 25387032 NR Description: probable mitogen-activated protein kinase MAP3K
  misc_feature (1)..(128): Homolog of NCBI NO: 22326737 NR Description: MAP3K delta-1 protein kinase
  misc_feature (1)..(132): Homolog of NCBI NO: 9719730 NR Description: Contains similarity to ethylene-inducible protein kinase from Lycopersicon esculentum gb|AF110518 and
  misc_feature (1)..(132): Homolog of NCBI NO: 20466652 NR Description: MAP kinase, putative [Arabidopsis thaliana]
  misc_feature (1)..(132): Homolog of NCBI NO: 25402842 NR Description: protein T10O22.13 [imported] - Arabidopsis
  misc_feature (1)..(132): Homolog of NCBI NO: 22329643 NR Description: MAP kinase, putative
  misc_feature (1)..(132): Homolog of NCBI NO: 32527767 NR Description: shoot regeneration-related mitogen activated
  misc_feature (1)..(132): Homolog of NCBI NO: 20466322 NR Description: putative protein kinase [Arabidopsis thaliana]
  misc_feature (1)..(132): Homolog of NCBI NO: 15219517 NR Description: putative protein kinase
MKHSTYLSSKSTAGTAEWMAPEVLRNEPADEKCDVYSYGVILWELFTLQQPWGKMNPMQVVGAVGFQHRRLDIPDFVDPAIADLISKCWQTDSKLRPSFAEIMASLKRLQKPVTGSNIPRPVPSSSSLPTEHE

SEQ ID NO: 47305 - DNA, 2665 bp, Arabidopsis thaliana; identical to SEQ ID NO: 45772
  misc_feature (1)..(2665): Ceres Seq. ID no. 12561126
  misc_feature: MA Experiment ID: 20000234 Result: Up-regulated in Transcription
  misc_feature: MA Experiment 20000234 PARAMETER Experiment Name: At_Siliques_P Parameter: Age (day) Value: 21
  misc_feature: MA Experiment 20000234 PARAMETER Experiment Name: At_Siliques_P Parameter: Organism Value: A. thaliana
  misc_feature: MA Experiment 20000234 PARAMETER Experiment Name: At_Siliques_P Parameter: Plant Line Value: WS
  misc_feature: MA Experiment 20000234 PARAMETER Experiment Name: At_Siliques_P Parameter: Tissue Value: Less Than 5mm Siliques vs. Whole Plant
  misc_feature: MA Experiment ID: 20000235 Result: Up-regulated in Transcription
  misc_feature: MA Experiment 20000235 PARAMETER Experiment Name: At_Siliques_P Parameter: Age (day) Value: 21
  misc_feature: MA Experiment 20000235 PARAMETER Experiment Name: At_Siliques_P Parameter: Organism Value: A. thaliana
  misc_feature: MA Experiment 20000235 PARAMETER Experiment Name: At_Siliques_P Parameter: Plant Line Value: WS
  misc_feature: MA Experiment 20000235 PARAMETER Experiment Name: At_Siliques_P Parameter: Tissue Value: 5-10mm Siliques vs. Whole Plant
  misc_feature: MA Experiment ID: 20000265 Result: Up-regulated in Transcription
  misc_feature: MA Experiment 20000265 PARAMETER Experiment Name: At_Open_Flower_P Parameter: Age (day) Value: 21
  misc_feature: MA Experiment 20000265 PARAMETER Experiment Name: At_Open_Flower_P Parameter: Plant Line Value: WS
  misc_feature: MA Experiment 20000265 PARAMETER Experiment Name: At_Open_Flower_P Parameter: Tissue Value: Closed Flower vs. Whole Plant
  misc_feature: MA Experiment ID: 20000286 Result: Up-regulated in Transcription
  misc_feature: MA Experiment 20000286 PARAMETER Experiment Name: At_Open_Flower_P Parameter: Age (day) Value: 21
  misc_feature: MA Experiment 20000286 PARAMETER Experiment Name: At_Open_Flower_P Parameter: Plant Line Value: WS
  misc_feature: MA Experiment 20000286 PARAMETER Experiment Name: At_Open_Flower_P Parameter: Tissue Value: Half Open vs. Whole Plant

SEQ ID NO: 47306 - protein, 824 aa, Arabidopsis thaliana; identical to SEQ ID NO: 45773
  peptide (1)..(824): Ceres Seq. ID no. 12561127
  misc_feature (746)..(824): Pfam Name: Galactose binding lectin domain Pfam Description: Galactose binding lectin domain
  misc_feature (746)..(824): Pfam Name: Galactose binding lectin domain Pfam Description: Galactose binding lectin domain
  misc_feature (744)..(824): Homolog of NCBI NO: 6686888 NR Description: putative beta-galactosidase [Arabidopsis thaliana]
  misc_feature (6)..(735): Homolog of NCBI NO: 6686888 NR Description: putative beta-galactosidase [Arabidopsis thaliana]
  misc_feature (736)..(824): Homolog of NCBI NO: 7939623 NR Description: putative beta-galactosidase [Lycopersicon
  misc_feature (26)..(740): Homolog of NCBI NO: 7939623 NR Description: putative beta-galactosidase [Lycopersicon
  misc_feature (589)..(668): Homolog of NCBI NO: 22329897 NR Description: similar to glycosyl hydrolase family 35
  misc_feature (744)..(824): Homolog of NCBI NO: 6686888 NR Description: putative beta-galactosidase [Arabidopsis thaliana]
  misc_feature (736)..(824): Homolog of NCBI NO: 7939623 NR Description: putative beta-galactosidase [Lycopersicon
  misc_feature (589)..(668): Homolog of NCBI NO: 22329897 NR Description: similar to glycosyl hydrolase family 35
  misc_feature (7)..(603): Homolog of NCBI NO: 12597826 NR Description: hypothetical protein [Arabidopsis thaliana]
  misc_feature (696)..(824): Homolog of NCBI NO: 12597826 NR Description: hypothetical protein [Arabidopsis thaliana]
  misc_feature (589)..(672): Homolog of NCBI NO: 12597826 NR Description: hypothetical protein [Arabidopsis thaliana]
  misc_feature (3)..(603): Homolog of NCBI NO: 22329897 NR Description: similar to glycosyl hydrolase family 35
  misc_feature (685)..(824): Homolog of NCBI NO: 22329897 NR Description: similar to glycosyl hydrolase family 35
  misc_feature (26)..(740): Homolog of NCBI NO: 7939623 NR Description: putative beta-galactosidase [Lycopersicon
  misc_feature (6)..(735): Homolog of NCBI NO: 6686888 NR Description: putative beta-galactosidase [Arabidopsis thaliana]
  misc_feature (685)..(824): Homolog of NCBI NO: 22329897 NR Description: similar to glycosyl hydrolase family 35
  misc_feature (3)..(603): Homolog of NCBI NO: 22329897 NR Description: similar to glycosyl hydrolase family 35
  misc_feature (589)..(672): Homolog of NCBI NO: 12597826 NR Description: hypothetical protein [Arabidopsis thaliana]
  misc_feature (696)..(824): Homolog of NCBI NO: 12597826 NR Description: hypothetical protein [Arabidopsis thaliana]
  misc_feature (7)..(603): Homolog of NCBI NO: 12597826 NR Description: hypothetical protein [Arabidopsis thaliana]

SEQ ID NO: 47307 - protein, 769 aa, Arabidopsis thaliana; identical to SEQ ID NO: 45774
  peptide (1)..(769): Ceres Seq. ID no. 12561128
  misc_feature (691)..(769): Pfam Name: Galactose binding lectin domain Pfam Description: Galactose binding lectin domain
  misc_feature (691)..(769): Pfam Name: Galactose binding lectin domain Pfam Description: Galactose binding lectin domain
  misc_feature (689)..(769): Homolog of NCBI NO: 6686888 NR Description: putative beta-galactosidase [Arabidopsis thaliana]
  misc_feature (1)..(680): Homolog of NCBI NO: 6686888 NR Description: putative beta-galactosidase [Arabidopsis thaliana]
  misc_feature (681)..(769): Homolog of NCBI NO: 7939623 NR Description: putative beta-galactosidase [Lycopersicon
  misc_feature (1)..(685): Homolog of NCBI NO: 7939623 NR Description: putative beta-galactosidase [Lycopersicon
  misc_feature (534)..(613): Homolog of NCBI NO: 22329897 NR Description: similar to glycosyl hydrolase family 35
  misc_feature (689)..(769): Homolog of NCBI NO: 6686888 NR Description: putative beta-galactosidase [Arabidopsis thaliana]
  misc_feature (681)..(769): Homolog of NCBI NO: 7939623 NR Description: putative beta-galactosidase [Lycopersicon
  misc_feature (534)..(613): Homolog of NCBI NO: 22329897 NR Description: similar to glycosyl hydrolase family 35
  misc_feature (1)..(548): Homolog of NCBI NO: 12597826 NR Description: hypothetical protein [Arabidopsis thaliana]
  misc_feature (641)..(769): Homolog of NCBI NO: 12597826 NR Description: hypothetical protein [Arabidopsis thaliana]
  misc_feature (534)..(617): Homolog of NCBI NO: 12597826 NR Description: hypothetical protein [Arabidopsis thaliana]
  misc_feature (1)..(548): Homolog of NCBI NO: 22329897 NR Description: similar to glycosyl hydrolase family 35
  misc_feature (630)..(769): Homolog of NCBI NO: 22329897 NR Description: similar to glycosyl hydrolase family 35
  misc_feature (1)..(685): Homolog of NCBI NO: 7939623 NR Description: putative beta-galactosidase [Lycopersicon
  misc_feature (1)..(680): Homolog of NCBI NO: 6686888 NR Description: putative beta-galactosidase [Arabidopsis thaliana]
  misc_feature (630)..(769): Homolog of NCBI NO: 22329897 NR Description: similar to glycosyl hydrolase family 35
  misc_feature (1)..(548): Homolog of NCBI NO: 22329897 NR Description: similar to glycosyl hydrolase family 35
  misc_feature (534)..(617): Homolog of NCBI NO: 12597826 NR Description: hypothetical protein [Arabidopsis thaliana]
  misc_feature (641)..(769): Homolog of NCBI NO: 12597826 NR Description: hypothetical protein [Arabidopsis thaliana]
  misc_feature (1)..(548): Homolog of NCBI NO: 12597826 NR Description: hypothetical protein [Arabidopsis thaliana]

SEQ ID NO: 47308 - protein, 691 aa, Arabidopsis thaliana; identical to SEQ ID NO: 45775
  peptide (1)..(691): Ceres Seq. ID no. 12561129
  misc_feature (613)..(691): Pfam Name: Galactose binding lectin domain Pfam Description: Galactose binding lectin domain
  misc_feature (613)..(691): Pfam Name: Galactose binding lectin domain Pfam Description: Galactose binding lectin domain
  misc_feature (611)..(691): Homolog of NCBI NO: 6686888 NR Description: putative beta-galactosidase [Arabidopsis thaliana]
  misc_feature (1)..(602): Homolog of NCBI NO: 6686888 NR Description: putative beta-galactosidase [Arabidopsis thaliana]
  misc_feature (603)..(691): Homolog of NCBI NO: 7939623 NR Description: putative beta-galactosidase [Lycopersicon
  misc_feature (1)..(607): Homolog of NCBI NO: 7939623 NR Description: putative beta-galactosidase [Lycopersicon
  misc_feature (456)..(535): Homolog of NCBI NO: 22329897 NR Description: similar to glycosyl hydrolase family 35
  misc_feature (611)..(691): Homolog of NCBI NO: 6686888 NR Description: putative beta-galactosidase [Arabidopsis thaliana]
  misc_feature (603)..(691): Homolog of NCBI NO: 7939623 NR Description: putative beta-galactosidase [Lycopersicon
  misc_feature (456)..(535): Homolog of NCBI NO: 22329897 NR Description: similar to glycosyl hydrolase family 35
  misc_feature (1)..(470): Homolog of NCBI NO: 12597826 NR Description: hypothetical protein [Arabidopsis thaliana]
  misc_feature (563)..(691): Homolog of NCBI NO: 12597826 NR Description: hypothetical protein [Arabidopsis thaliana]
  misc_feature (456)..(539): Homolog of NCBI NO: 12597826 NR Description: hypothetical protein [Arabidopsis thaliana]
  misc_feature (1)..(470): Homolog of NCBI NO: 22329897 NR Description: similar to glycosyl hydrolase family 35
  misc_feature (552)..(691): Homolog of NCBI NO: 22329897 NR Description: similar to glycosyl hydrolase family 35
  misc_feature (1)..(607): Homolog of NCBI NO: 7939623 NR Description: putative beta-galactosidase [Lycopersicon
  misc_feature (1)..(602): Homolog of NCBI NO: 6686888 NR Description: putative beta-galactosidase [Arabidopsis thaliana]
  misc_feature (552)..(691): Homolog of NCBI NO: 22329897 NR Description: similar to glycosyl hydrolase family 35
  misc_feature (1)..(470): Homolog of NCBI NO: 22329897 NR Description: similar to glycosyl hydrolase family 35
  misc_feature (456)..(539): Homolog of NCBI NO: 12597826 NR Description: hypothetical protein [Arabidopsis thaliana]
  misc_feature (563)..(691): Homolog of NCBI NO: 12597826 NR Description: hypothetical protein [Arabidopsis thaliana]
  misc_feature (1)..(470): Homolog of NCBI NO: 12597826 NR Description: hypothetical protein [Arabidopsis thaliana]

SEQ ID NO: 47309 - DNA, 1440 bp, Arabidopsis thaliana
  misc_feature (1)..(1440): Ceres Seq. ID no. 13593642
  misc_feature: MA Experiment ID: 20000234 Result: Up-regulated in Transcription
  misc_feature: MA Experiment 20000234 PARAMETER Experiment Name: At_Siliques_P Parameter: Age (day) Value: 21
  misc_feature: MA Experiment 20000234 PARAMETER Experiment Name: At_Siliques_P Parameter: Organism Value: A. thaliana
  misc_feature: MA Experiment 20000234 PARAMETER Experiment Name: At_Siliques_P Parameter: Plant Line Value: WS
  misc_feature: MA Experiment 20000234 PARAMETER Experiment Name: At_Siliques_P Parameter: Tissue Value: Less Than 5mm Siliques vs. Whole Plant
  misc_feature: MA Experiment ID: 20000264 Result: Up-regulated in Transcription
  misc_feature: MA Experiment 20000264 PARAMETER Experiment Name: At_Open_Flower_P Parameter: Age (day) Value: 21
  misc_feature: MA Experiment 20000264 PARAMETER Experiment Name: At_Open_Flower_P Parameter: Plant Line Value: WS
  misc_feature: MA Experiment 20000264 PARAMETER Experiment Name: At_Open_Flower_P Parameter: Tissue Value: Open Flower vs. Whole Plant
  misc_feature: MA Experiment ID: 20000265 Result: Up-regulated in Transcription
  misc_feature: MA Experiment 20000265 PARAMETER Experiment Name: At_Open_Flower_P Parameter: Age (day) Value: 21
  misc_feature: MA Experiment 20000265 PARAMETER Experiment Name: At_Open_Flower_P Parameter: Plant Line Value: WS
  misc_feature: MA Experiment 20000265 PARAMETER Experiment Name: At_Open_Flower_P Parameter: Tissue Value: Closed Flower vs. Whole Plant
  misc_feature: MA Experiment ID: 20000794 Result: Up-regulated in Transcription
  misc_feature: MA Experiment 20000794 PARAMETER Experiment Name: At_Petals_P Parameter: Age (day) Value: 23-25 days
  misc_feature: MA Experiment 20000794 PARAMETER Experiment Name: At_Petals_P Parameter: Plant Line Value: WS
  misc_feature: MA Experiment 20000794 PARAMETER Experiment Name: At_Petals_P Parameter: Tissue Value: Petals vs. Whole plant
  misc_feature: MA Experiment ID: 20001451 Result: Down-regulated in Transcription
  misc_feature: MA Experiment 20001451 PARAMETER Experiment Name: At_Far-red-induction_P Parameter: Age (day) Value: 7
  misc_feature: MA Experiment 20001451 PARAMETER Experiment Name: At_Far-red-induction_P Parameter: Light Value: Far-red vs. White
  misc_feature: MA Experiment 20001451 PARAMETER Experiment Name: At_Far-red-induction_P Parameter: Organism Value: A. thaliana
  misc_feature: MA Experiment 20001451 PARAMETER Experiment Name: At_Far-red-induction_P Parameter: Plant Line Value: Columbia
  misc_feature: MA Experiment 20001451 PARAMETER Experiment Name: At_Far-red-induction_P Parameter: Timepoint (hr) Value: 24
  misc_feature: MA Experiment 20001451 PARAMETER Experiment Name: At_Far-red-induction_P Parameter: Tissue Value: Whole Plant
gagtcccaccaatgaccaaaaagtgctccaatgcatgattattacgttggagcctcttcgatagagagatttttgctttctcaatttattattttttgtgtctctctctcgcccgatttggagtttttagggtttgatttttgtaatgtgagaaaggtttcgttatgttaaagaggcactctatcgccattctctccagaatcgcaagcttcgattcccataaaacccttatgtcttcctttaccgatcccctttttctgcgatcgctttactctcctcgatccatcgccatcagatttcatggagattttgctcatagactctacaatcccattcaaatttacaacaacaacaacaacaacagtggctcttgtaatggtttgttcaaggttaaaggtggaggaggaaagccgaaaggattcaccttgcgaagttgttttgattctcataagaaacctgatcaaaaggctcgagctttaactcaacatcgccgctttctccatgatctgggatctgggcctagtgaagaacgcgccgctgccggaactaccgaccttgccgatggccgtggtgcatatctgcgtacgaggtttcaaggaaatgataagattgttgtggctgttgacatagatgaggttcttggaaactttgtctcggcccttaacagattcattgcggaccgctatttgtcgaaccattcagtctcagaataccatgtctatgagttcttcaagatatggaactgctctcgcaacgaagccgacttacgtgttcatgaattctttaagacatcatatttcaagaaagggatccatcctcttccaggtgcccataagactcttcacaagctatcaaaatattgcgacatgtcagttgtgacgtcccggcagaatgcgataaaggagcacacacttgagtggatcgagatacatttcccgggactatttaaacagattcattttgggaaccattttgctcttcatggagagtctagaccaaagtctgaaatctgcagatcatttggagcagagatattgattgacgataacccaagatatgccgaggaatgcgctaacattggaatgaaggttctcctctttgactatgaaaattcatacccttggtctaagacagagtctgtggatcggcatcctttggtgactagagttcataattgggaagaggtggagcagcagattctctcattggcagtgtcaaagtgttaaatattttctgcaacaagaaatgttattttgccagtgcagaattatagtattgtacaaacttgatgggagaaataagtagcaaacagagatggaattagctttaattgtccctttttagcatcatttcaatctatttttttttataatttagttttgttgttgcaaatacatttgatctgatgtatataaattaaataaagtttttatttcaaat

SEQ ID NO: 47310 - protein, 353 aa, Arabidopsis thaliana
  peptide (1)..(353): Ceres Seq. ID no. 13593643
  misc_feature (69)..(350): Homolog of NCBI NO: 17082482 NR Description: unknown [Zea mays]
  misc_feature (69)..(350): Homolog of NCBI NO: 18092343 NR Description: unknown [Zea mays]
  misc_feature (234)..(353): Homolog of NCBI NO: 7486452 NR Description: hypothetical protein F4I10.70 - Arabidopsis
  misc_feature (23)..(157): Homolog of NCBI NO: 7486452 NR Description: hypothetical protein F4I10.70 - Arabidopsis
  misc_feature (1)..(353): Homolog of NCBI NO: 18418156 NR Description: expressed protein [Arabidopsis thaliana]
MLKRHSIAILSRIASFDSHKTLMSSFTDPLFLRSLYSPRSIAIRFHGDFAHRLYNPIQIYNNNNNNSGSCNGLFKVKGGGGKPKGFTLRSCFDSHKKPDQKARALTQHRRFLHDLGSGPSEERAAAGTTDLADGRGAYLRTRFQGNDKIVVAVDIDEVLGNFVSALNRFIADRYLSNHSVSEYHVYEFFKIWNCSRNEADLRVHEFFKTSYFKKGIHPLPGAHKTLHKLSKYCDMSVVTSRQNAIKEHTLEWIEIHFPGLFKQIHFGNHFALHGESRPKSEICRSFGAEILIDDNPRYAEECANIGMKVLLFDYENSYPWSKTESVDRHPLVTRVHNWEEVEQQILSLAVSKC

SEQ ID NO: 47311 - protein, 331 aa, Arabidopsis thaliana
  peptide (1)..(331): Ceres Seq. ID no. 13593644
  misc_feature (47)..(328): Homolog of NCBI NO: 17082482 NR Description: unknown [Zea mays]
  misc_feature (47)..(328): Homolog of NCBI NO: 18092343 NR Description: unknown [Zea mays]
  misc_feature (212)..(331): Homolog of NCBI NO: 7486452 NR Description: hypothetical protein F4I10.70 - Arabidopsis
  misc_feature (1)..(135): Homolog of NCBI NO: 7486452 NR Description: hypothetical protein F4I10.70 - Arabidopsis
  misc_feature (1)..(331): Homolog of NCBI NO: 18418156 NR Description: expressed protein [Arabidopsis thaliana]
MSSFTDPLFLRSLYSPRSIAIRFHGDFAHRLYNPIQIYNNNNNNSGSCNGLFKVKGGGGKPKGFTLRSCFDSHKKPDQKARALTQHRRFLHDLGSGPSEERAAAGTTDLADGRGAYLRTRFQGNDKIVVAVDIDEVLGNFVSALNRFIADRYLSNHSVSEYHVYEFFKIWNCSRNEADLRVHEFFKTSYFKKGIHPLPGAHKTLHKLSKYCDMSVVTSRQNAIKEHTLEWIEIHFPGLFKQIHFGNHFALHGESRPKSEICRSFGAEILIDDNPRYAEECANIGMKVLLFDYENSYPWSKTESVDRHPLVTRVHNWEEVEQQILSLAVSKC

SEQ ID NO: 47312 - DNA, 1726 bp, Arabidopsis thaliana
  misc_feature (1)..(1726): Ceres Seq. ID no. 13588307
  misc_feature: MA Experiment ID: 20000180 Result: Down-regulated in Transcription
  misc_feature: MA Experiment 20000180 PARAMETER Experiment Name: At_Germinating_Seeds_P Parameter: Age (hr) Value: 24 vs. 0
  misc_feature: MA Experiment 20000180 PARAMETER Experiment Name: At_Germinating_Seeds_P Parameter: Tissue Value: Germinating Seeds
atgttgcatatgattttatctcaaagagtaatccttttacgaaaatatcactcttctgcaaatgcccttgttaccaaatcaccaaattctatccccgagttggttaaacatattgattcggatctgatacgtaatgcacataaggtgttcgacgaaattcctgagttagatgtcatttctgctacagcggtgattggtcgctttgtgaaggaaagcagacatgtggaagcaagtcaagccttcaaaaggttgttgtgtttaggcataaggccaaatgagttcacgtttggcacggtcattgggtcttctacaacttcgagagatgtcaaattgggtaagcagcttcattgttatgcgttaaagatgggacttgcgtcgaatgtgtttgttggtagtgcggttttgaactgttatgtgaaactgagtacgttgacagatgctcgtagatgttttgatgacactagagacccaaacgtagtttctattaccaatttgattagtgggtaccttaagaaacatgaatttgaagaagctctttcgttgtttagagcaatgcctgagagaagtgttgttacttggaatgcagttattggagggtttagccagacggggcggaacgaagaggctgtgaatacttttgtggatatgttaagggaaggtgtggtgatacctaacgaatcaaccttcccttgtgctataacagccatatctaatatagcttctcatggtgctggtaagagtattcacgcctgcgctataaagttcttggggaagcgattcaatgtctttgtttggaactctctgatcagtttttactcaaaatgtgggaacatggaagatagtcttctggctttcaacaagctcgaagaagaacaacggaacattgtatcttggaactctatgatatggggttatgcgcacaacggaagaggagaagaagctgtagccatgtttgagaaaatggttaaagacacaaacctgagaccaaacaacgtgacaatccttggagtattatttgcgtgtaaccatgcgggcctaatacaagaagggtacatgtattttaacaaagctgtgaatgattatgatgatccaaacctactagaaccggagcactatgcttgtatggtggatatgctttctaggtccggccgtttcaaagaagcagaagagcttattaaaagtatgcctcttgacccaggaatcgggttttggaaggcattgcttgggggatgccagattcactcaaacaagcgtctggctaaattagcggcgtcaaaaatcttggaattggatcctagagatgtttcatcatacgtaatgctttcaaatgcttattctgctatggaaaactggcagaatgtgtcgctgatacggaggaaaatgaaggagactggtttaaagcgttttacgggatgtagttggattgaagttagagaccaaattcgtgtctttgtgaatgctgacaagaacaacgaacttaaggatgaagtctataggatgttggcacttgtttctcaacatcttgaagaaaatgaatgttggaaagacttgtgaatacaacacatcatgttttttctcttctgctgttcttaaaaaggaagaagtaaatcgcatagtaatttgtatcactgcagcaatcaaacagtatcaaaacgataccatcactatttattgatataagatatatcaataagcctgtgacttgcatagtcattacttcattact

SEQ ID NO: 47313 - protein, 517 aa, Arabidopsis thaliana
  peptide (1)..(517): Ceres Seq. ID no. 13588308
  misc_feature (296)..(330): Pfam Name: PPR repeat Pfam Description: PPR repeat
  misc_feature (46)..(190): Homolog of NCBI NO: 15235115 NR Description: pentatricopeptide (PPR) repeat-containing protein
  misc_feature (165)..(501): Homolog of NCBI NO: 15235115 NR Description: pentatricopeptide (PPR) repeat-containing protein
  misc_feature (45)..(191): Homolog of NCBI NO: 34915012 NR Description: P0458A05.10 [Oryza sativa (japonica
  misc_feature (156)..(501): Homolog of NCBI NO: 34915012 NR Description: P0458A05.10 [Oryza sativa (japonica
  misc_feature (45)..(511): Homolog of NCBI NO: 15227619 NR Description: pentatricopeptide (PPR) repeat-containing protein
  misc_feature (43)..(512): Homolog of NCBI NO: 15225445 NR Description: pentatricopeptide (PPR) repeat-containing protein
  misc_feature (53)..(513): Homolog of NCBI NO: 34908128 NR Description: P0031D11.22 [Oryza sativa (japonica
  misc_feature (185)..(517): Homolog of NCBI NO: 26453038 NR Description: unknown protein [Arabidopsis thaliana]
  misc_feature (122)..(517): Homolog of NCBI NO: 30694067 NR Description: pentatricopeptide (PPR) repeat-containing protein
  misc_feature (1)..(517): Homolog of NCBI NO: 9759481 NR Description: gb|AAD22682.1~gene_id:MDH9.15~similar to unknown
MLHMILSQRVILLRKYHSSANALVTKSPNSIPELVKHIDSDLIRNAHKVFDEIPELDVISATAVIGRFVKESRHVEASQAFKRLLCLGIRPNEFTFGTVIGSSTTSRDVKLGKQLHCYALKMGLASNVFVGSAVLNCYVKLSTLTDARRCFDDTRDPNVVSITNLISGYLKKHEFEEALSLFRAMPERSVVTWNAVIGGFSQTGRNEEAVNTFVDMLREGVVIPNESTFPCAITAISNIASHGAGKSIHACAIKFLGKRFNVFVWNSLISFYSKCGNMEDSLLAFNKLEEEQRNIVSWNSMIWGYAHNGRGEEAVAMFEKMVKDTNLRPNNVTILGVLFACNHAGLIQEGYMYFNKAVNDYDDPNLLEPEHYACMVDMLSRSGRFKEAEELIKSMPLDPGIGFWKALLGGCQIHSNKRLAKLAASKILELDPRDVSSYVMLSNAYSAMENWQNVSLIRRKMKETGLKRFTGCSWIEVRDQIRVFVNADKNNELKDEVYRMLALVSQHLEENECWKDL

SEQ ID NO: 47314 - protein, 514 aa, Arabidopsis thaliana
  peptide (1)..(514): Ceres Seq. ID no. 13588309
  misc_feature (293)..(327): Pfam Name: PPR repeat Pfam Description: PPR repeat
  misc_feature (43)..(187): Homolog of NCBI NO: 15235115 NR Description: pentatricopeptide (PPR) repeat-containing protein
  misc_feature (162)..(498): Homolog of NCBI NO: 15235115 NR Description: pentatricopeptide (PPR) repeat-containing protein
  misc_feature (42)..(188): Homolog of NCBI NO: 34915012 NR Description: P0458A05.10 [Oryza sativa (japonica
  misc_feature (153)..(498): Homolog of NCBI NO: 34915012 NR Description: P0458A05.10 [Oryza sativa (japonica
  misc_feature (42)..(508): Homolog of NCBI NO: 15227619 NR Description: pentatricopeptide (PPR) repeat-containing protein
  misc_feature (40)..(509): Homolog of NCBI NO: 15225445 NR Description: pentatricopeptide (PPR) repeat-containing protein
  misc_feature (50)..(510): Homolog of NCBI NO: 34908128 NR Description: P0031D11.22 [Oryza sativa (japonica
  misc_feature (182)..(514): Homolog of NCBI NO: 26453038 NR Description: unknown protein [Arabidopsis thaliana]
  misc_feature (119)..(514): Homolog of NCBI NO: 30694067 NR Description: pentatricopeptide (PPR) repeat-containing protein
  misc_feature (1)..(514): Homolog of NCBI NO: 9759481 NR Description: gb|AAD22682.1~gene_id:MDH9.15~similar to unknown
MILSQRVILLRKYHSSANALVTKSPNSIPELVKHIDSDLIRNAHKVFDEIPELDVISATAVIGRFVKESRHVEASQAFKRLLCLGIRPNEFTFGTVIGSSTTSRDVKLGKQLHCYALKMGLASNVFVGSAVLNCYVKLSTLTDARRCFDDTRDPNVVSITNLISGYLKKHEFEEALSLFRAMPERSVVTWNAVIGGFSQTGRNEEAVNTFVDMLREGVVIPNESTFPCAITAISNIASHGAGKSIHACAIKFLGKRFNVFVWNSLISFYSKCGNMEDSLLAFNKLEEEQRNIVSWNSMIWGYAHNGRGEEAVAMFEKMVKDTNLRPNNVTILGVLFACNHAGLIQEGYMYFNKAVNDYDDPNLLEPEHYACMVDMLSRSGRFKEAEELIKSMPLDPGIGFWKALLGGCQIHSNKRLAKLAASKILELDPRDVSSYVMLSNAYSAMENWQNVSLIRRKMKETGLKRFTGCSWIEVRDQIRVFVNADKNNELKDEVYRMLALVSQHLEENECWKDL

SEQ ID NO: 47315 - protein, 396 aa, Arabidopsis thaliana
  peptide (1)..(396): Ceres Seq. ID no. 13588310
  misc_feature (175)..(209): Pfam Name: PPR repeat Pfam Description: PPR repeat
  misc_feature (1)..(69): Homolog of NCBI NO: 15235115 NR Description: pentatricopeptide (PPR) repeat-containing protein
  misc_feature (44)..(380): Homolog of NCBI NO: 15235115 NR Description: pentatricopeptide (PPR) repeat-containing protein
  misc_feature (1)..(70): Homolog of NCBI NO: 34915012 NR Description: P0458A05.10 [Oryza sativa (japonica
  misc_feature (35)..(380): Homolog of NCBI NO: 34915012 NR Description: P0458A05.10 [Oryza sativa (japonica
  misc_feature (1)..(390): Homolog of NCBI NO: 15227619 NR Description: pentatricopeptide (PPR) repeat-containing protein
  misc_feature (1)..(391): Homolog of NCBI NO: 15225445 NR Description: pentatricopeptide (PPR) repeat-containing protein
  misc_feature (1)..(392): Homolog of NCBI NO: 34908128 NR Description: P0031D11.22 [Oryza sativa (japonica
  misc_feature (64)..(396): Homolog of NCBI NO: 26453038 NR Description: unknown protein [Arabidopsis thaliana]
  misc_feature (1)..(396): Homolog of NCBI NO: 30694067 NR Description: pentatricopeptide (PPR) repeat-containing protein
  misc_feature (1)..(396): Homolog of NCBI NO: 9759481 NR Description: gb|AAD22682.1~gene_id:MDH9.15~similar to unknown
MGLASNVFVGSAVLNCYVKLSTLTDARRCFDDTRDPNVVSITNLISGYLKKHEFEEALSLFRAMPERSVVTWNAVIGGFSQTGRNEEAVNTFVDMLREGVVIPNESTFPCAITAISNIASHGAGKSIHACAIKFLGKRFNVFVWNSLISFYSKCGNMEDSLLAFNKLEEEQRNIVSWNSMIWGYAHNGRGEEAVAMFEKMVKDTNLRPNNVTILGVLFACNHAGLIQEGYMYFNKAVNDYDDPNLLEPEHYACMVDMLSRSGRFKEAEELIKSMPLDPGIGFWKALLGGCQIHSNKRLAKLAASKILELDPRDVSSYVMLSNAYSAMENWQNVSLIRRKMKETGLKRFTGCSWIEVRDQIRVFVNADKNNELKDEVYRMLALVSQHLEENECWKDL

SEQ ID NO: 47316 - DNA, 1585 bp, Arabidopsis thaliana
  misc_feature (1)..(1585): Ceres Seq. ID no. 12602251
  misc_feature: MA Experiment ID: 20000184 Result: Down-regulated in Transcription
  misc_feature: MA Experiment 20000184 PARAMETER Experiment Name: At_Shoots__P Parameter: Age (day) Value: 7
  misc_feature: MA Experiment 20000184 PARAMETER Experiment Name: At_Shoots__P Parameter: Tissue Value: Shoots vs. Whole Plant
  misc_feature: MA Experiment ID: 20000437 Result: Up-regulated in Transcription
  misc_feature: MA Experiment 20000437 PARAMETER Experiment Name: At_Drought_P Parameter: Age (day) Value: 8
  misc_feature: MA Experiment 20000437 PARAMETER Experiment Name: At_Drought_P Parameter: Organism Value: A. thaliana
  misc_feature: MA Experiment 20000437 PARAMETER Experiment Name: At_Drought_P Parameter: Plant Line Value: WS
  misc_feature: MA Experiment 20000437 PARAMETER Experiment Name: At_Drought_P Parameter: Timepoint (hr) Value: 24
  misc_feature: MA Experiment 20000437 PARAMETER Experiment Name: At_Drought_P Parameter: Tissue Value: Whole Plant
  misc_feature: MA Experiment 20000437 PARAMETER Experiment Name: At_Drought_P Parameter: Treatment Value: Drought vs. No Drought
gcttcgattttttgttggccaaactttgctctttcctttttagaatttttctttctttttaaaaacatttcttttatttcttcttactttaaaacgtgtgagagatcgctttgctccgaaatttcaacccctggttgctttgtttgatccctagattttcgccgtgttatagaagaatctcattttttgccgtctgaatcgaaatttcgtgtcgagaactcctccactcctccacttctcgttttctctttttaatttattttactctattgtgaccattttgagcgttattgagaactcaaagctcaagaatgcgtgcaccatctttgcttgcacaatgcttgccgggtttgctgcctcaagaccgaggcggtgtgtctgcattatcagagaaggatttgcagcttccaacaccagctgttgagatcataccttctaagacagtagctcatcacaggtattcaggggagaatctagatgcgctcggtttacaagttttcaagggaaaagtaagtgttgctgatatcattgggctctctgggtcagaaactgctcctttaaaaaatgaaggttctttgaaaagttgggaaagctctgttgttcttgttaatgtccttaaaaacgagatccgtgatggacagcttagcttcaggggcaaaagggtcctcgagctaggttgcaactttggagttcctgggatatttgcctgtttgaaaggtgcttcctcagtccactttcaagacctcagcgcagaaacgataagatgcacaaccatcccaaacgttcttgcaaacctggagcaagcacgagacaggcaaagccgtcagccagaaagcccactcacaccatcaagacaagctatctctgcatctgtccgtttctatgcaggagaatgggaagagctctctaccgttctatccatcattagaacagatgtccttgaaccatctatccccgcaatgaacttgagcttttcagaggaagatttcatggatggatgtagcagccaagacggaagcattacaggacagccagatttctcctcgaggcgatcaaggaagctctcaggaagcagagcgtgggaaagagccaacgagactggtcaagaaggagaatatggatatgatgttatactaatgaccgaaatcccttactctattacttctctgaagaaactatattctctcataaagaagtgcctgagaccgccatacggtgtaatgtatttggcggcgaagaagcaatacgtaggattcaacagtggagcgaaacatttgaggaacttggtggatgaagaaactatcttaggagctcatttggtgaaggaaactacagacagagatatttggaagttcttcctcaagtaggtgtgtagaagaagaactcattcataaccaaatacattctgcagccaacaacataagctaaaaaaagatgtcaaatacaaaacttttttgcgtaatgtagtattgcaatgcaatgatgaaattgaagtttccatcttcatttctctttttaattattatcttgatggttcattttttttttgtatgaatacaaaattagattaaaaaaaaatttggcc

SEQ ID NO: 47317 - protein, 351 aa, Arabidopsis thaliana
  peptide (1)..(351): Ceres Seq. ID no. 12602252
  misc_feature (26)..(149): Homolog of NCBI NO: 7485012 NR Description: hypothetical protein - Arabidopsis thaliana
  misc_feature (262)..(351): Homolog of NCBI NO: 18414120 NR Description: expressed protein
  misc_feature (26)..(208): Homolog of NCBI NO: 18414120 NR Description: expressed protein
  misc_feature (262)..(351): Homolog of NCBI NO: 21554662 NR Description: unknown [Arabidopsis thaliana]
  misc_feature (27)..(208): Homolog of NCBI NO: 21554662 NR Description: unknown [Arabidopsis thaliana]
  misc_feature (1)..(351): Homolog of NCBI NO: 38346224 NR Description: OJ990528_30.4 [Oryza sativa (japonica
  misc_feature (292)..(351): Homolog of NCBI NO: 25408858 NR Description: hypothetical protein At2g43320 [imported] -
  misc_feature (1)..(307): Homolog of NCBI NO: 25408858 NR Description: hypothetical protein At2g43320 [imported] -
  misc_feature (1)..(351): Homolog of NCBI NO: 16226903 NR Description: At2g43320/T1O24.6 [Arabidopsis thaliana]
  misc_feature (1)..(351): Homolog of NCBI NO: 18406207 NR Description: expressed protein
MRAPSLLAQCLPGLLPQDRGGVSALSEKDLQLPTPAVEIIPSKTVAHHRYSGENLDALGLQVFKGKVSVADIIGLSGSETAPLKNEGSLKSWESSVVLVNVLKNEIRDGQLSFRGKRVLELGCNFGVPGIFACLKGASSVHFQDLSAETIRCTTIPNVLANLEQARDRQSRQPESPLTPSRQAISASVRFYAGEWEELSTVLSIIRTDVLEPSIPAMNLSFSEEDFMDGCSSQDGSITGQPDFSSRRSRKLSGSRAWERANETGQEGEYGYDVILMTEIPYSITSLKKLYSLIKKCLRPPYGVMYLAAKKQYVGFNSGAKHLRNLVDEETILGAHLVKETTDRDIWKFFLK

SEQ ID NO: 47318 - DNA, 1076 bp, Arabidopsis thaliana; identical to SEQ ID NO: 22642
  misc_feature (1)..(1076): Ceres Seq. ID no. 13588829
  misc_feature: MA Experiment ID: 20000794 Result: Down-regulated in Transcription
  misc_feature: MA Experiment 20000794 PARAMETER Experiment Name: At_Petals_P Parameter: Age (day) Value: 23-25 days
  misc_feature: MA Experiment 20000794 PARAMETER Experiment Name: At_Petals_P Parameter: Plant Line Value: WS
  misc_feature: MA Experiment 20000794 PARAMETER Experiment Name: At_Petals_P Parameter: Tissue Value: Petals vs. Whole plant
  misc_feature: MA Experiment ID: 20001451 Result: Down-regulated in Transcription
  misc_feature: MA Experiment 20001451 PARAMETER Experiment Name: At_Far-red-induction_P Parameter: Age (day) Value: 7
  misc_feature: MA Experiment 20001451 PARAMETER Experiment Name: At_Far-red-induction_P Parameter: Light Value: Far-red vs. White
  misc_feature: MA Experiment 20001451 PARAMETER Experiment Name: At_Far-red-induction_P Parameter: Organism Value: A. thaliana
  misc_feature: MA Experiment 20001451 PARAMETER Experiment Name: At_Far-red-induction_P Parameter: Plant Line Value: Columbia
  misc_feature: MA Experiment 20001451 PARAMETER Experiment Name: At_Far-red-induction_P Parameter: Timepoint (hr) Value: 24
  misc_feature: MA Experiment 20001451 PARAMETER Experiment Name: At_Far-red-induction_P Parameter: Tissue Value: Whole Plant
  misc_feature: MA Experiment ID: 20001557 Result: Up-regulated in Transcription
  misc_feature: MA Experiment 20001557 PARAMETER Experiment Name: At_Drought_Soil_Dry_P Parameter: Age (day) Value: 27
  misc_feature: MA Experiment 20001557 PARAMETER Experiment Name: At_Drought_Soil_Dry_P Parameter: Organism Value: A. thaliana
  misc_feature: MA Experiment 20001557 PARAMETER Experiment Name: At_Drought_Soil_Dry_P Parameter: Plant Line Value: WS
  misc_feature: MA Experiment 20001557 PARAMETER Experiment Name: At_Drought_Soil_Dry_P Parameter: Post Timepoint (hr) Value: 3
  misc_feature: MA Experiment 20001557 PARAMETER Experiment Name: At_Drought_Soil_Dry_P Parameter: Post-Treatment Value: Re-Water vs. No Drought
  misc_feature: MA Experiment 20001557 PARAMETER Experiment Name: At_Drought_Soil_Dry_P Parameter: Timepoint (day) Value: 13
  misc_feature: MA Experiment 20001557 PARAMETER Experiment Name: At_Drought_Soil_Dry_P Parameter: Treatment Value: Drought vs. No Drought
  misc_feature: MA Experiment ID: 20001558 Result: Up-regulated in Transcription
  misc_feature: MA Experiment 20001558 PARAMETER Experiment Name: At_Drought_Soil_Dry_P Parameter: Age (day) Value: 27
  misc_feature: MA Experiment 20001558 PARAMETER Experiment Name: At_Drought_Soil_Dry_P Parameter: Organism Value: A. thaliana
  misc_feature: MA Experiment 20001558 PARAMETER Experiment Name: At_Drought_Soil_Dry_P Parameter: Plant Line Value: WS
  misc_feature: MA Experiment 20001558 PARAMETER Experiment Name: At_Drought_Soil_Dry_P Parameter: Post Timepoint (hr) Value: 6
  misc_feature: MA Experiment 20001558 PARAMETER Experiment Name: At_Drought_Soil_Dry_P Parameter: Post-Treatment Value: Re-Water vs. No Drought
  misc_feature: MA Experiment 20001558 PARAMETER Experiment Name: At_Drought_Soil_Dry_P Parameter: Timepoint (day) Value: 13
  misc_feature: MA Experiment 20001558 PARAMETER Experiment Name: At_Drought_Soil_Dry_P Parameter: Treatment Value: Drought vs. No Drought
  misc_feature: MA Experiment ID: 20001757 Result: Up-regulated in Transcription
  misc_feature: MA Experiment 20001757 PARAMETER Experiment Name: At_50mM_NH4NO3_L-to-H_P Parameter: Timepoint (hr) Value: 6
  misc_feature: MA Experiment 20001757 PARAMETER Experiment Name: At_50mM_NH4NO3_L-to-H_P Parameter: Tissue Value: Leaf
  misc_feature: MA Experiment 20001757 PARAMETER Experiment Name: At_50mM_NH4NO3_L-to-H_P Parameter: Treatment Value: 50mM NH4NO3 vs 100mM Mannitol

SEQ ID NO: 47319 - protein, 250 aa, Arabidopsis thaliana [sequence omitted]

SEQ ID NO: 47320 - protein, 207 aa, Arabidopsis thaliana; identical to SEQ ID NO: 22644
  peptide (1)..(207): Ceres Seq. ID no. 15220913
  misc_feature (61)..(145): Pfam Name: Ribosomal protein S3, C-terminal domain Pfam Description: Ribosomal protein S3, C-terminal domain
  misc_feature (61)..(145): Pfam Name: Ribosomal protein S3, C-terminal domain Pfam Description: Ribosomal protein S3, C-terminal domain
  misc_feature (61)..(145): Pfam Name: Ribosomal protein S3, C-terminal domain Pfam Description: Ribosomal protein S3, C-terminal domain
  misc_feature (1)..(179): Homolog of NCBI NO: 27735393 NR Description: Similar to ribosomal protein S3 [Xenopus laevis]
  misc_feature (1)..(206): Homolog of NCBI NO: 2500399 NR Description: 40S ribosomal protein S3
  misc_feature (1)..(179): Homolog of NCBI NO: 15718687 NR Description: ribosomal protein S3; 40S ribosomal protein S3
  misc_feature (1)..(179): Homolog of NCBI NO: 12847921 NR Description: unnamed protein product [Mus musculus]
  misc_feature (1)..(185): Homolog of NCBI NO: 133940 NR Description: 40S ribosomal protein S3A (S1A)
  misc_feature (1)..(179): Homolog of NCBI NO: 27735393 NR Description: Similar to ribosomal protein S3 [Xenopus laevis]
  misc_feature (1)..(179): Homolog of NCBI NO: 15718687 NR Description: ribosomal protein S3; 40S ribosomal protein S3
  misc_feature (1)..(185): Homolog of NCBI NO: 133940 NR Description: 40S ribosomal protein S3A (S1A)
  misc_feature (1)..(179): Homolog of NCBI NO: 12847921 NR Description: unnamed protein product [Mus musculus]
  misc_feature (1)..(179): Homolog of NCBI NO: 15718687 NR Description: ribosomal protein S3; 40S ribosomal protein S3
  misc_feature (1)..(206): Homolog of NCBI NO: 2500399 NR Description: 40S ribosomal protein S3
  misc_feature (1)..(179): Homolog of NCBI NO: 27735393 NR Description: Similar to ribosomal protein S3 [Xenopus laevis]
  misc_feature (1)..(207): Homolog of NCBI NO: 15225107 NR Description: 40S ribosomal protein S3 (RPS3A) [Arabidopsis
  misc_feature (1)..(204): Homolog of NCBI NO: 15232352 NR Description: 40S ribosomal protein S3 (RPS3B) [Arabidopsis
  misc_feature (1)..(207): Homolog of NCBI NO: 15238533 NR Description: 40S ribosomal protein S3 (RPS3C) [Arabidopsis
  misc_feature (1)..(186): Homolog of NCBI NO: 14192875 NR Description: Putative 40S ribosomal protein; contains
  misc_feature (1)..(180): Homolog of NCBI NO: 22204124 NR Description: putative 40S ribosomal protein S3 [Triticum
  misc_feature (1)..(207): Homolog of NCBI NO: 15225107 NR Description: 40S ribosomal protein S3 (RPS3A) [Arabidopsis
  misc_feature (1)..(204): Homolog of NCBI NO: 15232352 NR Description: 40S ribosomal protein S3 (RPS3B) [Arabidopsis
  misc_feature (1)..(207): Homolog of NCBI NO: 15238533 NR Description: 40S ribosomal protein S3 (RPS3C) [Arabidopsis
  misc_feature (1)..(186): Homolog of NCBI NO: 14192875 NR Description: Putative 40S ribosomal protein; contains
  misc_feature (1)..(180): Homolog of NCBI NO: 22204124 NR Description: putative 40S ribosomal protein S3 [Triticum
  misc_feature (1)..(185): Homolog of NCBI NO: 133940 NR Description: 40S ribosomal protein S3A (S1A)
  misc_feature (1)..(179): Homolog of NCBI NO: 12847921 NR Description: unnamed protein product [Mus musculus]
  misc_feature (1)..(206): Homolog of NCBI NO: 2500399 NR Description: 40S ribosomal protein S3
  misc_feature (1)..(180): Homolog of NCBI NO: 22204124 NR Description: putative 40S ribosomal protein S3 [Triticum
  misc_feature (1)..(186): Homolog of NCBI NO: 14192875 NR Description: Putative 40S ribosomal protein; contains
  misc_feature (1)..(207): Homolog of NCBI NO: 15238533 NR Description: 40S ribosomal protein S3 (RPS3C) [Arabidopsis
  misc_feature (1)..(204): Homolog of NCBI NO: 15232352 NR Description: 40S ribosomal protein S3 (RPS3B) [Arabidopsis
  misc_feature (1)..(207): Homolog of NCBI NO: 15225107 NR Description: 40S ribosomal protein S3 (RPS3A) [Arabidopsis

SEQ ID NO: 47321 - DNA, 1744 bp, Arabidopsis thaliana
  misc_feature (1)..(1744): Ceres Seq. ID no. 13648298
  misc_feature: MA Experiment ID: 20000355 Result: Up-regulated in Transcription
  misc_feature: MA Experiment 20000355 PARAMETER Experiment Name: At_Siliques_Sub_P Parameter: Age (day) Value: 21
  misc_feature: MA Experiment 20000355 PARAMETER Experiment Name: At_Siliques_Sub_P Parameter: Organism Value: A. thaliana
  misc_feature: MA Experiment 20000355 PARAMETER Experiment Name: At_Siliques_Sub_P Parameter: Plant Line Value: WS
  misc_feature: MA Experiment 20000355 PARAMETER Experiment Name: At_Siliques_Sub_P Parameter: Tissue Value: Less Than 5mm Siliques vs. Whole Plant
  misc_feature: MA Experiment ID: 20000440 Result: Up-regulated in Transcription
  misc_feature: MA Experiment 20000440 PARAMETER Experiment Name: At_Closed-Flower__Sub_P Parameter: Tissue Value: Closed Flower vs. Whole Plant
gaagtggcaaactcatttttgtttgttccttctttcttttgaggccaaaagagaccagattcatttttggtttcttcaaaggccaaaccttattttcttattttctcagacaaacccttttgccatattacaaaataaaatttattcgtctgagaattatcttgatcccttttggattcgaggttcaagaacattcatgaacttcgagtaaatcaatcatcttcttgtagtaataatccaggaagatacattatcaacacacataaaacagaatgaaaatcaattgcttgttctgttgtatgtcccacagacgatttaacagacgatcatcatcgagacaaagcatcaaagactgcattgatgcaaagaacaatataactacatttgacaacatctcttttaaaacagatagcagtaggcgaagatacatatccgaggagatagcaaaactcggtaaagggaacatcagtgctcatatttttacattcagagagctttgcgtcgctaccaagaacttcaaccccgataatcagctcggtgaaggcgggtttggaagggtttacaaagggcagatagaaaccccggaacaagttgttgcggttaagcagctagacaggaatggttaccaagggaacagagagtttcttgtggaagtcatgatgttgagtctcttacatcatcaaaaccttgtcaatttggtcggatattgcgcagacggtgatcaacggattcttgtctatgaatacatgcaaaatggctctttagaggatcatcttctagaattggcgcggaacaagaagaagccgttggattgggacacaagaatgaaagttgcggcaggagcagctagagggcttgagtatctacacgaaacagcagatcctcctgttatctacagagacttcaaggcctcaaatatattacttgacgaagaattcaacccaaagctttcggatttcggtttagctaaggttggtccgaccggtggagagactcatgtgtcaacgagagtgatgggaacatacggctattgtgcgcctgagtatgctctcacaggacagctcactgtgaaatccgatgtatacagcttcggagtcgtgttcttggagatgatcacaggaagacgagtcattgacacaacaaaaccaactgaagaacagaacttagtcacttgggcgagtccattgttcaaagataggagaaagttcacgttaatggcagatccattgcttgaaggaaagtatccaataaaaggattgtatcaagcgcttgcagtagcagcaatgtgtcttcaagaagaagcagcaacgagaccaatgatgagtgatgtagtcactgcgcttgagtacttagccgtgaccaaaaccgaagaagatggacaaactgtagaaggagaagaagaagaagaagaagaagacgaaagatccaaactttgagcaaatttttttgtttgttttcgtttgtaattttcaaatgatcggttttaggaaatttgataactttacgaattcaccaatgaaaaaagaagattaaatgagagttttcgtgttycccmatcgaacattttaaaggatttgctgagaattttgtaaaaaaaaaaaaaaaaaaaaaaaaaaaaaaaaaaaaaaaaaaaaaaaaaaaaagaaaaaaaaaaaaaaaaaaacctcgrgggggggcccggaacccawttcccccaawagggagccgaataacaattcatgggccgccgtttaacaacgccggg

SEQ ID NO: 47322 - protein, 387 aa, Arabidopsis thaliana
  peptide (1)..(387): Ceres Seq. ID no. 15219538
  misc_feature (44)..(361): Homolog of NCBI NO: 34899302 NR Description: putative protein serine/threonine kinase
  misc_feature (44)..(361): Homolog of NCBI NO: 34395193 NR Description: putative protein serine/threonine kinase
  misc_feature (18)..(386): Homolog of NCBI NO: 30679773 NR Description: protein kinase family [Arabidopsis thaliana]
  misc_feature (18)..(387): Homolog of NCBI NO: 11259782 NR Description: protein kinase-like - Arabidopsis thaliana
  misc_feature (39)..(361): Homolog of NCBI NO: 15240038 NR Description: protein kinase family [Arabidopsis thaliana]
  misc_feature (64)..(373): Homolog of NCBI NO: 34907210 NR Description: putative serine/threonine kinase PBS1 protein
  misc_feature (5)..(361): Homolog of NCBI NO: 15238886 NR Description: protein kinase family [Arabidopsis thaliana]
  misc_feature (10)..(387): Homolog of NCBI NO: 11994140 NR Description: receptor protein kinase-like protein [Arabidopsis
  misc_feature (1)..(387): Homolog of NCBI NO: 28392990 NR Description: putative protein kinase [Arabidopsis thaliana]
  misc_feature (1)..(387): Homolog of NCBI NO: 15232294 NR Description: protein kinase family [Arabidopsis thaliana]
MKINCLFCCMSHRRFNRRSSSRQSIKDCIDAKNNITTFDNISFKTDSSRRRYISEEIAKLGKGNISAHIFTFRELCVATKNFNPDNQLGEGGFGRVYKGQIETPEQVVAVKQLDRNGYQGNREFLVEVMMLSLLHHQNLVNLVGYCADGDQRILVYEYMQNGSLEDHLLELARNKKKPLDWDTRMKVAAGAARGLEYLHETADPPVIYRDFKASNILLDEEFNPKLSDFGLAKVGPTGGETHVSTRVMGTYGYCAPEYALTGQLTVKSDVYSFGVVFLEMITGRRVIDTTKPTEEQNLVTWASPLFKDRRKFTLMADPLLEGKYPIKGLYQALAVAAMCLQEEAATRPMMSDVVTALEYLAVTKTEEDGQTVEGEEEEEEEDERSKL

SEQ ID NO: 47323 - protein, 378 aa, Arabidopsis thaliana
  peptide (1)..(378): Ceres Seq. ID no. 15219539
  misc_feature (35)..(352): Homolog of NCBI NO: 34899302 NR Description: putative protein serine/threonine kinase
  misc_feature (35)..(352): Homolog of NCBI NO: 34395193 NR Description: putative protein serine/threonine kinase
  misc_feature (9)..(377): Homolog of NCBI NO: 30679773 NR Description: protein kinase family [Arabidopsis thaliana]
  misc_feature (9)..(378): Homolog of NCBI NO: 11259782 NR Description: protein kinase-like - Arabidopsis thaliana
  misc_feature (30)..(352): Homolog of NCBI NO: 15240038 NR Description: protein kinase family [Arabidopsis thaliana]
  misc_feature (55)..(364): Homolog of NCBI NO: 34907210 NR Description: putative serine/threonine kinase PBS1 protein
  misc_feature (1)..(352): Homolog of NCBI NO: 15238886 NR Description: protein kinase family [Arabidopsis thaliana]
  misc_feature (1)..(378): Homolog of NCBI NO: 11994140 NR Description: receptor protein kinase-like protein [Arabidopsis
  misc_feature (1)..(378): Homolog of NCBI NO: 28392990 NR Description: putative protein kinase [Arabidopsis thaliana]
  misc_feature (1)..(378): Homolog of NCBI NO: 15232294 NR Description: protein kinase family [Arabidopsis thaliana]
MSHRRFNRRSSSRQSIKDCIDAKNNITTFDNISFKTDSSRRRYISEEIAKLGKGNISAHIFTFRELCVATKNFNPDNQLGEGGFGRVYKGQIETPEQVVAVKQLDRNGYQGNREFLVEVMMLSLLHHQNLVNLVGYCADGDQRILVYEYMQNGSLEDHLLELARNKKKPLDWDTRMKVAAGAARGLEYLHETADPPVIYRDFKASNILLDEEFNPKLSDFGLAKVGPTGGETHVSTRVMGTYGYCAPEYALTGQLTVKSDVYSFGVVFLEMITGRRVIDTTKPTEEQNLVTWASPLFKDRRKFTLMADPLLEGKYPIKGLYQALAVAAMCLQEEAATRPMMSDVVTALEYLAVTKTEEDGQTVEGEEEEEEEDERSKL

SEQ ID NO: 47324 - protein, 259 aa, Arabidopsis thaliana
  peptide (1)..(259): Ceres Seq. ID no. 15219540
  misc_feature (1)..(233): Homolog of NCBI NO: 34899302 NR Description: putative protein serine/threonine kinase
  misc_feature (1)..(233): Homolog of NCBI NO: 34395193 NR Description: putative protein serine/threonine kinase
  misc_feature (1)..(258): Homolog of NCBI NO: 30679773 NR Description: protein kinase family [Arabidopsis thaliana]
  misc_feature (1)..(259): Homolog of NCBI NO: 11259782 NR Description: protein kinase-like - Arabidopsis thaliana
  misc_feature (1)..(233): Homolog of NCBI NO: 15240038 NR Description: protein kinase family [Arabidopsis thaliana]
  misc_feature (1)..(245): Homolog of NCBI NO: 34907210 NR Description: putative serine/threonine kinase PBS1 protein
  misc_feature (1)..(233): Homolog of NCBI NO: 15238886 NR Description: protein kinase family [Arabidopsis thaliana]
  misc_feature (1)..(259): Homolog of NCBI NO: 11994140 NR Description: receptor protein kinase-like protein [Arabidopsis
  misc_feature (1)..(259): Homolog of NCBI NO: 28392990 NR Description: putative protein kinase [Arabidopsis thaliana]
  misc_feature (1)..(259): Homolog of NCBI NO: 15232294 NR Description: protein kinase family [Arabidopsis thaliana]
MMLSLLHHQNLVNLVGYCADGDQRILVYEYMQNGSLEDHLLELARNKKKPLDWDTRMKVAAGAARGLEYLHETADPPVIYRDFKASNILLDEEFNPKLSDFGLAKVGPTGGETHVSTRVMGTYGYCAPEYALTGQLTVKSDVYSFGVVFLEMITGRRVIDTTKPTEEQNLVTWASPLFKDRRKFTLMADPLLEGKYPIKGLYQALAVAAMCLQEEAATRPMMSDVVTALEYLAVTKTEEDGQTVEGEEEEEEEDERSKL

SEQ ID NO: 47325 - DNA, 2036 bp, Arabidopsis thaliana
  misc_feature (1)..(2036): Ceres Seq. ID no. 13592107
  misc_feature: MA Experiment ID: 20000234 Result: Up-regulated in Transcription
  misc_feature: MA Experiment 20000234 PARAMETER Experiment Name: At_Siliques_P Parameter: Age (day) Value: 21
  misc_feature: MA Experiment 20000234 PARAMETER Experiment Name: At_Siliques_P Parameter: Organism Value: A. thaliana
  misc_feature: MA Experiment 20000234 PARAMETER Experiment Name: At_Siliques_P Parameter: Plant Line Value: WS
  misc_feature: MA Experiment 20000234 PARAMETER Experiment Name: At_Siliques_P Parameter: Tissue Value: Less Than 5mm Siliques vs. Whole Plant
  misc_feature: MA Experiment ID: 20000496 Result: Up-regulated in Transcription
  misc_feature: MA Experiment 20000496 PARAMETER Experiment Name: At_Guard_Cells_P Parameter: Harvest Date Value: 7/19/2002
  misc_feature: MA Experiment 20000496 PARAMETER Experiment Name: At_Guard_Cells_P Parameter: Organism Value: Canola
  misc_feature: MA Experiment 20000496 PARAMETER Experiment Name: At_Guard_Cells_P Parameter: Tissue Value: Guard Cells vs. Leaves
aagctagttcgaagactggtccgaaaaatctgacaaggatgaagcaatcaagtgtcgtcgatctgttacttcttctcctggcgatcgctcttcttgcgacgccggcgttctccgatctggttttatccaaagtcgaacgtcgtatcgatgtgacttcacagattgctcgtgttactaagacccttaaggttgtaaattctggctctgaatcagtttctgagtttgctttgacattcccaaagtttcttggtaacaacttggcttatctatcggttgctcctagtgagggaaaggggaaatctaaacgaactttagtgaatctctctgtgagagaagctgatcagaaaggtttacctgattcaattagtgtttactcagttgcattacccaaaccactgagtaaaggcgatactttgacgctggaggtagttgctgcattcaccaatgtacttcagccatttcctgaaaagataactcagggtgaaatccatcttgttatgctccaagaaagcgcacaatatctctctccttacgcggttgagtctcagtcattgtctatcaaactaccgaatgccagaatcgaatcttacaccaaattcgagaatacaaagctccagggatcagagctcaaatatggtccttacaagaatctccagtcgtattcatactctccaattgttgtccactttgaaagcaaggctgcatttgctgtggctgagaagcttgtgcgagagatagaagtgtctcattgggggaatgtgcaggtcacggagaattacaatgttgtccaccgtggggctcaactcaagggcgagttttcaaggttagattttcaagccagacctaatccccgtggagcatctgcctttaggcatttacttgctagattaccccccagagcccattccatatattacagggatgatattggaaatatctccacgtctgagatgaaaagtgattcgaaaaagacagagctactaattgagcctaggtttcctttgtttggtgggtggaaaacttttttcacgataggttatggtttgccacttaccgacttcttgtttgcttcggaaggaaagcgattccttaatatctcctttggctcccctatacttgaccttgtcactgaaaaacttattgtacaggtggttttacctgaggggtcaaaggatatatcagttaccactccattcgccgtcaagcagtctcaagagatcaaatattcacatttagatatagctggtagaccagttgttgtgctcgaaaagaacaacgttgtccctgatcacaatcagcatatccaggtctactataagttcagcaacatcaatctgctgagtgagccattgatgttaatctctggatttttcattttgttcatcacttgcatcatatacacacgggctgacatctcaatctccaagtcctctccgagttatttggcgaaacttcaatgggatgaggtcctagcaacactccaggaagtccaaagcatcgtccaaaaatgcttagccacacatgataagcttgaagcatcgctgcgtgatctctcaagaactggtgacattcaaacctgcaaagcagctcgcaaatccactgacagtttactgaaagatctttcgaaagaactgaaaccgttgctgggtttcttacagtctttcccatcagcctctcacatatctccaaaggtcgaggagctagttgtgaaagagaaagaacttcaagagaagttaatggccaaacataccactgttgttgaagggtacgaaaagaaatcctcagggcgtgatatcgaaaaccggatcgcttctcagcagcaaaagatcatagctttgaggcaagaaattgaagatcttctagaattcattgatgagatctagaaaagttaaatgtagcaaatcctcttacgcttaaataccagacttttgaactcactcccattagaaaaattttgttcctcaatgagcagtgtttatcaactttgaaagacagctctagtttctctgagtttaacaaatgaatcatattatctt

SEQ ID NO: 47326 - protein, 626 aa, Arabidopsis thaliana
  peptide (1)..(626): Ceres Seq. ID no. 13592108
  misc_feature (38)..(468): Pfam Name: Ribophorin I Pfam Description: Ribophorin I
  misc_feature (38)..(468): Pfam Name: Ribophorin I Pfam Description: Ribophorin I
  misc_feature (24)..(611): Homolog of NCBI NO: 39593466 NR Description: Hypothetical protein CBG05717 [Caenorhabditis
  misc_feature (25)..(620): Homolog of NCBI NO: 40674542 NR Description: Unknown (protein for MGC:76266) [Silurana
  misc_feature (15)..(620): Homolog of NCBI NO: 28175644 NR Description: Similar to ribophorin I [Xenopus laevis]
  misc_feature (15)..(620): Homolog of NCBI NO: 28277278 NR Description: Similar to ribophorin I [Xenopus laevis]
  misc_feature (21)..(620): Homolog of NCBI NO: 6981486 NR Description: ribophorin I [Rattus norvegicus]
  misc_feature (24)..(611): Homolog of NCBI NO: 39593466 NR Description: Hypothetical protein CBG05717 [Caenorhabditis
  misc_feature (15)..(620): Homolog of NCBI NO: 28175644 NR Description: Similar to ribophorin I [Xenopus laevis]
  misc_feature (21)..(620): Homolog of NCBI NO: 6981486 NR Description: ribophorin I [Rattus norvegicus]
  misc_feature (22)..(488): Homolog of NCBI NO: 7489438 NR Description: ribophorin I homolog - barley (fragment)
  misc_feature (19)..(473): Homolog of NCBI NO: 15226341 NR Description: ribophorin I -related [Arabidopsis thaliana]
  misc_feature (362)..(626): Homolog of NCBI NO: 5918187 NR Description: ribophorin I [Hordeum vulgare]
  misc_feature (15)..(620): Homolog of NCBI NO: 38512106 NR Description: Ribophorin I [Rattus norvegicus]
  misc_feature (18)..(620): Homolog of NCBI NO: 9857227 NR Description: ribophorin I [Sus scrofa]
  misc_feature (15)..(620): Homolog of NCBI NO: 28277278 NR Description: Similar to ribophorin I [Xenopus laevis]
  misc_feature (25)..(620): Homolog of NCBI NO: 40674542 NR Description: Unknown (protein for MGC:76266) [Silurana
  misc_feature (18)..(620): Homolog of NCBI NO: 9857227 NR Description: ribophorin I [Sus scrofa]
  misc_feature (15)..(620): Homolog of NCBI NO: 38512106 NR Description: Ribophorin I [Rattus norvegicus]
  misc_feature (362)..(626): Homolog of NCBI NO: 5918187 NR Description: ribophorin I [Hordeum vulgare]
  misc_feature (19)..(473): Homolog of NCBI NO: 15226341 NR Description: ribophorin I -related [Arabidopsis thaliana]
  misc_feature (22)..(488): Homolog of NCBI NO: 7489438 NR Description: ribophorin I homolog - barley (fragment)
ASSKTGPKNLTRMKQSSVVDLLLLLLAIALLATPAFSDLVLSKVERRIDVTSQIARVTKTLKVVNSGSESVSEFALTFPKFLGNNLAYLSVAPSEGKGKSKRTLVNLSVREADQKGLPDSISVYSVALPKPLSKGDTLTLEVVAAFTNVLQPFPEKITQGEIHLVMLQESAQYLSPYAVESQSLSIKLPNARIESYTKFENTKLQGSELKYGPYKNLQSYSYSPIVVHFESKAAFAVAEKLVREIEVSHWGNVQVTENYNVVHRGAQLKGEFSRLDFQARPNPRGASAFRHLLARLPPRAHSIYYRDDIGNISTSEMKSDSKKTELLIEPRFPLFGGWKTFFTIGYGLPLTDFLFASEGKRFLNISFGSPILDLVTEKLIVQVVLPEGSKDISVTTPFAVKQSQEIKYSHLDIAGRPVVVLEKNNVVPDHNQHIQVYYKFSNINLLSEPLMLISGFFILFITCIIYTRADISISKSSPSYLAKLQWDEVLATLQEVQSIVQKCLATHDKLEASLRDLSRTGDIQTCKAARKSTDSLLKDLSKELKPLLGFLQSFPSASHISPKVEELVVKEKELQEKLMAKHTTVVEGYEKKSSGRDIENRIASQQQKIIALRQEIEDLLEFIDEI

SEQ ID NO: 47327 - protein, 614 aa, Arabidopsis thaliana
  peptide (1)..(614): Ceres Seq. ID no. 13592109
  misc_feature (26)..(456): Pfam Name: Ribophorin I Pfam Description: Ribophorin I
  misc_feature (26)..(456): Pfam Name: Ribophorin I Pfam Description: Ribophorin I
  misc_feature (12)..(599): Homolog of NCBI NO: 39593466 NR Description: Hypothetical protein CBG05717 [Caenorhabditis
  misc_feature (13)..(608): Homolog of NCBI NO: 40674542 NR Description: Unknown (protein for MGC:76266) [Silurana
  misc_feature (3)..(608): Homolog of NCBI NO: 28175644 NR Description: Similar to ribophorin I [Xenopus laevis]
  misc_feature (3)..(608): Homolog of NCBI NO: 28277278 NR Description: Similar to ribophorin I [Xenopus laevis]
  misc_feature (9)..(608): Homolog of NCBI NO: 6981486 NR Description: ribophorin I [Rattus norvegicus]
  misc_feature (12)..(599): Homolog of NCBI NO: 39593466 NR Description: Hypothetical protein CBG05717 [Caenorhabditis
  misc_feature (3)..(608): Homolog of NCBI NO: 28175644 NR Description: Similar to ribophorin I [Xenopus laevis]
  misc_feature (9)..(608): Homolog of NCBI NO: 6981486 NR Description: ribophorin I [Rattus norvegicus]
  misc_feature (10)..(476): Homolog of NCBI NO: 7489438 NR Description: ribophorin I homolog - barley (fragment)
  misc_feature (7)..(461): Homolog of NCBI NO: 15226341 NR Description: ribophorin I -related [Arabidopsis thaliana]
  misc_feature (350)..(614): Homolog of NCBI NO: 5918187 NR Description: ribophorin I [Hordeum vulgare]
  misc_feature (3)..(608): Homolog of NCBI NO: 38512106 NR Description: Ribophorin I [Rattus norvegicus]
  misc_feature (6)..(608): Homolog of NCBI NO: 9857227 NR Description: ribophorin I [Sus scrofa]
  misc_feature (3)..(608): Homolog of NCBI NO: 28277278 NR Description: Similar to ribophorin I [Xenopus laevis]
  misc_feature (13)..(608): Homolog of NCBI NO: 40674542 NR Description: Unknown (protein for MGC:76266) [Silurana
  misc_feature (6)..(608): Homolog of NCBI NO: 9857227 NR Description: ribophorin I [Sus scrofa]
  misc_feature (3)..(608): Homolog of NCBI NO: 38512106 NR Description: Ribophorin I [Rattus norvegicus]
  misc_feature (350)..(614): Homolog of NCBI NO: 5918187 NR Description: ribophorin I [Hordeum vulgare]
  misc_feature (7)..(461): Homolog of NCBI NO: 15226341 NR Description: ribophorin I -related [Arabidopsis thaliana]
  misc_feature (10)..(476): Homolog of NCBI NO: 7489438 NR Description: ribophorin I homolog - barley (fragment)
MKQSSVVDLLLLLLAIALLATPAFSDLVLSKVERRIDVTSQIARVTKTLKVVNSGSESVSEFALTFPKFLGNNLAYLSVAPSEGKGKSKRTLVNLSVREADQKGLPDSISVYSVALPKPLSKGDTLTLEVVAAFTNVLQPFPEKITQGEIHLVMLQESAQYLSPYAVESQSLSIKLPNARIESYTKFENTKLQGSELKYGPYKNLQSYSYSPIVVHFESKAAFAVAEKLVREIEVSHWGNVQVTENYNVVHRGAQLKGEFSRLDFQARPNPRGASAFRHLLARLPPRAHSIYYRDDIGNISTSEMKSDSKKTELLIEPRFPLFGGWKTFFTIGYGLPLTDFLFASEGKRFLNISFGSPILDLVTEKLIVQVVLPEGSKDISVTTPFAVKQSQEIKYSHLDIAGRPVVVLEKNNVVPDHNQHIQVYYKFSNINLLSEPLMLISGFFILFITCIIYTRADISISKSSPSYLAKLQWDEVLATLQEVQSIVQKCLATHDKLEASLRDLSRTGDIQTCKAARKSTDSLLKDLSKELKPLLGFLQSFPSASHISPKVEELVVKEKELQEKLMAKHTTVVEGYEKKSSGRDIENRIASQQQKIIALRQEIEDLLEFIDEI

SEQ ID NO: 47328 - protein, 461 aa, Arabidopsis thaliana
  peptide (1)..(461): Ceres Seq. ID no. 13592110
  misc_feature (1)..(303): Pfam Name: Ribophorin I Pfam Description: Ribophorin I
  misc_feature (1)..(303): Pfam Name: Ribophorin I Pfam Description: Ribophorin I
  misc_feature (1)..(446): Homolog of NCBI NO: 39593466 NR Description: Hypothetical protein CBG05717 [Caenorhabditis
  misc_feature (1)..(455): Homolog of NCBI NO: 40674542 NR Description: Unknown (protein for MGC:76266) [Silurana
  misc_feature (1)..(455): Homolog of NCBI NO: 28175644 NR Description: Similar to ribophorin I [Xenopus laevis]
  misc_feature (1)..(455): Homolog of NCBI NO: 28277278 NR Description: Similar to ribophorin I [Xenopus laevis]
  misc_feature (1)..(455): Homolog of NCBI NO: 6981486 NR Description: ribophorin I [Rattus norvegicus]
  misc_feature (1)..(446): Homolog of NCBI NO: 39593466 NR Description: Hypothetical protein CBG05717 [Caenorhabditis
  misc_feature (1)..(455): Homolog of NCBI NO: 28175644 NR Description: Similar to ribophorin I [Xenopus laevis]
  misc_feature (1)..(455): Homolog of NCBI NO: 6981486 NR Description: ribophorin I [Rattus norvegicus]
  misc_feature (1)..(323): Homolog of NCBI NO: 7489438 NR Description: ribophorin I homolog - barley (fragment)
  misc_feature (1)..(308): Homolog of NCBI NO: 15226341 NR Description: ribophorin I -related [Arabidopsis thaliana]
  misc_feature (197)..(461): Homolog of NCBI NO: 5918187 NR Description: ribophorin I [Hordeum vulgare]
  misc_feature (1)..(455): Homolog of NCBI NO: 38512106 NR Description: Ribophorin I [Rattus norvegicus]
  misc_feature (1)..(455): Homolog of NCBI NO: 9857227 NR Description: ribophorin I [Sus scrofa]
  misc_feature (1)..(455): Homolog of NCBI NO: 28277278 NR Description: Similar to ribophorin I [Xenopus laevis]
  misc_feature (1)..(455): Homolog of NCBI NO: 40674542 NR Description: Unknown (protein for MGC:76266) [Silurana
  misc_feature (1)..(455): Homolog of NCBI NO: 9857227 NR Description: ribophorin I [Sus scrofa]
  misc_feature (1)..(455): Homolog of NCBI NO: 38512106 NR Description: Ribophorin I [Rattus norvegicus]
  misc_feature (197)..(461): Homolog of NCBI NO: 5918187 NR Description: ribophorin I [Hordeum vulgare]
  misc_feature (1)..(308): Homolog of NCBI NO: 15226341 NR Description: ribophorin I -related [Arabidopsis thaliana]
  misc_feature (1)..(323): Homolog of NCBI NO: 7489438 NR Description: ribophorin I homolog - barley (fragment)
MLQESAQYLSPYAVESQSLSIKLPNARIESYTKFENTKLQGSELKYGPYKNLQSYSYSPIVVHFESKAAFAVAEKLVREIEVSHWGNVQVTENYNVVHRGAQLKGEFSRLDFQARPNPRGASAFRHLLARLPPRAHSIYYRDDIGNISTSEMKSDSKKTELLIEPRFPLFGGWKTFFTIGYGLPLTDFLFASEGKRFLNISFGSPILDLVTEKLIVQVVLPEGSKDISVTTPFAVKQSQEIKYSHLDIAGRPVVVLEKNNVVPDHNQHIQVYYKFSNINLLSEPLMLISGFFILFITCIIYTRADISISKSSPSYLAKLQWDEVLATLQEVQSIVQKCLATHDKLEASLRDLSRTGDIQTCKAARKSTDSLLKDLSKELKPLLGFLQSFPSASHISPKVEELVVKEKELQEKLMAKHTTVVEGYEKKSSGRDIENRIASQQQKIIALRQEIEDLLEFIDEI

SEQ ID NO: 47329 - DNA, 1185 bp, Arabidopsis thaliana
  misc_feature (1)..(1185): Ceres Seq. ID no. 13588319
  misc_feature: MA Experiment ID: 20000171 Result: Down-regulated in Transcription
  misc_feature: MA Experiment 20000171 PARAMETER Experiment Name: At_42deg_Heat_P Parameter: Age (day) Value: 14
  misc_feature: MA Experiment 20000171 PARAMETER Experiment Name: At_42deg_Heat_P Parameter: Organism Value: A. thaliana
  misc_feature: MA Experiment 20000171 PARAMETER Experiment Name: At_42deg_Heat_P Parameter: Plant Line Value: WS
  misc_feature: MA Experiment 20000171 PARAMETER Experiment Name: At_42deg_Heat_P Parameter: Temperature (deg C) Value: 42 vs. 22
  misc_feature: MA Experiment 20000171 PARAMETER Experiment Name: At_42deg_Heat_P Parameter: Timepoint (hr) Value: 1
  misc_feature: MA Experiment 20000171 PARAMETER Experiment Name: At_42deg_Heat_P Parameter: Tissue Value: Aerial
  misc_feature: MA Experiment ID: 20000234 Result: Up-regulated in Transcription
  misc_feature: MA Experiment 20000234 PARAMETER Experiment Name: At_Siliques_P Parameter: Age (day) Value: 21
  misc_feature: MA Experiment 20000234 PARAMETER Experiment Name: At_Siliques_P Parameter: Organism Value: A. thaliana
  misc_feature: MA Experiment 20000234 PARAMETER Experiment Name: At_Siliques_P Parameter: Plant Line Value: WS
  misc_feature: MA Experiment 20000234 PARAMETER Experiment Name: At_Siliques_P Parameter: Tissue Value: Less Than 5mm Siliques vs. Whole Plant
  misc_feature: MA Experiment ID: 20000235 Result: Up-regulated in Transcription
  misc_feature: MA Experiment 20000235 PARAMETER Experiment Name: At_Siliques_P Parameter: Age (day) Value: 21
  misc_feature: MA Experiment 20000235 PARAMETER Experiment Name: At_Siliques_P Parameter: Organism Value: A. thaliana
  misc_feature: MA Experiment 20000235 PARAMETER Experiment Name: At_Siliques_P Parameter: Plant Line Value: WS
  misc_feature: MA Experiment 20000235 PARAMETER Experiment Name: At_Siliques_P Parameter: Tissue Value: 5-10mm Siliques vs. Whole Plant
  misc_feature: MA Experiment ID: 20000264 Result: Up-regulated in Transcription
  misc_feature: MA Experiment 20000264 PARAMETER Experiment Name: At_Open_Flower_P Parameter: Age (day) Value: 21
  misc_feature: MA Experiment 20000264 PARAMETER Experiment Name: At_Open_Flower_P Parameter: Plant Line Value: WS
  misc_feature: MA Experiment 20000264 PARAMETER Experiment Name: At_Open_Flower_P Parameter: Tissue Value: Open Flower vs. Whole Plant
  misc_feature: MA Experiment ID: 20000265 Result: Up-regulated in Transcription
  misc_feature: MA Experiment 20000265 PARAMETER Experiment Name: At_Open_Flower_P Parameter: Age (day) Value: 21
  misc_feature: MA Experiment 20000265 PARAMETER Experiment Name: At_Open_Flower_P Parameter: Plant Line Value: WS
  misc_feature: MA Experiment 20000265 PARAMETER Experiment Name: At_Open_Flower_P Parameter: Tissue Value: Closed Flower vs. Whole Plant
  misc_feature: MA Experiment ID: 20000436 Result: Down-regulated in Transcription
  misc_feature: MA Experiment 20000436 PARAMETER Experiment Name: At_Drought_P Parameter: Age (day) Value: 7
  misc_feature: MA Experiment 20000436 PARAMETER Experiment Name: At_Drought_P Parameter: Organism Value: A. thaliana
  misc_feature: MA Experiment 20000436 PARAMETER Experiment Name: At_Drought_P Parameter: Plant Line Value: WS
  misc_feature: MA Experiment 20000436 PARAMETER Experiment Name: At_Drought_P Parameter: Timepoint (hr) Value: 12
  misc_feature: MA Experiment 20000436 PARAMETER Experiment Name: At_Drought_P Parameter: Tissue Value: Whole Plant
  misc_feature: MA Experiment 20000436 PARAMETER Experiment Name: At_Drought_P Parameter: Treatment Value: Drought vs. No Drought
  misc_feature: MA Experiment ID: 20000437 Result: Down-regulated in Transcription
  misc_feature: MA Experiment 20000437 PARAMETER Experiment Name: At_Drought_P Parameter: Age (day) Value: 8
  misc_feature: MA Experiment 20000437 PARAMETER Experiment Name: At_Drought_P Parameter: Organism Value: A. thaliana
  misc_feature: MA Experiment 20000437 PARAMETER Experiment Name: At_Drought_P Parameter: Plant Line Value: WS
  misc_feature: MA Experiment 20000437 PARAMETER Experiment Name: At_Drought_P Parameter: Timepoint (hr) Value: 24
  misc_feature: MA Experiment 20000437 PARAMETER Experiment Name: At_Drought_P Parameter: Tissue Value: Whole Plant
  misc_feature: MA Experiment 20000437 PARAMETER Experiment Name: At_Drought_P Parameter: Treatment Value: Drought vs. No Drought
  misc_feature: MA Experiment ID: 20001451 Result: Down-regulated in Transcription
  misc_feature: MA Experiment 20001451 PARAMETER Experiment Name: At_Far-red-induction_P Parameter: Age (day) Value: 7
  misc_feature: MA Experiment 20001451 PARAMETER Experiment Name: At_Far-red-induction_P Parameter: Light Value: Far-red vs. White
  misc_feature: MA Experiment 20001451 PARAMETER Experiment Name: At_Far-red-induction_P Parameter: Organism Value: A. thaliana
  misc_feature: MA Experiment 20001451 PARAMETER Experiment Name: At_Far-red-induction_P Parameter: Plant Line Value: Columbia
  misc_feature: MA Experiment 20001451 PARAMETER Experiment Name: At_Far-red-induction_P Parameter: Timepoint (hr) Value: 24
  misc_feature: MA Experiment 20001451 PARAMETER Experiment Name: At_Far-red-induction_P Parameter: Tissue Value: Whole Plant
atgaagcgattcttcaagcccatagagaaggagaattctccggcggctaagaaaccctgcctttcgccggaaaagcgtgacggagacggagatggagttgaagaagagaagaaccagaacgagccgtccaagtttatgacgtggaacgctaatagcttcctccttcgggtgaaaaatgactggtctcagttctctaagttcgtctccgattttgaccccgatgtcatcgccatacaggaagtaaggatgcctgctgctggtggaaagggaaaacctaaaaaccatgaagagttgagtgatgacacgaaagttttgcgtgaggaaaaacagaatgcgggagccacttatggagtaacaaactctcttgttgtttggataacattcaagcttgatattagttctgggaaacttaacttgcagattttgacacgggctctctcaagtccaccatttggaaattatggggtttggtggtctctcgcggactcgaagtatgcagggacagctttgttagtgaaaaaatgtttcaagcctcgaaaagtttactttaacttggacaaattagcatctaaacatgaacctgatggtcgtgttatcttagctgaatttgagacatttcgtcttttgaatacgtattcgcctaacaatggttggaaagatgaagagaatgcgtttcagaggagaagaaaatgggacaagaggattgttgaattcctcaacaaaacatctgataaaccgctaatatggtgtggcgacttaaatgtcagtcatgaggagatagatgttagccacccagaattttttgctacagcaaagcttaatggttatgttcctccaaacaaagaggactgcggacagcctggatttacaccatctgagagaggacgcttcggggcaactataaaagaaggaaggcttgttgatgcataccggtatctacacaaggagcaagaaatggaaagtggcttctcatggtcggggaatcccattggaaagtaccggggaaagaggatgaggatcgactattttctggtctctgaacaactcaaagaccgtatagtttcttgtaagatgcacggtcgtgggatagaacttgaaggtttccatgggagtgatcattgtccggttacactcgagctttcgaagccatcttcagaaatggaacagaaccaggtgtcaaactaa

SEQ ID NO: 47330 - protein, 394 aa, Arabidopsis thaliana
  peptide (1)..(394): Ceres Seq. ID no. 13588320
  misc_feature (43)..(110): Pfam Name: Endonuclease/Exonuclease/phosphatase family Pfam Description: Endonuclease/Exonuclease/phosphatase family
  misc_feature (39)..(380): Homolog of NCBI NO: 23957727 NR Description: AP endonuclease (DNA-(apurinic or apyrimidinic
  misc_feature (11)..(382): Homolog of NCBI NO: 23490314 NR Description: putative AP endonuclease-related [Plasmodium
  misc_feature (330)..(380): Homolog of NCBI NO: 14578320 NR Description: PV1H14200_P [Plasmodium vivax]
  misc_feature (15)..(123): Homolog of NCBI NO: 14578320 NR Description: PV1H14200_P [Plasmodium vivax]
  misc_feature (136)..(327): Homolog of NCBI NO: 14578320 NR Description: PV1H14200_P [Plasmodium vivax]
  misc_feature (1)..(81): Homolog of NCBI NO: 18481705 NR Description: putative T29H11.60 protein [Sorghum bicolor]
  misc_feature (139)..(391): Homolog of NCBI NO: 18481705 NR Description: putative T29H11.60 protein [Sorghum bicolor]
  misc_feature (1)..(110): Homolog of NCBI NO: 7487536 NR Description: hypothetical protein T29H11.60 - Arabidopsis
  misc_feature (140)..(394): Homolog of NCBI NO: 7487536 NR Description: hypothetical protein T29H11.60 - Arabidopsis
  misc_feature (1)..(394): Homolog of NCBI NO: 18408629 NR Description: endonuclease/exonuclease/phosphatase family
MKRFFKPIEKENSPAAKKPCLSPEKRDGDGDGVEEEKNQNEPSKFMTWNANSFLLRVKNDWSQFSKFVSDFDPDVIAIQEVRMPAAGGKGKPKNHEELSDDTKVLREEKQNAGATYGVTNSLVVWITFKLDISSGKLNLQILTRALSSPPFGNYGVWWSLADSKYAGTALLVKKCFKPRKVYFNLDKLASKHEPDGRVILAEFETFRLLNTYSPNNGWKDEENAFQRRRKWDKRIVEFLNKTSDKPLIWCGDLNVSHEEIDVSHPEFFATAKLNGYVPPNKEDCGQPGFTPSERGRFGATIKEGRLVDAYRYLHKEQEMESGFSWSGNPIGKYRGKRMRIDYFLVSEQLKDRIVSCKMHGRGIELEGFHGSDHCPVTLELSKPSSEMEQNQVSN

SEQ ID NO: 47331 - protein, 349 aa, Arabidopsis thaliana
  peptide (1)..(349): Ceres Seq. ID no. 13588321
  misc_feature (1)..(65): Pfam Name: Endonuclease/Exonuclease/phosphatase family Pfam Description: Endonuclease/Exonuclease/phosphatase family
  misc_feature (1)..(335): Homolog of NCBI NO: 23957727 NR Description: AP endonuclease (DNA-(apurinic or apyrimidinic
  misc_feature (1)..(337): Homolog of NCBI NO: 23490314 NR Description: putative AP endonuclease-related [Plasmodium
  misc_feature (285)..(335): Homolog of NCBI NO: 14578320 NR Description: PV1H14200_P [Plasmodium vivax]
  misc_feature (1)..(78): Homolog of NCBI NO: 14578320 NR Description: PV1H14200_P [Plasmodium vivax]
  misc_feature (91)..(282): Homolog of NCBI NO: 14578320 NR Description: PV1H14200_P [Plasmodium vivax]
  misc_feature (1)..(36): Homolog of NCBI NO: 18481705 NR Description: putative T29H11.60 protein [Sorghum bicolor]
  misc_feature (94)..(346): Homolog of NCBI NO: 18481705 NR Description: putative T29H11.60 protein [Sorghum bicolor]
  misc_feature (1)..(65): Homolog of NCBI NO: 7487536 NR Description: hypothetical protein T29H11.60 - Arabidopsis
  misc_feature (95)..(349): Homolog of NCBI NO: 7487536 NR Description: hypothetical protein T29H11.60 - Arabidopsis
  misc_feature (1)..(349): Homolog of NCBI NO: 18408629 NR Description: endonuclease/exonuclease/phosphatase family
MTWNANSFLLRVKNDWSQFSKFVSDFDPDVIAIQEVRMPAAGGKGKPKNHEELSDDTKVLREEKQNAGATYGVTNSLVVWITFKLDISSGKLNLQILTRALSSPPFGNYGVWWSLADSKYAGTALLVKKCFKPRKVYFNLDKLASKHEPDGRVILAEFETFRLLNTYSPNNGWKDEENAFQRRRKWDKRIVEFLNKTSDKPLIWCGDLNVSHEEIDVSHPEFFATAKLNGYVPPNKEDCGQPGFTPSERGRFGATIKEGRLVDAYRYLHKEQEMESGFSWSGNPIGKYRGKRMRIDYFLVSEQLKDRIVSCKMHGRGIELEGFHGSDHCPVTLELSKPSSEMEQNQVSN

SEQ ID NO: 47332 - protein, 312 aa, Arabidopsis thaliana
  peptide (1)..(312): Ceres Seq. ID no. 13588322
  misc_feature (58)..(298): Pfam Name: Endonuclease/Exonuclease/phosphatase family Pfam Description: Endonuclease/Exonuclease/phosphatase family
  misc_feature (79)..(277): Homolog of NCBI NO: 28829076 NR Description: similar to Dictyostelium discoideum (Slime mold). or apyrimidinic site) lyase (EC 4.2.99.18) (Class II
  misc_feature (1)..(298): Homolog of NCBI NO: 23957727 NR Description: AP endonuclease (DNA-(apurinic or apyrimidinic
  misc_feature (1)..(300): Homolog of NCBI NO: 23490314 NR Description: putative AP endonuclease-related [Plasmodium
  misc_feature (248)..(298): Homolog of NCBI NO: 14578320 NR Description: PV1H14200_P [Plasmodium vivax]
  misc_feature (1)..(41): Homolog of NCBI NO: 14578320 NR Description: PV1H14200_P [Plasmodium vivax]
  misc_feature (54)..(245): Homolog of NCBI NO: 14578320 NR Description: PV1H14200_P [Plasmodium vivax]
  misc_feature (57)..(309): Homolog of NCBI NO: 18481705 NR Description: putative T29H11.60 protein [Sorghum bicolor]
  misc_feature (1)..(28): Homolog of NCBI NO: 7487536 NR Description: hypothetical protein T29H11.60 - Arabidopsis
  misc_feature (58)..(312): Homolog of NCBI NO: 7487536 NR Description: hypothetical protein T29H11.60 - Arabidopsis
  misc_feature (1)..(312): Homolog of NCBI NO: 18408629 NR Description: endonuclease/exonuclease/phosphatase family
MPAAGGKGKPKNHEELSDDTKVLREEKQNAGATYGVTNSLVVWITFKLDISSGKLNLQILTRALSSPPFGNYGVWWSLADSKYAGTALLVKKCFKPRKVYFNLDKLASKHEPDGRVILAEFETFRLLNTYSPNNGWKDEENAFQRRRKWDKRIVEFLNKTSDKPLIWCGDLNVSHEEIDVSHPEFFATAKLNGYVPPNKEDCGQPGFTPSERGRFGATIKEGRLVDAYRYLHKEQEMESGFSWSGNPIGKYRGKRMRIDYFLVSEQLKDRIVSCKMHGRGIELEGFHGSDHCPVTLELSKPSSEMEQNQVSN

SEQ ID NO: 47333 - DNA, 1722 bp, Arabidopsis thaliana
  misc_feature (1)..(1722): Ceres Seq. ID no. 13648313
  misc_feature: MA Experiment ID: 20000184 Result: Down-regulated in Transcription
  misc_feature: MA Experiment 20000184 PARAMETER Experiment Name: At_Shoots__P Parameter: Age (day) Value: 7
  misc_feature: MA Experiment 20000184 PARAMETER Experiment Name: At_Shoots__P Parameter: Tissue Value: Shoots vs. Whole Plant
  misc_feature: MA Experiment ID: 20000264 Result: Up-regulated in Transcription
  misc_feature: MA Experiment 20000264 PARAMETER Experiment Name: At_Open_Flower_P Parameter: Age (day) Value: 21
  misc_feature: MA Experiment 20000264 PARAMETER Experiment Name: At_Open_Flower_P Parameter: Plant Line Value: WS
  misc_feature: MA Experiment 20000264 PARAMETER Experiment Name: At_Open_Flower_P Parameter: Tissue Value: Open Flower vs. Whole Plant
  misc_feature: MA Experiment ID: 20000265 Result: Up-regulated in Transcription
  misc_feature: MA Experiment 20000265 PARAMETER Experiment Name: At_Open_Flower_P Parameter: Age (day) Value: 21
  misc_feature: MA Experiment 20000265 PARAMETER Experiment Name: At_Open_Flower_P Parameter: Plant Line Value: WS
  misc_feature: MA Experiment 20000265 PARAMETER Experiment Name: At_Open_Flower_P Parameter: Tissue Value: Closed Flower vs. Whole Plant
  misc_feature: MA Experiment ID: 20000286 Result: Up-regulated in Transcription
  misc_feature: MA Experiment 20000286 PARAMETER Experiment Name: At_Open_Flower_P Parameter: Age (day) Value: 21
  misc_feature: MA Experiment 20000286 PARAMETER Experiment Name: At_Open_Flower_P Parameter: Plant Line Value: WS
  misc_feature: MA Experiment 20000286 PARAMETER Experiment Name: At_Open_Flower_P Parameter: Tissue Value: Half Open vs. Whole Plant
  misc_feature: MA Experiment ID: 20000443 Result: Down-regulated in Transcription
  misc_feature: MA Experiment 20000443 PARAMETER Experiment Name: At_1uM_BR-BRZ__P Parameter: Tissue Value: Shoot Apices
  misc_feature: MA Experiment 20000443 PARAMETER Experiment Name: At_1uM_BR-BRZ__P Parameter: Treatment Value: 1uM BRZ vs. No Treatment
  misc_feature: MA Experiment ID: 20000794 Result: Up-regulated in Transcription
  misc_feature: MA Experiment 20000794 PARAMETER Experiment Name: At_Petals_P Parameter: Age (day) Value: 23-25 days
  misc_feature: MA Experiment 20000794 PARAMETER Experiment Name: At_Petals_P Parameter: Plant Line Value: WS
  misc_feature: MA Experiment 20000794 PARAMETER Experiment Name: At_Petals_P Parameter: Tissue Value: Petals vs. Whole plant
  misc_feature: MA Experiment ID: 20001773 Result: Up-regulated in Transcription
  misc_feature: MA Experiment 20001773 PARAMETER Experiment Name: At_Far-red-enriched-adult_P Parameter: Age (day) Value: 30
  misc_feature: MA Experiment 20001773 PARAMETER Experiment Name: At_Far-red-enriched-adult_P Parameter: Light Value: Far-red enriched vs. White
  misc_feature: MA Experiment 20001773 PARAMETER Experiment Name: At_Far-red-enriched-adult_P Parameter: Organism Value: A. thaliana
  misc_feature: MA Experiment 20001773 PARAMETER Experiment Name: At_Far-red-enriched-adult_P Parameter: Plant Line Value: Columbia
  misc_feature: MA Experiment 20001773 PARAMETER Experiment Name: At_Far-red-enriched-adult_P Parameter: Timepoint (hr) Value: 48
  misc_feature: MA Experiment 20001773 PARAMETER Experiment Name: At_Far-red-enriched-adult_P Parameter: Tissue Value: Aerial
  misc_feature: MA Experiment ID: 20001904 Result: Up-regulated in Transcription
  misc_feature: MA Experiment 20001904 PARAMETER Experiment Name: At_Drought_Reproduction_P Parameter: Age (day) Value: 37
  misc_feature: MA Experiment 20001904 PARAMETER Experiment Name: At_Drought_Reproduction_P Parameter: Organism Value: A. thaliana
  misc_feature: MA Experiment 20001904 PARAMETER Experiment Name: At_Drought_Reproduction_P Parameter: Plant Line Value: WS
  misc_feature: MA Experiment 20001904 PARAMETER Experiment Name: At_Drought_Reproduction_P Parameter: Timepoint (day) Value: 7
  misc_feature: MA Experiment 20001904 PARAMETER Experiment Name: At_Drought_Reproduction_P Parameter: Tissue Value: Rosettes
  misc_feature: MA Experiment 20001904 PARAMETER Experiment Name: At_Drought_Reproduction_P Parameter: Treatment Value: Drought vs. No Drought
  misc_feature: MA Experiment ID: 20001909 Result: Up-regulated in Transcription
  misc_feature: MA Experiment 20001909 PARAMETER Experiment Name: At_Drought_Reproduction_P Parameter: Age (day) Value: 35
  misc_feature: MA Experiment 20001909 PARAMETER Experiment Name: At_Drought_Reproduction_P Parameter: Organism Value: A. thaliana
  misc_feature: MA Experiment 20001909 PARAMETER Experiment Name: At_Drought_Reproduction_P Parameter: Plant Line Value: WS
  misc_feature: MA Experiment 20001909 PARAMETER Experiment Name: At_Drought_Reproduction_P Parameter: Timepoint (day) Value: 5
  misc_feature: MA Experiment 20001909 PARAMETER Experiment Name: At_Drought_Reproduction_P Parameter: Tissue Value: Flowers
  misc_feature: MA Experiment 20001909 PARAMETER Experiment Name: At_Drought_Reproduction_P Parameter: Treatment Value: Drought vs. No Drought
  misc_feature: MA Experiment ID: 20001911 Result: Down-regulated in Transcription
  misc_feature: MA Experiment 20001911 PARAMETER Experiment Name: At_Drought_Reproduction_P Parameter: Age (day) Value: 40
  misc_feature: MA Experiment 20001911 PARAMETER Experiment Name: At_Drought_Reproduction_P Parameter: Organism Value: A. thaliana
  misc_feature: MA Experiment 20001911 PARAMETER Experiment Name: At_Drought_Reproduction_P Parameter: Plant Line Value: WS
  misc_feature: MA Experiment 20001911 PARAMETER Experiment Name: At_Drought_Reproduction_P Parameter: Timepoint (day) Value: 10
  misc_feature: MA Experiment 20001911 PARAMETER Experiment Name: At_Drought_Reproduction_P Parameter: Tissue Value: Flowers
  misc_feature: MA Experiment 20001911 PARAMETER Experiment Name: At_Drought_Reproduction_P Parameter: Treatment Value: Drought vs. No Drought
gaggcactctccaatttcattaaacaaggagagtagaacctaaagaaaaaagtggtcgtccaatggacctctcactaattcaaggcatgtctctgcctctctattttctcttaacaatattctttttcttctttgctaccgcaaaaacgcggagaagctctagcaccggcacgcttccaccgggtcctccgatactgccattggtcggaaacatattccaactcggattcaatcctcaccgttcacttgctgccttttcgaaaacgtacggacctataatgagtttgaagcttggaaggttaaccgcagtggttatatcttcaccagaagcagctaaagaggcacttagaacacacgaccatgtcatgtccgctcgaacctttaacgacgctcttcgagcctttgatcaccataaacattctattgtctggattcccccctctgctcgttggaggtttctgaagaaaacaataacaaaatatttgttatcaccgcaaaacttagatgctattcaatctttaagaatgagaaaggtggaggaactagtgagtttagtaaatgaatttcgcgagagaggagaagctattgacctggctcgtgcttccttcgtcacatctttcaatatcatctcaaatgctctgttttcagtagatttagcgacgtatgactctaactcctcgtcttacgaatttcacaacacggtggttcacctgacggagatcgccggtatacccaacgtaggagactatttccagtatatgaggtttcttgatttgcaaggtacccggaaaaaagcggtgctctgcatagagaaattgtttagggtttttcaagaattcattgatgctcgattagccaaaagattttctcggacagagaaagagcctaaagaggcttcaagcatcgatatgctagactcccttctggatctcacacagcaaaacgaagcagaattaacaatgaatgatctcaaacacttgcttctcgatgtgtttgttgctggcacagacacaaactctagtacaatggaatgggcaatgacggagttattccgtagcacggagaagatggtcaaagcacagagtgagatacggcaagtgattggtcaaaacggtttcgttcaagaatctgatatcccgagtctgccttacttacaagcaattgtgaaagagactcttcgtttgcatcctgcagctcctttgatccctagaaaatcagaatccgatgttcagattatgggtttccttgttcctataaacacccaggttgttgtgaacgtatgggcgataggacgagacgcgagcgtgtgggaaaatccaatgaagttcgagccagagaggttcttgttacgagaaaccgatgtaaaaggcagagatttcgagttgataccgtttggatcaggaagaaggatgtgtccgggaatctcgatggctcttaagacaatgcatatggtgcttgcctctcttctctattcctttgactggaagcttcaaaacggtgtcgtccccggaaacattgacatgagcgagactttcggtcttaccttacacaaggccaaatctctttgtgccgtacccgtcaagaaacctacaatatcgtcttcttattaataatcgtatcaatataaagttcgtgtacggatcaatattaataattgaagagaatgaaattataaaaaaaaaagaaaaaaaaaaaaaaaaaaaactcgagggggggcccggt

SEQ ID NO: 47334 - protein, 515 aa, Arabidopsis thaliana
  peptide (1)..(515): Ceres Seq. ID no. 13648314
  misc_feature (39)..(503): Pfam Name: Cytochrome P450 Pfam Description: Cytochrome P450
  misc_feature (1)..(492): Homolog of NCBI NO: 25282599 NR Description: cytochrome P450 monooxygenase [imported] -
  misc_feature (1)..(503): Homolog of NCBI NO: 25282569 NR Description: probable cytochrome P450 [imported] - Arabidopsis
  misc_feature (3)..(512): Homolog of NCBI NO: 15217636 NR Description: cytochrome P450 monooxygenase [Arabidopsis
  misc_feature (1)..(508): Homolog of NCBI NO: 30690062 NR Description: cytochrome P450 family [Arabidopsis thaliana]
  misc_feature (6)..(508): Homolog of NCBI NO: 15233027 NR Description: cytochrome p450 family [Arabidopsis thaliana]
  misc_feature (1)..(508): Homolog of NCBI NO: 15225512 NR Description: cytochrome p450 family [Arabidopsis thaliana]
  misc_feature (3)..(512): Homolog of NCBI NO: 15225510 NR Description: cytochrome p450 family [Arabidopsis thaliana]
  misc_feature (9)..(515): Homolog of NCBI NO: 5915833 NR Description: Cytochrome P450 76C3
  misc_feature (1)..(515): Homolog of NCBI NO: 26451374 NR Description: putative cytochrome P450 [Arabidopsis thaliana]
  misc_feature (1)..(515): Homolog of NCBI NO: 30690070 NR Description: cytochrome p450 family [Arabidopsis thaliana]
MDLSLIQGMSLPLYFLLTIFFFFFATAKTRRSSSTGTLPPGPPILPLVGNIFQLGFNPHRSLAAFSKTYGPIMSLKLGRLTAVVISSPEAAKEALRTHDHVMSARTFNDALRAFDHHKHSIVWIPPSARWRFLKKTITKYLLSPQNLDAIQSLRMRKVEELVSLVNEFRERGEAIDLARASFVTSFNIISNALFSVDLATYDSNSSSYEFHNTVVHLTEIAGIPNVGDYFQYMRFLDLQGTRKKAVLCIEKLFRVFQEFIDARLAKRFSRTEKEPKEASSIDMLDSLLDLTQQNEAELTMNDLKHLLLDVFVAGTDTNSSTMEWAMTELFRSTEKMVKAQSEIRQVIGQNGFVQESDIPSLPYLQAIVKETLRLHPAAPLIPRKSESDVQIMGFLVPINTQVVVNVWAIGRDASVWENPMKFEPERFLLRETDVKGRDFELIPFGSGRRMCPGISMALKTMHMVLASLLYSFDWKLQNGVVPGNIDMSETFGLTLHKAKSLCAVPVKKPTISSSY

SEQ ID NO: 47335 - protein, 507 aa, Arabidopsis thaliana
  peptide (1)..(507): Ceres Seq. ID no. 13648315
  misc_feature (31)..(495): Pfam Name: Cytochrome P450 Pfam Description: Cytochrome P450
  misc_feature (1)..(484): Homolog of NCBI NO: 25282599 NR Description: cytochrome P450 monooxygenase [imported] -
  misc_feature (1)..(495): Homolog of NCBI NO: 25282569 NR Description: probable cytochrome P450 [imported] - Arabidopsis
  misc_feature (1)..(504): Homolog of NCBI NO: 15217636 NR Description: cytochrome P450 monooxygenase [Arabidopsis
  misc_feature (1)..(500): Homolog of NCBI NO: 30690062 NR Description: cytochrome P450 family [Arabidopsis thaliana]
  misc_feature (1)..(500): Homolog of NCBI NO: 15233027 NR Description: cytochrome p450 family [Arabidopsis thaliana]
  misc_feature (1)..(500): Homolog of NCBI NO: 15225512 NR Description: cytochrome p450 family [Arabidopsis thaliana]
  misc_feature (1)..(504): Homolog of NCBI NO: 15225510 NR Description: cytochrome p450 family [Arabidopsis thaliana]
  misc_feature (1)..(507): Homolog of NCBI NO: 5915833 NR Description: Cytochrome P450 76C3
  misc_feature (1)..(507): Homolog of NCBI NO: 26451374 NR Description: putative cytochrome P450 [Arabidopsis thaliana]
  misc_feature (1)..(507): Homolog of NCBI NO: 30690070 NR Description: cytochrome p450 family [Arabidopsis thaliana]
MSLPLYFLLTIFFFFFATAKTRRSSSTGTLPPGPPILPLVGNIFQLGFNPHRSLAAFSKTYGPIMSLKLGRLTAVVISSPEAAKEALRTHDHVMSARTFNDALRAFDHHKHSIVWIPPSARWRFLKKTITKYLLSPQNLDAIQSLRMRKVEELVSLVNEFRERGEAIDLARASFVTSFNIISNALFSVDLATYDSNSSSYEFHNTVVHLTEIAGIPNVGDYFQYMRFLDLQGTRKKAVLCIEKLFRVFQEFIDARLAKRFSRTEKEPKEASSIDMLDSLLDLTQQNEAELTMNDLKHLLLDVFVAGTDTNSSTMEWAMTELFRSTEKMVKAQSEIRQVIGQNGFVQESDIPSLPYLQAIVKETLRLHPAAPLIPRKSESDVQIMGFLVPINTQVVVNVWAIGRDASVWENPMKFEPERFLLRETDVKGRDFELIPFGSGRRMCPGISMALKTMHMVLASLLYSFDWKLQNGVVPGNIDMSETFGLTLHKAKSLCAVPVKKPTISSSY

SEQ ID NO: 47336 - protein, 443 aa, Arabidopsis thaliana
  peptide (1)..(443): Ceres Seq. ID no. 13648316
  misc_feature (1)..(431): Pfam Name: Cytochrome P450 Pfam Description: Cytochrome P450
  misc_feature (1)..(420): Homolog of NCBI NO: 25282599 NR Description: cytochrome P450 monooxygenase [imported] -
  misc_feature (1)..(431): Homolog of NCBI NO: 25282569 NR Description: probable cytochrome P450 [imported] - Arabidopsis
  misc_feature (1)..(440): Homolog of NCBI NO: 15217636 NR Description: cytochrome P450 monooxygenase [Arabidopsis
  misc_feature (1)..(436): Homolog of NCBI NO: 30690062 NR Description: cytochrome P450 family [Arabidopsis thaliana]
  misc_feature (1)..(436): Homolog of NCBI NO: 15233027 NR Description: cytochrome p450 family [Arabidopsis thaliana]
  misc_feature (1)..(436): Homolog of NCBI NO: 15225512 NR Description: cytochrome p450 family [Arabidopsis thaliana]
  misc_feature (1)..(440): Homolog of NCBI NO: 15225510 NR Description: cytochrome p450 family [Arabidopsis thaliana]
  misc_feature (1)..(443): Homolog of NCBI NO: 5915833 NR Description: Cytochrome P450 76C3
  misc_feature (1)..(443): Homolog of NCBI NO: 26451374 NR Description: putative cytochrome P450 [Arabidopsis thaliana]
  misc_feature (1)..(443): Homolog of NCBI NO: 30690070 NR Description: cytochrome p450 family [Arabidopsis thaliana]
MSLKLGRLTAVVISSPEAAKEALRTHDHVMSARTFNDALRAFDHHKHSIVWIPPSARWRFLKKTITKYLLSPQNLDAIQSLRMRKVEELVSLVNEFRERGEAIDLARASFVTSFNIISNALFSVDLATYDSNSSSYEFHNTVVHLTEIAGIPNVGDYFQYMRFLDLQGTRKKAVLCIEKLFRVFQEFIDARLAKRFSRTEKEPKEASSIDMLDSLLDLTQQNEAELTMNDLKHLLLDVFVAGTDTNSSTMEWAMTELFRSTEKMVKAQSEIRQVIGQNGFVQESDIPSLPYLQAIVKETLRLHPAAPLIPRKSESDVQIMGFLVPINTQVVVNVWAIGRDASVWENPMKFEPERFLLRETDVKGRDFELIPFGSGRRMCPGISMALKTMHMVLASLLYSFDWKLQNGVVPGNIDMSETFGLTLHKAKSLCAVPVKKPTISSSY

SEQ ID NO: 47337 - DNA, 1964 bp, Arabidopsis thaliana
  misc_feature (1)..(1964): Ceres Seq. ID no. 13588303
  misc_feature: MA Experiment ID: 20000171 Result: Up-regulated in Transcription
  misc_feature: MA Experiment 20000171 PARAMETER Experiment Name: At_42deg_Heat_P Parameter: Age (day) Value: 14
  misc_feature: MA Experiment 20000171 PARAMETER Experiment Name: At_42deg_Heat_P Parameter: Organism Value: A. thaliana
  misc_feature: MA Experiment 20000171 PARAMETER Experiment Name: At_42deg_Heat_P Parameter: Plant Line Value: WS
  misc_feature: MA Experiment 20000171 PARAMETER Experiment Name: At_42deg_Heat_P Parameter: Temperature (deg C) Value: 42 vs. 22
  misc_feature: MA Experiment 20000171 PARAMETER Experiment Name: At_42deg_Heat_P Parameter: Timepoint (hr) Value: 1
  misc_feature: MA Experiment 20000171 PARAMETER Experiment Name: At_42deg_Heat_P Parameter: Tissue Value: Aerial
  misc_feature: MA Experiment ID: 20000179 Result: Up-regulated in Transcription
  misc_feature: MA Experiment 20000179 PARAMETER Experiment Name: At_Germinating_Seeds_P Parameter: Age (hr) Value: 6 vs. 0
  misc_feature: MA Experiment 20000179 PARAMETER Experiment Name: At_Germinating_Seeds_P Parameter: Tissue Value: Germinating Seeds
  misc_feature: MA Experiment ID: 20000180 Result: Up-regulated in Transcription
  misc_feature: MA Experiment 20000180 PARAMETER Experiment Name: At_Germinating_Seeds_P Parameter: Age (hr) Value: 24 vs. 0
  misc_feature: MA Experiment 20000180 PARAMETER Experiment Name: At_Germinating_Seeds_P Parameter: Tissue Value: Germinating Seeds
  misc_feature: MA Experiment ID: 20000227 Result: Up-regulated in Transcription
  misc_feature: MA Experiment 20000227 PARAMETER Experiment Name: At_Root-Tips-vs-Tops_P Parameter: Tissue Value: Root Tips vs. Root Tops
  misc_feature: MA Experiment ID: 20000234 Result: Up-regulated in Transcription
  misc_feature: MA Experiment 20000234 PARAMETER Experiment Name: At_Siliques_P Parameter: Age (day) Value: 21
  misc_feature: MA Experiment 20000234 PARAMETER Experiment Name: At_Siliques_P Parameter: Organism Value: A. thaliana
  misc_feature: MA Experiment 20000234 PARAMETER Experiment Name: At_Siliques_P Parameter: Plant Line Value: WS
  misc_feature: MA Experiment 20000234 PARAMETER Experiment Name: At_Siliques_P Parameter: Tissue Value: Less Than 5mm Siliques vs. Whole Plant
  misc_feature: MA Experiment ID: 20000264 Result: Up-regulated in Transcription
  misc_feature: MA Experiment 20000264 PARAMETER Experiment Name: At_Open_Flower_P Parameter: Age (day) Value: 21
  misc_feature: MA Experiment 20000264 PARAMETER Experiment Name: At_Open_Flower_P Parameter: Plant Line Value: WS
  misc_feature: MA Experiment 20000264 PARAMETER Experiment Name: At_Open_Flower_P Parameter: Tissue Value: Open Flower vs. Whole Plant
  misc_feature: MA Experiment ID: 20000265 Result: Up-regulated in Transcription
  misc_feature: MA Experiment 20000265 PARAMETER Experiment Name: At_Open_Flower_P Parameter: Age (day) Value: 21
  misc_feature: MA Experiment 20000265 PARAMETER Experiment Name: At_Open_Flower_P Parameter: Plant Line Value: WS
  misc_feature: MA Experiment 20000265 PARAMETER Experiment Name: At_Open_Flower_P Parameter: Tissue Value: Closed Flower vs. Whole Plant
  misc_feature: MA Experiment ID: 20000286 Result: Up-regulated in Transcription
  misc_feature: MA Experiment 20000286 PARAMETER Experiment Name: At_Open_Flower_P Parameter: Age (day) Value: 21
  misc_feature: MA Experiment 20000286 PARAMETER Experiment Name: At_Open_Flower_P Parameter: Plant Line Value: WS
  misc_feature: MA Experiment 20000286 PARAMETER Experiment Name: At_Open_Flower_P Parameter: Tissue Value: Half Open vs. Whole Plant
  misc_feature: MA Experiment ID: 20000437 Result: Down-regulated in Transcription
  misc_feature: MA Experiment 20000437 PARAMETER Experiment Name: At_Drought_P Parameter: Age (day) Value: 8
  misc_feature: MA Experiment 20000437 PARAMETER Experiment Name: At_Drought_P Parameter: Organism Value: A. thaliana
  misc_feature: MA Experiment 20000437 PARAMETER Experiment Name: At_Drought_P Parameter: Plant Line Value: WS
  misc_feature: MA Experiment 20000437 PARAMETER Experiment Name: At_Drought_P Parameter: Timepoint (hr) Value: 24
  misc_feature: MA Experiment 20000437 PARAMETER Experiment Name: At_Drought_P Parameter: Tissue Value: Whole Plant
  misc_feature: MA Experiment 20000437 PARAMETER Experiment Name: At_Drought_P Parameter: Treatment Value: Drought vs. No Drought
  misc_feature: MA Experiment ID: 20000438 Result: Up-regulated in Transcription
  misc_feature: MA Experiment 20000438 PARAMETER Experiment Name: At_Shoots__P Parameter: Age (day) Value: 14
  misc_feature: MA Experiment 20000438 PARAMETER Experiment Name: At_Shoots__P Parameter: Tissue Value: Shoots vs. Whole Plant
  misc_feature: MA Experiment ID: 20001248 Result: Down-regulated in Transcription
  misc_feature: MA Experiment 20001248 PARAMETER Experiment Name: At_Far-red-induction_P Parameter: Age (day) Value: 7
  misc_feature: MA Experiment 20001248 PARAMETER Experiment Name: At_Far-red-induction_P Parameter: Light Value: Far-red vs. White
  misc_feature: MA Experiment 20001248 PARAMETER Experiment Name: At_Far-red-induction_P Parameter: Organism Value: A. thaliana
  misc_feature: MA Experiment 20001248 PARAMETER Experiment Name: At_Far-red-induction_P Parameter: Plant Line Value: Columbia
  misc_feature: MA Experiment 20001248 PARAMETER Experiment Name: At_Far-red-induction_P Parameter: Timepoint (hr) Value: 4
  misc_feature: MA Experiment 20001248 PARAMETER Experiment Name: At_Far-red-induction_P Parameter: Tissue Value: Whole Plant
  misc_feature: MA Experiment ID: 20001450 Result: Down-regulated in Transcription
  misc_feature: MA Experiment 20001450 PARAMETER Experiment Name: At_Far-red-induction_P Parameter: Age (day) Value: 7
  misc_feature: MA Experiment 20001450 PARAMETER Experiment Name: At_Far-red-induction_P Parameter: Light Value: Far-red vs. White
  misc_feature: MA Experiment 20001450 PARAMETER Experiment Name: At_Far-red-induction_P Parameter: Organism Value: A. thaliana
  misc_feature: MA Experiment 20001450 PARAMETER Experiment Name: At_Far-red-induction_P Parameter: Plant Line Value: Columbia
  misc_feature: MA Experiment 20001450 PARAMETER Experiment Name: At_Far-red-induction_P Parameter: Timepoint (hr) Value: 8
  misc_feature: MA Experiment 20001450 PARAMETER Experiment Name: At_Far-red-induction_P Parameter: Tissue Value: Whole Plant
  misc_feature: MA Experiment ID: 20001451 Result: Down-regulated in Transcription
  misc_feature: MA Experiment 20001451 PARAMETER Experiment Name: At_Far-red-induction_P Parameter: Age (day) Value: 7
  misc_feature: MA Experiment 20001451 PARAMETER Experiment Name: At_Far-red-induction_P Parameter: Light Value: Far-red vs. White
  misc_feature: MA Experiment 20001451 PARAMETER Experiment Name: At_Far-red-induction_P Parameter: Organism Value: A. thaliana
  misc_feature: MA Experiment 20001451 PARAMETER Experiment Name: At_Far-red-induction_P Parameter: Plant Line Value: Columbia
  misc_feature: MA Experiment 20001451 PARAMETER Experiment Name: At_Far-red-induction_P Parameter: Timepoint (hr) Value: 24
  misc_feature: MA Experiment 20001451 PARAMETER Experiment Name: At_Far-red-induction_P Parameter: Tissue Value: Whole Plant
  misc_feature: MA Experiment ID: 20001911 Result: Down-regulated in Transcription
  misc_feature: MA Experiment 20001911 PARAMETER Experiment Name: At_Drought_Reproduction_P Parameter: Age (day) Value: 40
  misc_feature: MA Experiment 20001911 PARAMETER Experiment Name: At_Drought_Reproduction_P Parameter: Organism Value: A. thaliana
  misc_feature: MA Experiment 20001911 PARAMETER Experiment Name: At_Drought_Reproduction_P Parameter: Plant Line Value: WS
  misc_feature: MA Experiment 20001911 PARAMETER Experiment Name: At_Drought_Reproduction_P Parameter: Timepoint (day) Value: 10
  misc_feature: MA Experiment 20001911 PARAMETER Experiment Name: At_Drought_Reproduction_P Parameter: Tissue Value: Flowers
  misc_feature: MA Experiment 20001911 PARAMETER Experiment Name: At_Drought_Reproduction_P Parameter: Treatment Value: Drought vs. No Drought
acctctattttttcaagtctgcagctttttgaagctatatttttcagatctttcactctctctctagctacttctttttgtctttaagttttcaaattttattaaatttttatattctactgcctcctcagcttctctcacaaagcacaaatccaagccccaaatcaaatcccaccattgttttattacctcaatccaagaacactagacacaacaaaaatctctgtttcttatccaaatttctgatctttgtggagaacaatattttgattggatgtgagacaaatgggttgtttacattccaaaactgctaatcttccttcttctgatgatccatcagctccaaacaaaccagaatcagtaaatggggaccaagtggatcaggaaatccaaaatttcaaagaatttgaactaaatgagttgaggaaagctaccaatgggtttagtcctagctgcattgtctctgaaggtggagagaaagctcctaatgtcgtttacagagggaagcttgaagggaatcatcttgtagctatcaagcgattctctaggcaatcttggcctgatgctcaacagtttgtggtggaagcgactggtgttgggaagcttagaaacaagagaatagttagtttgatcggttgctgtgctgaaggagatgagaggttgttggtggcagagtatatgcccaatgatactctctcaaagcatctcttccactgggaaaagcagccacttccatgggatatgcgtgttcgaatcgcagactatattgcagaagcacttgattactgcaatattgagaaccgaaaaatctatcatgacctcaatgcatacagaatcctcttcgacgaggaaggtgatcctcgtctatctacttttggtcttatgaagaacagtagagatggcaaaagctatagcacaaacttagcttatactccacctgagtttttacggacaggtagagtcattcctgaaagtgtgatattcagttatggaactattcttttagatcttttaagcggcaaacacattccacctagccatgcccttgatatcataagagggaaaaatgctttgcttcttatggattcatctcttgaagggcaatatgcgaatgatgatgcgactaaattagttgatcttgcttcaaaatgccttcaatcagaggcaaaggatcgaccagataccaaatttcttctctctgcagtagcaccactacaaaagcaagaagaggttgcttctcatgtcttaatgggcttaccaaagaacacagtaatattaccaactatgctttctcctcttggaaaggcctgtgcaaagatggaccttgcgacatttcacgacattttgcttaaaaccggttacagagatgaagaaggtgcagaaaatgagctttcatttcaagaatggacacaacaagtgcaggagatgcttaacacaaaaaagttcggggacattgctttcagagacaaggatttcaagaactcaattgaatactactccaagttggtggggatgatgccggttccttctgcaacagttttcgctagacgggctttctcctacttaatgacagaccaacaggagcttgcactgagagatgcaatgcaggcacaggtgtgcataccagaatggccaacagctttttacttgcaggctttagcgctctcaaagctcggaatggagactgatgctcaagatatgctcaacgatggcgctgcatatgatgctaagcgacagaatagctggcgctgctaagctattagaggaagtcccaaatatttatgggtcttttcagactgtaactgaaaggtgtgtatgcatgtaagagagagatggaatgtgttgtttacttttgtgaaatgagagcttctttttttgcatgaatctttatgaaaagtcaaatcttttggggaaagagagaataagactgcaaataactaatttgattccttcttccttatggc

SEQ ID NO: 47338 - protein, 489 aa, Arabidopsis thaliana
  peptide (1)..(489): Ceres Seq. ID no. 13588304
  misc_feature (38)..(486): Homolog of NCBI NO: 37536550 NR Description: protein kinase-like protein
  misc_feature (23)..(482): Homolog of NCBI NO: 22328189 NR Description: protein kinase family [Arabidopsis thaliana]
  misc_feature (35)..(488): Homolog of NCBI NO: 7486022 NR Description: hypothetical protein F23E12.210 - Arabidopsis
  misc_feature (18)..(485): Homolog of NCBI NO: 21553556 NR Description: protein kinase-like protein [Arabidopsis thaliana]
  misc_feature (18)..(485): Homolog of NCBI NO: 15232406 NR Description: protein kinase family [Arabidopsis thaliana]
  misc_feature (35)..(488): Homolog of NCBI NO: 18418600 NR Description: protein kinase family [Arabidopsis thaliana]
  misc_feature (24)..(486): Homolog of NCBI NO: 22327962 NR Description: protein kinase - related [Arabidopsis thaliana]
  misc_feature (29)..(488): Homolog of NCBI NO: 37537032 NR Description: putative protein kinase [Oryza sativa (japonica
  misc_feature (1)..(489): Homolog of NCBI NO: 28393210 NR Description: putative protein kinase [Arabidopsis thaliana]
  misc_feature (1)..(489): Homolog of NCBI NO: 15237465 NR Description: protein kinase family [Arabidopsis thaliana]
MGCLHSKTANLPSSDDPSAPNKPESVNGDQVDQEIQNFKEFELNELRKATNGFSPSCIVSEGGEKAPNVVYRGKLEGNHLVAIKRFSRQSWPDAQQFVVEATGVGKLRNKRIVSLIGCCAEGDERLLVAEYMPNDTLSKHLFHWEKQPLPWDMRVRIADYIAEALDYCNIENRKIYHDLNAYRILFDEEGDPRLSTFGLMKNSRDGKSYSTNLAYTPPEFLRTGRVIPESVIFSYGTILLDLLSGKHIPPSHALDIIRGKNALLLMDSSLEGQYANDDATKLVDLASKCLQSEAKDRPDTKFLLSAVAPLQKQEEVASHVLMGLPKNTVILPTMLSPLGKACAKMDLATFHDILLKTGYRDEEGAENELSFQEWTQQVQEMLNTKKFGDIAFRDKDFKNSIEYYSKLVGMMPVPSATVFARRAFSYLMTDQQELALRDAMQAQVCIPEWPTAFYLQALALSKLGMETDAQDMLNDGAAYDAKRQNSWRC

SEQ ID NO: 47339 - protein, 358 aa, Arabidopsis thaliana
  peptide (1)..(358): Ceres Seq. ID no. 13588305
  misc_feature (1)..(355): Homolog of NCBI NO: 37536550 NR Description: protein kinase-like protein
  misc_feature (1)..(351): Homolog of NCBI NO: 22328189 NR Description: protein kinase family [Arabidopsis thaliana]
  misc_feature (1)..(357): Homolog of NCBI NO: 7486022 NR Description: hypothetical protein F23E12.210 - Arabidopsis
  misc_feature (1)..(354): Homolog of NCBI NO: 21553556 NR Description: protein kinase-like protein [Arabidopsis thaliana]
  misc_feature (1)..(354): Homolog of NCBI NO: 15232406 NR Description: protein kinase family [Arabidopsis thaliana]
  misc_feature (1)..(357): Homolog of NCBI NO: 18418600 NR Description: protein kinase family [Arabidopsis thaliana]
  misc_feature (1)..(355): Homolog of NCBI NO: 22327962 NR Description: protein kinase - related [Arabidopsis thaliana]
  misc_feature (1)..(357): Homolog of NCBI NO: 37537032 NR Description: putative protein kinase [Oryza sativa (japonica
  misc_feature (1)..(358): Homolog of NCBI NO: 28393210 NR Description: putative protein kinase [Arabidopsis thaliana]
  misc_feature (1)..(358): Homolog of NCBI NO: 15237465 NR Description: protein kinase family [Arabidopsis thaliana]
MPNDTLSKHLFHWEKQPLPWDMRVRIADYIAEALDYCNIENRKIYHDLNAYRILFDEEGDPRLSTFGLMKNSRDGKSYSTNLAYTPPEFLRTGRVIPESVIFSYGTILLDLLSGKHIPPSHALDIIRGKNALLLMDSSLEGQYANDDATKLVDLASKCLQSEAKDRPDTKFLLSAVAPLQKQEEVASHVLMGLPKNTVILPTMLSPLGKACAKMDLATFHDILLKTGYRDEEGAENELSFQEWTQQVQEMLNTKKFGDIAFRDKDFKNSIEYYSKLVGMMPVPSATVFARRAFSYLMTDQQELALRDAMQAQVCIPEWPTAFYLQALALSKLGMETDAQDMLNDGAAYDAKRQNSWRC

SEQ ID NO: 47340 - protein, 337 aa, Arabidopsis thaliana
  peptide (1)..(337): Ceres Seq. ID no. 13588306
  misc_feature (1)..(334): Homolog of NCBI NO: 37536550 NR Description: protein kinase-like protein
  misc_feature (1)..(330): Homolog of NCBI NO: 22328189 NR Description: protein kinase family [Arabidopsis thaliana]
  misc_feature (1)..(336): Homolog of NCBI NO: 7486022 NR Description: hypothetical protein F23E12.210 - Arabidopsis
  misc_feature (1)..(333): Homolog of NCBI NO: 21553556 NR Description: protein kinase-like protein [Arabidopsis thaliana]
  misc_feature (1)..(333): Homolog of NCBI NO: 15232406 NR Description: protein kinase family [Arabidopsis thaliana]
  misc_feature (1)..(336): Homolog of NCBI NO: 18418600 NR Description: protein kinase family [Arabidopsis thaliana]
  misc_feature (1)..(334): Homolog of NCBI NO: 22327962 NR Description: protein kinase - related [Arabidopsis thaliana]
  misc_feature (1)..(336): Homolog of NCBI NO: 37537032 NR Description: putative protein kinase [Oryza sativa (japonica
  misc_feature (1)..(337): Homolog of NCBI NO: 28393210 NR Description: putative protein kinase [Arabidopsis thaliana]
  misc_feature (1)..(337): Homolog of NCBI NO: 15237465 NR Description: protein kinase family [Arabidopsis thaliana]
MRVRIADYIAEALDYCNIENRKIYHDLNAYRILFDEEGDPRLSTFGLMKNSRDGKSYSTNLAYTPPEFLRTGRVIPESVIFSYGTILLDLLSGKHIPPSHALDIIRGKNALLLMDSSLEGQYANDDATKLVDLASKCLQSEAKDRPDTKFLLSAVAPLQKQEEVASHVLMGLPKNTVILPTMLSPLGKACAKMDLATFHDILLKTGYRDEEGAENELSFQEWTQQVQEMLNTKKFGDIAFRDKDFKNSIEYYSKLVGMMPVPSATVFARRAFSYLMTDQQELALRDAMQAQVCIPEWPTAFYLQALALSKLGMETDAQDMLNDGAAYDAKRQNSWRC

SEQ ID NO: 47341 - DNA, 408 bp, Arabidopsis thaliana
  misc_feature (1)..(408): Ceres Seq. ID no. 11406364
  misc_feature: MA Experiment ID: 20000234 Result: Down-regulated in Transcription
  misc_feature: MA Experiment 20000234 PARAMETER Experiment Name: At_Siliques_P Parameter: Age (day) Value: 21
  misc_feature: MA Experiment 20000234 PARAMETER Experiment Name: At_Siliques_P Parameter: Organism Value: A. thaliana
  misc_feature: MA Experiment 20000234 PARAMETER Experiment Name: At_Siliques_P Parameter: Plant Line Value: WS
  misc_feature: MA Experiment 20000234 PARAMETER Experiment Name: At_Siliques_P Parameter: Tissue Value: Less Than 5mm Siliques vs. Whole Plant
  misc_feature: MA Experiment ID: 20001558 Result: Down-regulated in Transcription
  misc_feature: MA Experiment 20001558 PARAMETER Experiment Name: At_Drought_Soil_Dry_P Parameter: Age (day) Value: 27
  misc_feature: MA Experiment 20001558 PARAMETER Experiment Name: At_Drought_Soil_Dry_P Parameter: Organism Value: A. thaliana
  misc_feature: MA Experiment 20001558 PARAMETER Experiment Name: At_Drought_Soil_Dry_P Parameter: Plant Line Value: WS
  misc_feature: MA Experiment 20001558 PARAMETER Experiment Name: At_Drought_Soil_Dry_P Parameter: Post Timepoint (hr) Value: 6
  misc_feature: MA Experiment 20001558 PARAMETER Experiment Name: At_Drought_Soil_Dry_P Parameter: Post-Treatment Value: Re-Water vs. No Drought
  misc_feature: MA Experiment 20001558 PARAMETER Experiment Name: At_Drought_Soil_Dry_P Parameter: Timepoint (day) Value: 13
  misc_feature: MA Experiment 20001558 PARAMETER Experiment Name: At_Drought_Soil_Dry_P Parameter: Treatment Value: Drought vs. No Drought
acaaagtcatcatatgattgccgatattgcatttacgatttcgactttgtcactgcggagaactgccagaagagcaagatcttcttcattgcatggtctccggacactgccaaagtgagagacaagatgatttacgcgagctctaaagataggttcaagagagaactagatggaattcaagtggaacttcaagctactgatccaacagaaatgggtcttgatgttttcaaaagccgcaccaactaagtaaaacaaaaccctgtaagggcatttgaataagtttggtttctggagtgaatatgtttcctctgactgttatgaaaactttttaacaccttcaacttcattctacttggtattattgtatgtctttgatgtgttatgtgtgccttgtgatggttttcaatt

SEQ ID NO: 47342 - protein, 81 aa, Arabidopsis thaliana
  peptide (1)..(81): Ceres Seq. ID no. 11406365
  misc_feature (6)..(81): Pfam Name: Cofilin/tropomyosin-type actin-binding protein Pfam Description: Cofilin/tropomyosin-type actin-binding protein
  misc_feature (6)..(81): Homolog of NCBI NO: 15223471 NR Description: actin depolymerizing factor, putative
  misc_feature (6)..(79): Homolog of NCBI NO: 17366765 NR Description: Actin-depolymerizing factor 2 (ADF 2)
  misc_feature (6)..(81): Homolog of NCBI NO: 5802959 NR Description: putative actin depolymerizing factor [Malus x
  misc_feature (6)..(81): Homolog of NCBI NO: 4185511 NR Description: actin depolymerizing factor 4 [Arabidopsis
  misc_feature (6)..(81): Homolog of NCBI NO: 17366768 NR Description: Actin-depolymerizing factor 1 (ADF 1)
  misc_feature (6)..(81): Homolog of NCBI NO: 30697303 NR Description: actin depolymerizing factor 4 - like protein
  misc_feature (6)..(81): Homolog of NCBI NO: 30697300 NR Description: actin depolymerizing factor 4 - like protein
  misc_feature (6)..(81): Homolog of NCBI NO: 15231309 NR Description: actin depolymerizing factor 1 (ADF1)
  misc_feature (6)..(81): Homolog of NCBI NO: 18408116 NR Description: actin depolymerizing factor 2 (ADF2)
  misc_feature (6)..(81): Homolog of NCBI NO: 11276987 NR Description: actin depolymerizing factor 2 - Arabidopsis
TKSSYDCRYCIYDFDFVTAENCQKSKIFFIAWSPDTAKVRDKMIYASSKDRFKRELDGIQVELQATDPTEMGLDVFKSRTN

SEQ ID NO: 47343 - DNA, 2225 bp, Arabidopsis thaliana
  misc_feature (1)..(2225): Ceres Seq. ID no. 12591279
  misc_feature: MA Experiment ID: 20000166 Result: Down-regulated in Transcription
  misc_feature: MA Experiment 20000166 PARAMETER Experiment Name: At_100uM_ABA_P Parameter: Age (day) Value: 14
  misc_feature: MA Experiment 20000166 PARAMETER Experiment Name: At_100uM_ABA_P Parameter: Organism Value: A. thaliana
  misc_feature: MA Experiment 20000166 PARAMETER Experiment Name: At_100uM_ABA_P Parameter: Plant Line Value: WS
  misc_feature: MA Experiment 20000166 PARAMETER Experiment Name: At_100uM_ABA_P Parameter: Timepoint (hr) Value: 1
  misc_feature: MA Experiment 20000166 PARAMETER Experiment Name: At_100uM_ABA_P Parameter: Tissue Value: Aerial
  misc_feature: MA Experiment 20000166 PARAMETER Experiment Name: At_100uM_ABA_P Parameter: Treatment Value: 100uM ABA vs. No Treatment
  misc_feature: MA Experiment ID: 20000184 Result: Up-regulated in Transcription
  misc_feature: MA Experiment 20000184 PARAMETER Experiment Name: At_Shoots__P Parameter: Age (day) Value: 7
  misc_feature: MA Experiment 20000184 PARAMETER Experiment Name: At_Shoots__P Parameter: Tissue Value: Shoots vs. Whole Plant
  misc_feature: MA Experiment ID: 20000227 Result: Down-regulated in Transcription
  misc_feature: MA Experiment 20000227 PARAMETER Experiment Name: At_Root-Tips-vs-Tops_P Parameter: Tissue Value: Root Tips vs. Root Tops
  misc_feature: MA Experiment ID: 20000437 Result: Down-regulated in Transcription
  misc_feature: MA Experiment 20000437 PARAMETER Experiment Name: At_Drought_P Parameter: Age (day) Value: 8
  misc_feature: MA Experiment 20000437 PARAMETER Experiment Name: At_Drought_P Parameter: Organism Value: A. thaliana
  misc_feature: MA Experiment 20000437 PARAMETER Experiment Name: At_Drought_P Parameter: Plant Line Value: WS
  misc_feature: MA Experiment 20000437 PARAMETER Experiment Name: At_Drought_P Parameter: Timepoint (hr) Value: 24
  misc_feature: MA Experiment 20000437 PARAMETER Experiment Name: At_Drought_P Parameter: Tissue Value: Whole Plant
  misc_feature: MA Experiment 20000437 PARAMETER Experiment Name: At_Drought_P Parameter: Treatment Value: Drought vs. No Drought
aaagcttgagatcccgccgtttctctctggtcatcatcctcttcttcagtgaccgcaaatctgcatgtttggcagtggtttttatagaccgccgggagggttagatctaggcgttaagaatggcttacatgtgcactgatagtggcaatctaatggctattgctcaacaagtcatcaaacagaagcagcaacaagaacaacaacagcagcaacatcatcaagaccatcagatttttggtattaatcctttgtctcttaacccatggcccaatacttccctcgggtttgggctttcaggttcggcttttcccgacccgtttcaagttaccggcggcggagattccaacgatcctggctttccttttcctaacttagaccaccaccacgccacaaccaccggcggtgggttcaggttatctgatttcggcggtggaaccggcggcggcgagtttgagtccgacgagtggatggagactcttatcagcggtggagactccgttgcagacggtcctgattgtgacacctggcatgataatcccgattacgtaatctacggtcctgatccattcgatacttacccgagtcgactcagtgtccaaccgtcagatctaaaccgagtcattgacacgtcgagtccgcttcctccgccgaccttgtggcctccttcttcgccattatcgattcctccgcttactcatgagtcaccaaccaaagaagatccagagactaacgactccgaagacgatgacttcgacctagaaccacctctcctcaaagctatatacgactgtgcacggatctcagactctgaccctaacgaagcttccaagacgcttcttcagatccgagaatctgtatcggagctaggtgatccgacggagcgagttgcattttacttcacggaagctctctccaacagactgtctcctaattcgccggcgacgtcgtcttcttcttcatctacggaggatttaatcttatcttataaaaccctaaacgacgcttgtccttactccaaattcgcacatttgacggcgaatcaagcgattctagaagcgacggagaagtcgaacaagattcacatcgtcgattttggaatcgttcaaggtatacaatggcctgctcttcttcaagctctagctactcgtacttctggtaaacccactcaaatccgggtctcgggtatacccgctccatctctcggtgaatctccggaaccgtcgttaatcgccaccggaaaccgcctccgtgatttcgccaaggttctggatctgaatttcgatttcatcccaattctcactcccatacatttacttaacgggtcaagtttccgggtcgacccggatgaagtactggccgtgaatttcatgctccagctctacaaattactcgacgagacgccgacgatagttgacaccgcactacggctcgccaaatcgttgaacccgagggtcgtcactctcggagaatacgaagtgagcttaaaccgggtcggtttcgctaaccgggtaaagaacgcgcttcaattctattccgcggttttcgaatcccttgaaccgaacttggggcgtgattcggaggagagagtgagagttgagcgagagttgttcggccggagaatctcgggtttgattggaccggagaaaaccggaattcatagagaaagaatggaagagaaagagcaatggcgggtattaatggagaatgccggttttgaatcggttaagctgagtaattacgcagtgagccaagcgaagattctattgtggaattacaattacagcaatttgtattcaattgttgaatctaagcctggcttcatctctttggcctggaacgatttacctctcctcactctttcttcctggcgataaccaaaccaaaccgatccggtattcttagttttgttttgttttcaatgttatttttggttagacaaatattcaattgttaatatactccgtggtcagagtgttttgtttttcttttagttcgaacgttgaattaattcaggggtaggttttgaattctctgaaccttatgtgttttttggtaacatcatttggatttgtgaactaggtttaaaaactggtcttagtcttgttgttttctcattagataatttaaactggtttgcttctttatttttggttggataaagtgaccggttctggtcatctgtttgagatgtaattactatttcataaaattaggaagttgaaagc

SEQ ID NO: 47344 - protein, 584 aa, Arabidopsis thaliana
  peptide (1)..(584): Ceres Seq. ID no. 12591280
  misc_feature (191)..(490): Pfam Name: GRAS family transcription factor Pfam Description: GRAS family transcription factor
  misc_feature (217)..(584): Homolog of NCBI NO: 26451075 NR Description: putative RGA1 [Arabidopsis thaliana]
  misc_feature (217)..(584): Homolog of NCBI NO: 15228553 NR Description: RGA1-like protein; protein id: At3g03450.1
  misc_feature (217)..(583): Homolog of NCBI NO: 25989334 NR Description: chitin-inducible gibberellin-responsive protein
  misc_feature (217)..(584): Homolog of NCBI NO: 10178637 NR Description: SCARECROW [Zea mays]
  misc_feature (169)..(583): Homolog of NCBI NO: 11291689 NR Description: SCARECROW protein [imported] - Arabidopsis
  misc_feature (221)..(584): Homolog of NCBI NO: 4160441 NR Description: lateral suppressor protein [Lycopersicon
  misc_feature (169)..(583): Homolog of NCBI NO: 15232451 NR Description: SCARECROW1
  misc_feature (152)..(584): Homolog of NCBI NO: 13365610 NR Description: SCARECROW [Pisum sativum]
  misc_feature (125)..(584): Homolog of NCBI NO: 15229819 NR Description: scarecrow-like 7 (SCL7); protein id: At3g50650.1
  misc_feature (12)..(584): Homolog of NCBI NO: 17064924 NR Description: SCARECROW gene regulator [Arabidopsis thaliana]
MAYMCTDSGNLMAIAQQVIKQKQQQEQQQQQHHQDHQIFGINPLSLNPWPNTSLGFGLSGSAFPDPFQVTGGGDSNDPGFPFPNLDHHHATTTGGGFRLSDFGGGTGGGEFESDEWMETLISGGDSVADGPDCDTWHDNPDYVIYGPDPFDTYPSRLSVQPSDLNRVIDTSSPLPPPTLWPPSSPLSIPPLTHESPTKEDPETNDSEDDDFDLEPPLLKAIYDCARISDSDPNEASKTLLQIRESVSELGDPTERVAFYFTEALSNRLSPNSPATSSSSSSTEDLILSYKTLNDACPYSKFAHLTANQAILEATEKSNKIHIVDFGIVQGIQWPALLQALATRTSGKPTQIRVSGIPAPSLGESPEPSLIATGNRLRDFAKVLDLNFDFIPILTPIHLLNGSSFRVDPDEVLAVNFMLQLYKLLDETPTIVDTALRLAKSLNPRVVTLGEYEVSLNRVGFANRVKNALQFYSAVFESLEPNLGRDSEERVRVERELFGRRISGLIGPEKTGIHRERMEEKEQWRVLMENAGFESVKLSNYAVSQAKILLWNYNYSNLYSIVESKPGFISLAWNDLPLLTLSSWR

SEQ ID NO: 47345 - protein, 581 aa, Arabidopsis thaliana
  peptide (1)..(581): Ceres Seq. ID no. 12591281
  misc_feature (188)..(487): Pfam Name: GRAS family transcription factor Pfam Description: GRAS family transcription factor
  misc_feature (214)..(581): Homolog of NCBI NO: 26451075 NR Description: putative RGA1 [Arabidopsis thaliana]
  misc_feature (214)..(581): Homolog of NCBI NO: 15228553 NR Description: RGA1-like protein; protein id: At3g03450.1
  misc_feature (214)..(580): Homolog of NCBI NO: 25989334 NR Description: chitin-inducible gibberellin-responsive protein
  misc_feature (214)..(581): Homolog of NCBI NO: 10178637 NR Description: SCARECROW [Zea mays]
  misc_feature (166)..(580): Homolog of NCBI NO: 11291689 NR Description: SCARECROW protein [imported] - Arabidopsis
  misc_feature (218)..(581): Homolog of NCBI NO: 4160441 NR Description: lateral suppressor protein [Lycopersicon
  misc_feature (166)..(580): Homolog of NCBI NO: 15232451 NR Description: SCARECROW1
  misc_feature (149)..(581): Homolog of NCBI NO: 13365610 NR Description: SCARECROW [Pisum sativum]
  misc_feature (122)..(581): Homolog of NCBI NO: 15229819 NR Description: scarecrow-like 7 (SCL7); protein id: At3g50650.1
  misc_feature (9)..(581): Homolog of NCBI NO: 17064924 NR Description: SCARECROW gene regulator [Arabidopsis thaliana]
MCTDSGNLMAIAQQVIKQKQQQEQQQQQHHQDHQIFGINPLSLNPWPNTSLGFGLSGSAFPDPFQVTGGGDSNDPGFPFPNLDHHHATTTGGGFRLSDFGGGTGGGEFESDEWMETLISGGDSVADGPDCDTWHDNPDYVIYGPDPFDTYPSRLSVQPSDLNRVIDTSSPLPPPTLWPPSSPLSIPPLTHESPTKEDPETNDSEDDDFDLEPPLLKAIYDCARISDSDPNEASKTLLQIRESVSELGDPTERVAFYFTEALSNRLSPNSPATSSSSSSTEDLILSYKTLNDACPYSKFAHLTANQAILEATEKSNKIHIVDFGIVQGIQWPALLQALATRTSGKPTQIRVSGIPAPSLGESPEPSLIATGNRLRDFAKVLDLNFDFIPILTPIHLLNGSSFRVDPDEVLAVNFMLQLYKLLDETPTIVDTALRLAKSLNPRVVTLGEYEVSLNRVGFANRVKNALQFYSAVFESLEPNLGRDSEERVRVERELFGRRISGLIGPEKTGIHRERMEEKEQWRVLMENAGFESVKLSNYAVSQAKILLWNYNYSNLYSIVESKPGFISLAWNDLPLLTLSSWR

SEQ ID NO: 47346 - protein, 573 aa, Arabidopsis thaliana
  peptide (1)..(573): Ceres Seq. ID no. 12591282
  misc_feature (180)..(479): Pfam Name: GRAS family transcription factor Pfam Description: GRAS family transcription factor
  misc_feature (206)..(573): Homolog of NCBI NO: 26451075 NR Description: putative RGA1 [Arabidopsis thaliana]
  misc_feature (206)..(573): Homolog of NCBI NO: 15228553 NR Description: RGA1-like protein; protein id: At3g03450.1
  misc_feature (206)..(572): Homolog of NCBI NO: 25989334 NR Description: chitin-inducible gibberellin-responsive protein
  misc_feature (206)..(573): Homolog of NCBI NO: 10178637 NR Description: SCARECROW [Zea mays]
  misc_feature (158)..(572): Homolog of NCBI NO: 11291689 NR Description: SCARECROW protein [imported] - Arabidopsis
  misc_feature (210)..(573): Homolog of NCBI NO: 4160441 NR Description: lateral suppressor protein [Lycopersicon
  misc_feature (158)..(572): Homolog of NCBI NO: 15232451 NR Description: SCARECROW1
  misc_feature (141)..(573): Homolog of NCBI NO: 13365610 NR Description: SCARECROW [Pisum sativum]
  misc_feature (114)..(573): Homolog of NCBI NO: 15229819 NR Description: scarecrow-like 7 (SCL7); protein id: At3g50650.1
  misc_feature (1)..(573): Homolog of NCBI NO: 17064924 NR Description: SCARECROW gene regulator [Arabidopsis thaliana]
MAIAQQVIKQKQQQEQQQQQHHQDHQIFGINPLSLNPWPNTSLGFGLSGSAFPDPFQVTGGGDSNDPGFPFPNLDHHHATTTGGGFRLSDFGGGTGGGEFESDEWMETLISGGDSVADGPDCDTWHDNPDYVIYGPDPFDTYPSRLSVQPSDLNRVIDTSSPLPPPTLWPPSSPLSIPPLTHESPTKEDPETNDSEDDDFDLEPPLLKAIYDCARISDSDPNEASKTLLQIRESVSELGDPTERVAFYFTEALSNRLSPNSPATSSSSSSTEDLILSYKTLNDACPYSKFAHLTANQAILEATEKSNKIHIVDFGIVQGIQWPALLQALATRTSGKPTQIRVSGIPAPSLGESPEPSLIATGNRLRDFAKVLDLNFDFIPILTPIHLLNGSSFRVDPDEVLAVNFMLQLYKLLDETPTIVDTALRLAKSLNPRVVTLGEYEVSLNRVGFANRVKNALQFYSAVFESLEPNLGRDSEERVRVERELFGRRISGLIGPEKTGIHRERMEEKEQWRVLMENAGFESVKLSNYAVSQAKILLWNYNYSNLYSIVESKPGFISLAWNDLPLLTLSSWR

SEQ ID NO: 47347 - DNA, 1845 bp, Arabidopsis thaliana
  misc_feature (1)..(1845): Ceres Seq. ID no. 12605213
  misc_feature: MA Experiment ID: 20001905 Result: Down-regulated in Transcription
  misc_feature: MA Experiment 20001905 PARAMETER Experiment Name: At_Drought_Reproduction_P Parameter: Age (day) Value: 40
  misc_feature: MA Experiment 20001905 PARAMETER Experiment Name: At_Drought_Reproduction_P Parameter: Organism Value: A. thaliana
  misc_feature: MA Experiment 20001905 PARAMETER Experiment Name: At_Drought_Reproduction_P Parameter: Plant Line Value: WS
  misc_feature: MA Experiment 20001905 PARAMETER Experiment Name: At_Drought_Reproduction_P Parameter: Timepoint (day) Value: 10
  misc_feature: MA Experiment 20001905 PARAMETER Experiment Name: At_Drought_Reproduction_P Parameter: Tissue Value: Rosettes
  misc_feature: MA Experiment 20001905 PARAMETER Experiment Name: At_Drought_Reproduction_P Parameter: Treatment Value: Drought vs. No Drought
ggagaagagagagagagagagacctaccagtcccattttccgtgttcagagagcgaagtggaaggtggttcacgttttcgtctaatctccgactatcactgagattggaccatttggtttctgggtttcttttggtcagataaagttacaagcttgagaattctcgatctgtggtttttgtttctgtttcttatgaacttcgagttttgaagatggatctatcttctcaacgacaatccccaaatggttctaggggttttcgtcttcaagctccattggtggattctgtatcttgttattgtagagtagattccggtcttaagactgttgtagaagcaaggaagtttgttcctggttcaaagctttgtattcaacctgatatcaatcccaatgctcatagacgtaagaattctaagagggagaggactagaattcaacctccgcttctccctggcctccctgacgatctagctgtcgcttgccttatccgtgttcctcgtgcagaacatagaaaactcaggctcgtgtgtaagagatggtataggcttgcttctgggaacttcttttactctcaaaggaagttacttgggatgtctgaagaatgggtttatgtttttaaaagagatcgtgatgggaagatctcgtggaatacgtttgatcctatctctcagctttggcagccgcttccacctgttccaagggaatattcagaggctgttgggtttggttgcgctgttttaagcggttgtcatctttatttgtttggaggtaaggatcctttaagagggtcaatgaggagggtcattttctataatgcaaggacgaataagtggcacagagcaccggatatgcttaggaagcggcatttttttggttgttgtgttataaacaattgtttatatgtagcgggtggggagtgtgaaggaattcaaaggacacttcgctcagctgaggtttatgatccaaacaagaacaggtggagttttattgctgatatgagtacagcaatggtgcctctgatcggtgtggtttatgacaaaaagtggtttctcaagggtcttgggtctcaccaactagtaatgagtgaagcttatgacccagaagttaattcatggagcccggttagtgacgggatggttgctggttggcgtaatccgtgtacttctctaaacggtcgtctttacggattggattgtagggacggatgcaaactcagggtatttgatgaatccacggattcatggaacaaattcatggacagtaaagctcatttgggaaactcgaagtcgcttgaagctgcagctcttgttcctctacacaataagctttgtataatccggaacaacatgagcatgagtctggttgatgtctcgaatcctgacaaaaacaaccctcgactgtgggaaaacattgccgtaaaaggacagtccaagagcattctcagtaatatatggtcgagtattgcagggagagctttgaagagccatatagtgcattgtcaagtgcttcaagcgtgacaaaaatgttctgaaactcaacaatggagccaatgttcagaagaaatcagccaccttgagcttccaagaaggatacatatctgactcaagaactgtttcagtctttcagagtcatgcaaaggagaactcacgtctggcctttaacagatcacaggcgagacgaagagagagcaagacagtgaggtgggttacatttgttcaccatttcttctggtgttaaaatctgtgttagtatttataggaatcgctttaatggttttggcaatttgttatagcattttgttgacattttcttctgtgatttgtaaatcttaaatctttcttctct

SEQ ID NO: 47348 - protein, 434 aa, Arabidopsis thaliana
  peptide (1)..(434): Ceres Seq. ID no. 12605214
  misc_feature (216)..(263): Pfam Name: Kelch motif Pfam Description: Kelch motif
  misc_feature (78)..(346): Homolog of NCBI NO: 32489068 NR Description: OSJNBb0089B03.12 [Oryza sativa (japonica
  misc_feature (75)..(392): Homolog of NCBI NO: 26453288 NR Description: putative SKP1 interacting partner 4 SKIP4
  misc_feature (75)..(392): Homolog of NCBI NO: 18411974 NR Description: SKP1 interacting partner 4 (SKIP4), putative
  misc_feature (65)..(344): Homolog of NCBI NO: 18397351 NR Description: expressed protein
  misc_feature (67)..(344): Homolog of NCBI NO: 15220452 NR Description: unknown protein; protein id: At1g67480.1
  misc_feature (67)..(344): Homolog of NCBI NO: 7487225 NR Description: hypothetical protein T1F15.5 - Arabidopsis
  misc_feature (23)..(433): Homolog of NCBI NO: 19071626 NR Description: putative Kelch motif containing protein
  misc_feature (10)..(433): Homolog of NCBI NO: 37534254 NR Description: unknown protein [Oryza sativa (japonica
  misc_feature (1)..(434): Homolog of NCBI NO: 18405298 NR Description: expressed protein
  misc_feature (1)..(410): Homolog of NCBI NO: 25405811 NR Description: unknown protein, 58496-60308 [imported] -
MDLSSQRQSPNGSRGFRLQAPLVDSVSCYCRVDSGLKTVVEARKFVPGSKLCIQPDINPNAHRRKNSKRERTRIQPPLLPGLPDDLAVACLIRVPRAEHRKLRLVCKRWYRLASGNFFYSQRKLLGMSEEWVYVFKRDRDGKISWNTFDPISQLWQPLPPVPREYSEAVGFGCAVLSGCHLYLFGGKDPLRGSMRRVIFYNARTNKWHRAPDMLRKRHFFGCCVINNCLYVAGGECEGIQRTLRSAEVYDPNKNRWSFIADMSTAMVPLIGVVYDKKWFLKGLGSHQLVMSEAYDPEVNSWSPVSDGMVAGWRNPCTSLNGRLYGLDCRDGCKLRVFDESTDSWNKFMDSKAHLGNSKSLEAAALVPLHNKLCIIRNNMSMSLVDVSNPDKNNPRLWENIAVKGQSKSILSNIWSSIAGRALKSHIVHCQVLQA

SEQ ID NO: 47349 - protein, 308 aa, Arabidopsis thaliana
  peptide (1)..(308): Ceres Seq. ID no. 12605215
  misc_feature (90)..(137): Pfam Name: Kelch motif Pfam Description: Kelch motif
  misc_feature (1)..(220): Homolog of NCBI NO: 32489068 NR Description: OSJNBb0089B03.12 [Oryza sativa (japonica
  misc_feature (1)..(266): Homolog of NCBI NO: 26453288 NR Description: putative SKP1 interacting partner 4 SKIP4
  misc_feature (1)..(266): Homolog of NCBI NO: 18411974 NR Description: SKP1 interacting partner 4 (SKIP4), putative
  misc_feature (1)..(218): Homolog of NCBI NO: 18397351 NR Description: expressed protein
  misc_feature (1)..(218): Homolog of NCBI NO: 15220452 NR Description: unknown protein; protein id: At1g67480.1
  misc_feature (1)..(218): Homolog of NCBI NO: 7487225 NR Description: hypothetical protein T1F15.5 - Arabidopsis
  misc_feature (1)..(307): Homolog of NCBI NO: 19071626 NR Description: putative Kelch motif containing protein
  misc_feature (1)..(307): Homolog of NCBI NO: 37534254 NR Description: unknown protein [Oryza sativa (japonica
  misc_feature (1)..(308): Homolog of NCBI NO: 18405298 NR Description: expressed protein
  misc_feature (1)..(284): Homolog of NCBI NO: 25405811 NR Description: unknown protein, 58496-60308 [imported] -
MSEEWVYVFKRDRDGKISWNTFDPISQLWQPLPPVPREYSEAVGFGCAVLSGCHLYLFGGKDPLRGSMRRVIFYNARTNKWHRAPDMLRKRHFFGCCVINNCLYVAGGECEGIQRTLRSAEVYDPNKNRWSFIADMSTAMVPLIGVVYDKKWFLKGLGSHQLVMSEAYDPEVNSWSPVSDGMVAGWRNPCTSLNGRLYGLDCRDGCKLRVFDESTDSWNKFMDSKAHLGNSKSLEAAALVPLHNKLCIIRNNMSMSLVDVSNPDKNNPRLWENIAVKGQSKSILSNIWSSIAGRALKSHIVHCQVLQA

SEQ ID NO: 47350 - protein, 241 aa, Arabidopsis thaliana
  peptide (1)..(241): Ceres Seq. ID no. 12605216
  misc_feature (23)..(70): Pfam Name: Kelch motif Pfam Description: Kelch motif
  misc_feature (1)..(153): Homolog of NCBI NO: 32489068 NR Description: OSJNBb0089B03.12 [Oryza sativa (japonica
  misc_feature (1)..(199): Homolog of NCBI NO: 26453288 NR Description: putative SKP1 interacting partner 4 SKIP4
  misc_feature (1)..(199): Homolog of NCBI NO: 18411974 NR Description: SKP1 interacting partner 4 (SKIP4), putative
  misc_feature (1)..(151): Homolog of NCBI NO: 18397351 NR Description: expressed protein
  misc_feature (1)..(151): Homolog of NCBI NO: 15220452 NR Description: unknown protein; protein id: At1g67480.1
  misc_feature (1)..(151): Homolog of NCBI NO: 7487225 NR Description: hypothetical protein T1F15.5 - Arabidopsis
  misc_feature (1)..(240): Homolog of NCBI NO: 19071626 NR Description: putative Kelch motif containing protein
  misc_feature (1)..(240): Homolog of NCBI NO: 37534254 NR Description: unknown protein [Oryza sativa (japonica
  misc_feature (1)..(241): Homolog of NCBI NO: 18405298 NR Description: expressed protein
  misc_feature (1)..(217): Homolog of NCBI NO: 25405811 NR Description: unknown protein, 58496-60308 [imported] -
MRRVIFYNARTNKWHRAPDMLRKRHFFGCCVINNCLYVAGGECEGIQRTLRSAEVYDPNKNRWSFIADMSTAMVPLIGVVYDKKWFLKGLGSHQLVMSEAYDPEVNSWSPVSDGMVAGWRNPCTSLNGRLYGLDCRDGCKLRVFDESTDSWNKFMDSKAHLGNSKSLEAAALVPLHNKLCIIRNNMSMSLVDVSNPDKNNPRLWENIAVKGQSKSILSNIWSSIAGRALKSHIVHCQVLQA

SEQ ID NO: 47351 - DNA, 1485 bp, Arabidopsis thaliana
  misc_feature (1)..(1485): Ceres Seq. ID no. 12604670
  misc_feature: MA Experiment ID: 20000495 Result: Down-regulated in Transcription
  misc_feature: MA Experiment 20000495 PARAMETER Experiment Name: At_Guard_Cells_P Parameter: Harvest Date Value: 8/2/2002
  misc_feature: MA Experiment 20000495 PARAMETER Experiment Name: At_Guard_Cells_P Parameter: Organism Value: A. thaliana
  misc_feature: MA Experiment 20000495 PARAMETER Experiment Name: At_Guard_Cells_P Parameter: Tissue Value: Guard Cells vs. Leaves
gctgaataagagttaaaaaaagacattaatggccttaaggccttgtactggattcacaatctcctctcttcgcaacgcttccgccgccaacaacaatctcttctctctcctctccttctcttcgtcgtctccggcgaagaggaatcttcttctctcttcgctccaggacaatctccgtcgtttcgcatccagcgcttctctttaccgtcaacatctccggaatcaacaacaacaacatcagcaacaacagcaatcgcgcgtgaaagaaaaatcagaaacgctggctcagaagatcggtaaatctatccggcgtgccggtgcgccgtcgaaagctagggtttacgctgatgtcaacgttgttagacctaaggactattgggattacgagtcccttgctgttcaatggggtgtacaggatgattatgaggtggtgaggaaggtaggaaggggaaaatacagtgaggtctttgaaggcattcatgctactgataacgagaaatgtgttatcaagattttgaagcctgtgaagaagaagaagattaagagagagattaagattctgcagaacctctgcggtgggcctaatattgtaaaattgctcgacattgttagagatcagcagtctaagacgcccagcttgatatttgaacatgtgaacaataaagatttcaaagttctctatccaactctctcagactatgatgttcgatattacatttttgaacttctaaaggcgttggatttctgccattcacgtggaatcatgcacagagatgtgaaaccacataatgtcatgattgatcacgagcagcgaaaacttcgtttaattgactggggtttggcagaattctatcatcctgggaaagaatacaatgtccgtgttgcttcaaggtactttaagggtccagagctgctggtggatttacaggactatgattattccttagacctatggagtcttgggtgtatgtttgctggaatgatattccgcaaggagccgttcttttatggccatgacaactatgatcaattggtcaaaattgcgaaggtgcttggcacagatgaactcaacgcctacctaaacaaataccgtatagagttggaccctaatctaacatccctcgtgggcagacatagccggaagccatggacaaagttcatcaattctgaaaaccagcacttagcagttcctgaggctgttgattttgtggacaagttgctgagatatgatcaccaagaaaggccaacagctaaagaagcaatggcgcatccatatttctatccgattagaaatgcagagagcagccgtacgccgcgcagccagtgatctcgaaaacatttgcttgttcaatcttctgatttttcatttctttacggattcaaatttgttataaatcgatctgtcattgtttcattctctcaagtgtgcgtgtgttactgttttgctctttctcagtgtttcattcaactcatttgaattttatt

SEQ ID NO: 47352 - protein, 432 aa, Arabidopsis thaliana
  peptide (1)..(432): Ceres Seq. ID no. 12604671
  misc_feature (132)..(417): Pfam Name: Protein kinase domain Pfam Description: Protein kinase domain
  misc_feature (132)..(417): Pfam Name: Protein kinase domain Pfam Description: Protein kinase domain
  misc_feature (99)..(425): Homolog of NCBI NO: 20141531 NR Description: Casein kinase II, alpha' chain (CK II)
  misc_feature (100)..(428): Homolog of NCBI NO: 3821793 NR Description: casein kinase II alpha subunit [Zea mays]
  misc_feature (100)..(432): Homolog of NCBI NO: 23397331 NR Description: putative casein kinase II, alpha chain 2 CK II
  misc_feature (100)..(428): Homolog of NCBI NO: 125271 NR Description: Casein kinase II, alpha chain (CK II) (CK2-alpha)
  misc_feature (22)..(432): Homolog of NCBI NO: 30698301 NR Description: casein kinase II alpha chain 1 [Arabidopsis
  misc_feature (99)..(425): Homolog of NCBI NO: 20141531 NR Description: Casein kinase II, alpha' chain (CK II)
  misc_feature (100)..(432): Homolog of NCBI NO: 23397331 NR Description: putative casein kinase II, alpha chain 2 CK II
  misc_feature (22)..(432): Homolog of NCBI NO: 30698301 NR Description: casein kinase II alpha chain 1 [Arabidopsis
  misc_feature (1)..(432): Homolog of NCBI NO: 15227778 NR Description: putative casein kinase II catalytic (alpha)
  misc_feature (25)..(432): Homolog of NCBI NO: 17977868 NR Description: casein kinase II alpha subunit [Sinapis alba]
  misc_feature (100)..(432): Homolog of NCBI NO: 14317906 NR Description: casein kinase II alpha [Triticum aestivum]
  misc_feature (100)..(432): Homolog of NCBI NO: 34915304 NR Description: casein kinase II alpha subunit
  misc_feature (100)..(427): Homolog of NCBI NO: 12697577 NR Description: casein kinase II alpha subunit
  misc_feature (100)..(428): Homolog of NCBI NO: 125271 NR Description: Casein kinase II, alpha chain (CK II) (CK2-alpha)
  misc_feature (100)..(428): Homolog of NCBI NO: 3821793 NR Description: casein kinase II alpha subunit [Zea mays]
  misc_feature (100)..(427): Homolog of NCBI NO: 12697577 NR Description: casein kinase II alpha subunit
  misc_feature (100)..(432): Homolog of NCBI NO: 34915304 NR Description: casein kinase II alpha subunit
  misc_feature (100)..(432): Homolog of NCBI NO: 14317906 NR Description: casein kinase II alpha [Triticum aestivum]
  misc_feature (25)..(432): Homolog of NCBI NO: 17977868 NR Description: casein kinase II alpha subunit [Sinapis alba]
  misc_feature (1)..(432): Homolog of NCBI NO: 15227778 NR Description: putative casein kinase II catalytic (alpha)
MALRPCTGFTISSLRNASAANNNLFSLLSFSSSSPAKRNLLLSSLQDNLRRFASSASLYRQHLRNQQQQHQQQQQSRVKEKSETLAQKIGKSIRRAGAPSKARVYADVNVVRPKDYWDYESLAVQWGVQDDYEVVRKVGRGKYSEVFEGIHATDNEKCVIKILKPVKKKKIKREIKILQNLCGGPNIVKLLDIVRDQQSKTPSLIFEHVNNKDFKVLYPTLSDYDVRYYIFELLKALDFCHSRGIMHRDVKPHNVMIDHEQRKLRLIDWGLAEFYHPGKEYNVRVASRYFKGPELLVDLQDYDYSLDLWSLGCMFAGMIFRKEPFFYGHDNYDQLVKIAKVLGTDELNAYLNKYRIELDPNLTSLVGRHSRKPWTKFINSENQHLAVPEAVDFVDKLLRYDHQERPTAKEAMAHPYFYPIRNAESSRTPRSQ

SEQ ID NO: 47353 - DNA, 1724 bp, Arabidopsis thaliana; identical to SEQ ID NO: 39285
  misc_feature (1)..(1724): Ceres Seq. ID no. 13592997
  misc_feature: MA Experiment ID: 108576 Result: Down-regulated in Transcription
  misc_feature: MA Experiment 108576 PARAMETER Experiment Name: At_42deg_Heat_cDNA_P Parameter: Temperature (deg C) Value: 42 vs. 22
  misc_feature: MA Experiment 108576 PARAMETER Experiment Name: At_42deg_Heat_cDNA_P Parameter: Timepoint (hr) Value: 1
  misc_feature: MA Experiment 108576 PARAMETER Experiment Name: At_42deg_Heat_cDNA_P Parameter: Tissue Value: Aerial
  misc_feature: MA Experiment ID: 108577 Result: Down-regulated in Transcription
  misc_feature: MA Experiment 108577 PARAMETER Experiment Name: At_42deg_Heat_cDNA_P Parameter: Temperature (deg C) Value: 42 vs. 22
  misc_feature: MA Experiment 108577 PARAMETER Experiment Name: At_42deg_Heat_cDNA_P Parameter: Timepoint (hr) Value: 6
  misc_feature: MA Experiment 108577 PARAMETER Experiment Name: At_42deg_Heat_cDNA_P Parameter: Tissue Value: Aerial
  misc_feature: MA Experiment ID: 20000112 Result: Down-regulated in Transcription
  misc_feature: MA Experiment 20000112 PARAMETER Experiment Name: At_42deg_Heat_cDNA_P Parameter: Temperature (deg C) Value: 42 vs. 22
  misc_feature: MA Experiment 20000112 PARAMETER Experiment Name: At_42deg_Heat_cDNA_P Parameter: Timepoint (hr) Value: 2
  misc_feature: MA Experiment 20000112 PARAMETER Experiment Name: At_42deg_Heat_cDNA_P Parameter: Tissue Value: Aerial
  misc_feature: MA Experiment ID: 20000113 Result: Down-regulated in Transcription
  misc_feature: MA Experiment 20000113 PARAMETER Experiment Name: At_42deg_Heat_cDNA_P Parameter: Temperature (deg C) Value: 42 vs. 22
  misc_feature: MA Experiment 20000113 PARAMETER Experiment Name: At_42deg_Heat_cDNA_P Parameter: Timepoint (hr) Value: 8
  misc_feature: MA Experiment 20000113 PARAMETER Experiment Name: At_42deg_Heat_cDNA_P Parameter: Tissue Value: Aerial
  misc_feature: MA Experiment ID: 20001557 Result: Up-regulated in Transcription
  misc_feature: MA Experiment 20001557 PARAMETER Experiment Name: At_Drought_Soil_Dry_P Parameter: Age (day) Value: 27
  misc_feature: MA Experiment 20001557 PARAMETER Experiment Name: At_Drought_Soil_Dry_P Parameter: Organism Value: A. thaliana
  misc_feature: MA Experiment 20001557 PARAMETER Experiment Name: At_Drought_Soil_Dry_P Parameter: Plant Line Value: WS
  misc_feature: MA Experiment 20001557 PARAMETER Experiment Name: At_Drought_Soil_Dry_P Parameter: Post Timepoint (hr) Value: 3
  misc_feature: MA Experiment 20001557 PARAMETER Experiment Name: At_Drought_Soil_Dry_P Parameter: Post-Treatment Value: Re-Water vs. No Drought
  misc_feature: MA Experiment 20001557 PARAMETER Experiment Name: At_Drought_Soil_Dry_P Parameter: Timepoint (day) Value: 13
  misc_feature: MA Experiment 20001557 PARAMETER Experiment Name: At_Drought_Soil_Dry_P Parameter: Treatment Value: Drought vs. No Drought

SEQ ID NO: 47354 - protein, 446 aa, Arabidopsis thaliana; identical to SEQ ID NO: 39286
  peptide (1)..(446): Ceres Seq. ID no. 13592998
  misc_feature (83)..(340): Pfam Name: Caldesmon Pfam Description: Caldesmon
  misc_feature (83)..(340): Pfam Name: Caldesmon Pfam Description: Caldesmon
  misc_feature (83)..(446): Homolog of NCBI NO: 34897716 NR Description: ESTs AU082316(E3368),D41461(S3973) correspond to
  misc_feature (83)..(446): Homolog of NCBI NO: 34897716 NR Description: ESTs AU082316(E3368),D41461(S3973) correspond to
  misc_feature (1)..(446): Homolog of NCBI NO: 15241803 NR Description: calmodulin-binding protein family [Arabidopsis
  misc_feature (1)..(446): Homolog of NCBI NO: 15241803 NR Description: calmodulin-binding protein family [Arabidopsis

SEQ ID NO: 47355 - DNA, 1240 bp, Arabidopsis thaliana
  misc_feature (1)..(1240): Ceres Seq. ID no. 12606147
gctcggagcttgacacggtgaagtcatggcggcggagacggaggcagaatcacagtaccttaatgtactctctgctttcctcgccatcgaaccggtggactccgtcatcactctcgctagagggtgcactggaggatcaattactgagaacgcccagagatttttctgggaaatttgcgttgaagctgctgcgaatggtaacggatcatacgcgaagaagttactgaagaaactcataaatgaagttgagttagagaatggtgaagtattggatgaagtgtatgaagagtatgctctttacatgttaacttctaaggaagatatattggtgaaagaaaacataaggataaccaaattcatttcttttcttttccctgaaggttcgtacaaacacccgagttgtccaaggtcgaggaaattagttattccgctgcattgttcgttgaacatgcttgaaggagataccgggtgttccatctggccatcgagtctgtttctctcagaatttgttttgtcatttccagagttattcgccaataaagcctgttttgaggttggttctggagttggtatggtcgggatttgccttgcacatgtaaaggccaaagaggtgatactaacagacggagatcttttaactttgtctaacatgaagcttaatttggagagaaatcacttaaactatgatgacgagtttctcaaacgacccggagaagctcagagtacacgagttaaatgcactcatcttccatgggaaactgcatcggaaagtgaactaagccaatatcgtccagatattgttctaggcgcagatgtaatctatgatccgtcatgtctccctcatctacttcgggtgctagtagcccttttaaagaacccacccaaaagaggaaatggctctctcgagactgaagacagagacacgacacaagaagaacacagtcctgcggtggcttatatcgcatctgtgatccgcaatgtagacacttttaatgtgttcttgacacttgcagaccaaatggacctttccatcacagacgtgaccgcagaacttacgcctcgctttgagcttttaccatatatgcattcgtatgaccgctcaaccgttcggctcttctccatatcctccagataatgtaattctttcagaagcaatttagtttctttacaattgaaatcaaatattcctggaccgttatttcgaaacatattccaagatggttgttggttggctcaggtc

SEQ ID NO: 47356 - protein, 369 aa, Arabidopsis thaliana
  peptide (1)..(369): Ceres Seq. ID no. 12606148
  misc_feature (98)..(278): Homolog of NCBI NO: 37543704 NR Description: similar to CG7889-PA [Homo sapiens]
  misc_feature (65)..(278): Homolog of NCBI NO: 37549678 NR Description: similar to CG7889-PA [Homo sapiens]
  misc_feature (145)..(281): Homolog of NCBI NO: 29835170 NR Description: Unknown (protein for MGC:59002) [Mus musculus]
  misc_feature (145)..(278): Homolog of NCBI NO: 30149259 NR Description: similar to CG7889-PA [Homo sapiens]
  misc_feature (145)..(278): Homolog of NCBI NO: 37541807 NR Description: similar to hypothetical protein FLJ10661 [Homo
  misc_feature (62)..(281): Homolog of NCBI NO: 37550662 NR Description: similar to ectonucleotide
  misc_feature (145)..(278): Homolog of NCBI NO: 14603247 NR Description: Similar to RIKEN cDNA 5730409G15 gene [Homo
  misc_feature (145)..(278): Homolog of NCBI NO: 14585877 NR Description: hypothetical protein SB153 [Homo sapiens]
  misc_feature (148)..(366): Homolog of NCBI NO: 28829124 NR Description: similar to putative protein; protein id:
  misc_feature (1)..(369): Homolog of NCBI NO: 15240919 NR Description: putative protein; protein id: At5g27400.1
MAAETEAESQYLNVLSAFLAIEPVDSVITLARGCTGGSITENAQRFFWEICVEAAANGNGSYAKKLLKKLINEVELENGEVLDEVYEEYALYMLTSKEDILVKENIRITKFISFLFPEGSYKHPSCPRSRKLVIPLHCSLNMLEGDTGCSIWPSSLFLSEFVLSFPELFANKACFEVGSGVGMVGICLAHVKAKEVILTDGDLLTLSNMKLNLERNHLNYDDEFLKRPGEAQSTRVKCTHLPWETASESELSQYRPDIVLGADVIYDPSCLPHLLRVLVALLKNPPKRGNGSLETEDRDTTQEEHSPAVAYIASVIRNVDTFNVFLTLADQMDLSITDVTAELTPRFELLPYMHSYDRSTVRLFSISSR

SEQ ID NO: 47357 - protein, 277 aa, Arabidopsis thaliana
  peptide (1)..(277): Ceres Seq. ID no. 12606149
  misc_feature (6)..(186): Homolog of NCBI NO: 37543704 NR Description: similar to CG7889-PA [Homo sapiens]
  misc_feature (1)..(186): Homolog of NCBI NO: 37549678 NR Description: similar to CG7889-PA [Homo sapiens]
  misc_feature (53)..(189): Homolog of NCBI NO: 29835170 NR Description: Unknown (protein for MGC:59002) [Mus musculus]
  misc_feature (53)..(186): Homolog of NCBI NO: 30149259 NR Description: similar to CG7889-PA [Homo sapiens]
  misc_feature (53)..(186): Homolog of NCBI NO: 37541807 NR Description: similar to hypothetical protein FLJ10661 [Homo
  misc_feature (1)..(189): Homolog of NCBI NO: 37550662 NR Description: similar to ectonucleotide
  misc_feature (53)..(186): Homolog of NCBI NO: 14603247 NR Description: Similar to RIKEN cDNA 5730409G15 gene [Homo
  misc_feature (53)..(186): Homolog of NCBI NO: 14585877 NR Description: hypothetical protein SB153 [Homo sapiens]
  misc_feature (56)..(274): Homolog of NCBI NO: 28829124 NR Description: similar to putative protein; protein id:
  misc_feature (1)..(277): Homolog of NCBI NO: 15240919 NR Description: putative protein; protein id: At5g27400.1
MLTSKEDILVKENIRITKFISFLFPEGSYKHPSCPRSRKLVIPLHCSLNMLEGDTGCSIWPSSLFLSEFVLSFPELFANKACFEVGSGVGMVGICLAHVKAKEVILTDGDLLTLSNMKLNLERNHLNYDDEFLKRPGEAQSTRVKCTHLPWETASESELSQYRPDIVLGADVIYDPSCLPHLLRVLVALLKNPPKRGNGSLETEDRDTTQEEHSPAVAYIASVIRNVDTFNVFLTLADQMDLSITDVTAELTPRFELLPYMHSYDRSTVRLFSISSR

SEQ ID NO: 47358 - protein, 228 aa, Arabidopsis thaliana
  peptide (1)..(228): Ceres Seq. ID no. 12606150
  misc_feature (1)..(137): Homolog of NCBI NO: 37543704 NR Description: similar to CG7889-PA [Homo sapiens]
  misc_feature (1)..(137): Homolog of NCBI NO: 37549678 NR Description: similar to CG7889-PA [Homo sapiens]
  misc_feature (4)..(140): Homolog of NCBI NO: 29835170 NR Description: Unknown (protein for MGC:59002) [Mus musculus]
  misc_feature (4)..(137): Homolog of NCBI NO: 30149259 NR Description: similar to CG7889-PA [Homo sapiens]
  misc_feature (4)..(137): Homolog of NCBI NO: 37541807 NR Description: similar to hypothetical protein FLJ10661 [Homo
  misc_feature (1)..(140): Homolog of NCBI NO: 37550662 NR Description: similar to ectonucleotide
  misc_feature (4)..(137): Homolog of NCBI NO: 14603247 NR Description: Similar to RIKEN cDNA 5730409G15 gene [Homo
  misc_feature (4)..(137): Homolog of NCBI NO: 14585877 NR Description: hypothetical protein SB153 [Homo sapiens]
  misc_feature (7)..(225): Homolog of NCBI NO: 28829124 NR Description: similar to putative protein; protein id:
  misc_feature (1)..(228): Homolog of NCBI NO: 15240919 NR Description: putative protein; protein id: At5g27400.1
MLEGDTGCSIWPSSLFLSEFVLSFPELFANKACFEVGSGVGMVGICLAHVKAKEVILTDGDLLTLSNMKLNLERNHLNYDDEFLKRPGEAQSTRVKCTHLPWETASESELSQYRPDIVLGADVIYDPSCLPHLLRVLVALLKNPPKRGNGSLETEDRDTTQEEHSPAVAYIASVIRNVDTFNVFLTLADQMDLSITDVTAELTPRFELLPYMHSYDRSTVRLFSISSR

SEQ ID NO: 47359 - DNA, 1451 bp, Arabidopsis thaliana
  misc_feature (1)..(1451): Ceres Seq. ID no. 14307623
  misc_feature: MA Experiment ID: 20000184 Result: Down-regulated in Transcription
  misc_feature: MA Experiment 20000184 PARAMETER Experiment Name: At_Shoots__P Parameter: Age (day) Value: 7
  misc_feature: MA Experiment 20000184 PARAMETER Experiment Name: At_Shoots__P Parameter: Tissue Value: Shoots vs. Whole Plant
  misc_feature: MA Experiment ID: 20000437 Result: Up-regulated in Transcription
  misc_feature: MA Experiment 20000437 PARAMETER Experiment Name: At_Drought_P Parameter: Age (day) Value: 8
  misc_feature: MA Experiment 20000437 PARAMETER Experiment Name: At_Drought_P Parameter: Organism Value: A. thaliana
  misc_feature: MA Experiment 20000437 PARAMETER Experiment Name: At_Drought_P Parameter: Plant Line Value: WS
  misc_feature: MA Experiment 20000437 PARAMETER Experiment Name: At_Drought_P Parameter: Timepoint (hr) Value: 24
  misc_feature: MA Experiment 20000437 PARAMETER Experiment Name: At_Drought_P Parameter: Tissue Value: Whole Plant
  misc_feature: MA Experiment 20000437 PARAMETER Experiment Name: At_Drought_P Parameter: Treatment Value: Drought vs. No Drought
  misc_feature: MA Experiment ID: 20000496 Result: Down-regulated in Transcription
  misc_feature: MA Experiment 20000496 PARAMETER Experiment Name: At_Guard_Cells_P Parameter: Harvest Date Value: 7/19/2002
  misc_feature: MA Experiment 20000496 PARAMETER Experiment Name: At_Guard_Cells_P Parameter: Organism Value: Canola
  misc_feature: MA Experiment 20000496 PARAMETER Experiment Name: At_Guard_Cells_P Parameter: Tissue Value: Guard Cells vs. Leaves
  misc_feature: MA Experiment ID: 20001451 Result: Down-regulated in Transcription
  misc_feature: MA Experiment 20001451 PARAMETER Experiment Name: At_Far-red-induction_P Parameter: Age (day) Value: 7
  misc_feature: MA Experiment 20001451 PARAMETER Experiment Name: At_Far-red-induction_P Parameter: Light Value: Far-red vs. White
  misc_feature: MA Experiment 20001451 PARAMETER Experiment Name: At_Far-red-induction_P Parameter: Organism Value: A. thaliana
  misc_feature: MA Experiment 20001451 PARAMETER Experiment Name: At_Far-red-induction_P Parameter: Plant Line Value: Columbia
  misc_feature: MA Experiment 20001451 PARAMETER Experiment Name: At_Far-red-induction_P Parameter: Timepoint (hr) Value: 24
  misc_feature: MA Experiment 20001451 PARAMETER Experiment Name: At_Far-red-induction_P Parameter: Tissue Value: Whole Plant
gaaattcgtttaccagtcatcaccaccacaacctccggcgaaaatggacgtgcgtgaatcaatctcactgcaaaaccaagtctccatgaatctcgcaaaacacgtaatcaccaccgtctctcaaaactccaacgtcatcttctcaccggcttcaatcaacgtcgtactcagtataatcgccgctggatccgccggcgctaccaaagatcagatcctctcgtttctcaaattctcttccactgatcaacttaattcattctcttccgaaatcgtctccgctgttctcgctgacggtagtgctaacggtggtcctaagctctcggtggctaatggcgcctggatcgataagtctctctcctttaaaccttcctttaaacagctcttggaagattcgtataaagctgcttcgaatcaagctgattttcaatcgaaggctgtggaggtgattgctgaagtgaattcatgggctgaaaaggagacaaatggtctcatcactgaggttcttccagaaggatcagctgatagtatgaccaaactgatatttgcaaatgcattgtacttcaagggaacatggaacgagaaattcgatgagtcgttaacacaagaaggcgagtttcaccttcttgacggtaacaaagtgactgcaccattcatgaccagcaagaagaaacaatacgtaagtgcttacgatggtttcaaagttttgggacttccttacgtacaaggacaggataagcgacaattctccatgtacttttatcttcccgatgcaaacaacggactgtctgatcttctggacaaaatagtttccactcctgggttcttagacaaccacatcccacgcagacaagttaaagtccgcgaattcaagattccaaagtttaaattctctttcgggttcgatgcttcaaatgttttaaaaggattgggactgacttcgcctttcagcggtgaagaaggtttaactgagatggttgaatctcctgagatggggaagaatctatgcgtatcgaacattttccataaagcgtgtatcgaagtgaatgaagaaggaacagaagctgcagctgcatcagctggagttataaagctaagaggattgcttatggaggaagatgaaatagattttgttgcagaccatccgtttctattggtggtcacagagaacataacaggagtggttctgttcattggccaagttgttgatccgttgcattaatctaaagctaatgtggaagtttttggttttacttaaaataaatgagtcattggttttgaggactcatctttatgtaacatcctttgtcttgactctttgatgtgtgtaagaataatagtgatacataacagcttttcttctgtatttgggtcacatgtactgaactgatagacatacatacatgtgatgcatcttaatgattcactgtattgggtcattcatggttacatac

SEQ ID NO: 47360 - protein, 405 aa, Arabidopsis thaliana
  peptide (1)..(405): Ceres Seq. ID no. 14307624
  misc_feature (15)..(403): Homolog of NCBI NO: 15224694 NR Description: serpin, putative [Arabidopsis thaliana]
  misc_feature (16)..(405): Homolog of NCBI NO: 40539102 NR Description: putative serine protease inhibitor
  misc_feature (15)..(405): Homolog of NCBI NO: 15230638 NR Description: serpin, putative [Arabidopsis thaliana]
  misc_feature (17)..(404): Homolog of NCBI NO: 26224736 NR Description: serpin-like protein [Citrus x paradisi]
  misc_feature (15)..(405): Homolog of NCBI NO: 15220298 NR Description: serpin, putative [Arabidopsis thaliana]
KFVYQSSPPQPPAKMDVRESISLQNQVSMNLAKHVITTVSQNSNVIFSPASINVVLSIIAAGSAGATKDQILSFLKFSSTDQLNSFSSEIVSAVLADGSANGGPKLSVANGAWIDKSLSFKPSFKQLLEDSYKAASNQADFQSKAVEVIAEVNSWAEKETNGLITEVLPEGSADSMTKLIFANALYFKGTWNEKFDESLTQEGEFHLLDGNKVTAPFMTSKKKQYVSAYDGFKVLGLPYVQGQDKRQFSMYFYLPDANNGLSDLLDKIVSTPGFLDNHIPRRQVKVREFKIPKFKFSFGFDASNVLKGLGLTSPFSGEEGLTEMVESPEMGKNLCVSNIFHKACIEVNEEGTEAAAASAGVIKLRGLLMEEDEIDFVADHPFLLVVTENITGVVLFIGQVVDPLH

SEQ ID NO: 47361 - protein, 391 aa, Arabidopsis thaliana
  peptide (1)..(391): Ceres Seq. ID no. 14307625
  misc_feature (1)..(389): Homolog of NCBI NO: 15224694 NR Description: serpin, putative [Arabidopsis thaliana]
  misc_feature (2)..(391): Homolog of NCBI NO: 40539102 NR Description: putative serine protease inhibitor
  misc_feature (1)..(391): Homolog of NCBI NO: 15230638 NR Description: serpin, putative [Arabidopsis thaliana]
  misc_feature (3)..(390): Homolog of NCBI NO: 26224736 NR Description: serpin-like protein [Citrus x paradisi]
  misc_feature (1)..(391): Homolog of NCBI NO: 15220298 NR Description: serpin, putative [Arabidopsis thaliana]
MDVRESISLQNQVSMNLAKHVITTVSQNSNVIFSPASINVVLSIIAAGSAGATKDQILSFLKFSSTDQLNSFSSEIVSAVLADGSANGGPKLSVANGAWIDKSLSFKPSFKQLLEDSYKAASNQADFQSKAVEVIAEVNSWAEKETNGLITEVLPEGSADSMTKLIFANALYFKGTWNEKFDESLTQEGEFHLLDGNKVTAPFMTSKKKQYVSAYDGFKVLGLPYVQGQDKRQFSMYFYLPDANNGLSDLLDKIVSTPGFLDNHIPRRQVKVREFKIPKFKFSFGFDASNVLKGLGLTSPFSGEEGLTEMVESPEMGKNLCVSNIFHKACIEVNEEGTEAAAASAGVIKLRGLLMEEDEIDFVADHPFLLVVTENITGVVLFIGQVVDPLH

SEQ ID NO: 47362 - protein, 377 aa, Arabidopsis thaliana
  peptide (1)..(377): Ceres Seq. ID no. 14307626
  misc_feature (1)..(375): Homolog of NCBI NO: 15224694 NR Description: serpin, putative [Arabidopsis thaliana]
  misc_feature (1)..(377): Homolog of NCBI NO: 40539102 NR Description: putative serine protease inhibitor
  misc_feature (1)..(377): Homolog of NCBI NO: 15230638 NR Description: serpin, putative [Arabidopsis thaliana]
  misc_feature (1)..(376): Homolog of NCBI NO: 26224736 NR Description: serpin-like protein [Citrus x paradisi]
  misc_feature (1)..(377): Homolog of NCBI NO: 15220298 NR Description: serpin, putative [Arabidopsis thaliana]
MNLAKHVITTVSQNSNVIFSPASINVVLSIIAAGSAGATKDQILSFLKFSSTDQLNSFSSEIVSAVLADGSANGGPKLSVANGAWIDKSLSFKPSFKQLLEDSYKAASNQADFQSKAVEVIAEVNSWAEKETNGLITEVLPEGSADSMTKLIFANALYFKGTWNEKFDESLTQEGEFHLLDGNKVTAPFMTSKKKQYVSAYDGFKVLGLPYVQGQDKRQFSMYFYLPDANNGLSDLLDKIVSTPGFLDNHIPRRQVKVREFKIPKFKFSFGFDASNVLKGLGLTSPFSGEEGLTEMVESPEMGKNLCVSNIFHKACIEVNEEGTEAAAASAGVIKLRGLLMEEDEIDFVADHPFLLVVTENITGVVLFIGQVVDPLH

SEQ ID NO: 47363 - DNA, 2022 bp, Arabidopsis thaliana
  misc_feature (1)..(2022): Ceres Seq. ID no. 12592460
  misc_feature: MA Experiment ID: 108434 Result: Down-regulated in Transcription
  misc_feature: MA Experiment 108434 PARAMETER Experiment Name: At_Root_Tips_cDNA_P Parameter: Tissue Value: Root Tips
  misc_feature: MA Experiment ID: 108463 Result: Up-regulated in Transcription
  misc_feature: MA Experiment 108463 PARAMETER Experiment Name: At_Germinating_Seeds_cDNA_P Parameter: Age (day) Value: 3 vs. 0
  misc_feature: MA Experiment 108463 PARAMETER Experiment Name: At_Germinating_Seeds_cDNA_P Parameter: Tissue Value: Germinating Seeds
  misc_feature: MA Experiment ID: 108573 Result: Up-regulated in Transcription
  misc_feature: MA Experiment 108573 PARAMETER Experiment Name: At_Drought_cDNA_P Parameter: Timepoint (hr) Value: 6
  misc_feature: MA Experiment 108573 PARAMETER Experiment Name: At_Drought_cDNA_P Parameter: Tissue Value: Aerial
  misc_feature: MA Experiment 108573 PARAMETER Experiment Name: At_Drought_cDNA_P Parameter: Treatment Value: Drought vs. No Drought
  misc_feature: MA Experiment ID: 108574 Result: Up-regulated in Transcription
  misc_feature: MA Experiment 108574 PARAMETER Experiment Name: At_Wounding__cDNA_P Parameter: Timepoint (hr) Value: 1
  misc_feature: MA Experiment 108574 PARAMETER Experiment Name: At_Wounding__cDNA_P Parameter: Tissue Value: Aerial
  misc_feature: MA Experiment 108574 PARAMETER Experiment Name: At_Wounding__cDNA_P Parameter: Treatment Value: Wounding vs. No Wounding
  misc_feature: MA Experiment ID: 108579 Result: Up-regulated in Transcription
  misc_feature: MA Experiment 108579 PARAMETER Experiment Name: At_4deg_Cold_cDNA_P Parameter: Temperature (deg C) Value: 4 vs. 22
  misc_feature: MA Experiment 108579 PARAMETER Experiment Name: At_4deg_Cold_cDNA_P Parameter: Timepoint (hr) Value: 6
  misc_feature: MA Experiment 108579 PARAMETER Experiment Name: At_4deg_Cold_cDNA_P Parameter: Tissue Value: Aerial
  misc_feature: MA Experiment ID: 108585 Result: Up-regulated in Transcription
  misc_feature: MA Experiment 108585 PARAMETER Experiment Name: At_5mM_NaNP_cDNA_P Parameter: Timepoint (hr) Value: 6
  misc_feature: MA Experiment 108585 PARAMETER Experiment Name: At_5mM_NaNP_cDNA_P Parameter: Tissue Value: Aerial
  misc_feature: MA Experiment 108585 PARAMETER Experiment Name: At_5mM_NaNP_cDNA_P Parameter: Treatment Value: null
  misc_feature: MA Experiment ID: 108595 Result: Up-regulated in Transcription
  misc_feature: MA Experiment 108595 PARAMETER Experiment Name: At_Ler-pi_Ovule_cDNA_P Parameter: Plant Line Value: null
  misc_feature: MA Experiment ID: 108667 Result: Up-regulated in Transcription
  misc_feature: MA Experiment 108667 PARAMETER Experiment Name: At_2mM_SA_cDNA_P Parameter: Plant Line Value: WS
  misc_feature: MA Experiment 108667 PARAMETER Experiment Name: At_2mM_SA_cDNA_P Parameter: Timepoint (hr) Value: 1
  misc_feature: MA Experiment 108667 PARAMETER Experiment Name: At_2mM_SA_cDNA_P Parameter: Treatment Value: 2mM SA vs. No Treatment
  misc_feature: MA Experiment ID: 108668 Result: Up-regulated in Transcription
  misc_feature: MA Experiment 108668 PARAMETER Experiment Name: At_2mM_SA_cDNA_P Parameter: Plant Line Value: WS
  misc_feature: MA Experiment 108668 PARAMETER Experiment Name: At_2mM_SA_cDNA_P Parameter: Timepoint (hr) Value: 6
  misc_feature: MA Experiment 108668 PARAMETER Experiment Name: At_2mM_SA_cDNA_P Parameter: Treatment Value: 2mM SA vs. No Treatment
  misc_feature: MA Experiment ID: 20000069 Result: Up-regulated in Transcription
  misc_feature: MA Experiment 20000069 PARAMETER Experiment Name: At_100uM_ABA_Mutants_cDNA_P Parameter: Plant Line Value: CS23
  misc_feature: MA Experiment 20000069 PARAMETER Experiment Name: At_100uM_ABA_Mutants_cDNA_P Parameter: Timepoint (hr) Value: 6
  misc_feature: MA Experiment 20000069 PARAMETER Experiment Name: At_100uM_ABA_Mutants_cDNA_P Parameter: Tissue Value: Aerial
  misc_feature: MA Experiment 20000069 PARAMETER Experiment Name: At_100uM_ABA_Mutants_cDNA_P Parameter: Treatment Value: 100uM ABA vs. No Treatment
  misc_feature: MA Experiment ID: 20000070 Result: Up-regulated in Transcription
  misc_feature: MA Experiment 20000070 PARAMETER Experiment Name: At_100uM_ABA_Mutants_cDNA_P Parameter: Plant Line Value: CS24
  misc_feature: MA Experiment 20000070 PARAMETER Experiment Name: At_100uM_ABA_Mutants_cDNA_P Parameter: Timepoint (hr) Value: 6
  misc_feature: MA Experiment 20000070 PARAMETER Experiment Name: At_100uM_ABA_Mutants_cDNA_P Parameter: Tissue Value: Aerial
  misc_feature: MA Experiment 20000070 PARAMETER Experiment Name: At_100uM_ABA_Mutants_cDNA_P Parameter: Treatment Value: 100uM ABA vs. No Treatment
  misc_feature: MA Experiment ID: 20000071 Result: Up-regulated in Transcription
  misc_feature: MA Experiment 20000071 PARAMETER Experiment Name: At_100uM_ABA_Mutants_cDNA_P Parameter: Plant Line Value: CS8104
  misc_feature: MA Experiment 20000071 PARAMETER Experiment Name: At_100uM_ABA_Mutants_cDNA_P Parameter: Timepoint (hr) Value: 6
  misc_feature: MA Experiment 20000071 PARAMETER Experiment Name: At_100uM_ABA_Mutants_cDNA_P Parameter: Tissue Value: Aerial
  misc_feature: MA Experiment 20000071 PARAMETER Experiment Name: At_100uM_ABA_Mutants_cDNA_P Parameter: Treatment Value: 100uM ABA vs. No Treatment
  misc_feature: MA Experiment ID: 20000086 Result: Up-regulated in Transcription
  misc_feature: MA Experiment 20000086 PARAMETER Experiment Name: At_100uM_ABA_Mutants_cDNA_P Parameter: Plant Line Value: CS22
  misc_feature: MA Experiment 20000086 PARAMETER Experiment Name: At_100uM_ABA_Mutants_cDNA_P Parameter: Timepoint (hr) Value: 6
  misc_feature: MA Experiment 20000086 PARAMETER Experiment Name: At_100uM_ABA_Mutants_cDNA_P Parameter: Tissue Value: Aerial
  misc_feature: MA Experiment 20000086 PARAMETER Experiment Name: At_100uM_ABA_Mutants_cDNA_P Parameter: Treatment Value: 100uM ABA vs. No Treatment
  misc_feature: MA Experiment ID: 20000087 Result: Up-regulated in Transcription
  misc_feature: MA Experiment 20000087 PARAMETER Experiment Name: At_100uM_ABA_Mutants_cDNA_P Parameter: Plant Line Value: WS
  misc_feature: MA Experiment 20000087 PARAMETER Experiment Name: At_100uM_ABA_Mutants_cDNA_P Parameter: Timepoint (hr) Value: 6
  misc_feature: MA Experiment 20000087 PARAMETER Experiment Name: At_100uM_ABA_Mutants_cDNA_P Parameter: Tissue Value: Aerial
  misc_feature: MA Experiment 20000087 PARAMETER Experiment Name: At_100uM_ABA_Mutants_cDNA_P Parameter: Treatment Value: 100uM ABA vs. No Treatment
  misc_feature: MA Experiment ID: 20000089 Result: Up-regulated in Transcription
  misc_feature: MA Experiment ID: 20000090 Result: Up-regulated in Transcription
  misc_feature: MA Experiment ID: 20000117 Result: Up-regulated in Transcription
  misc_feature: MA Experiment 20000117 PARAMETER Experiment Name: At_100uM_ABA_Mutants_cDNA_P Parameter: Plant Line Value: Columbia
  misc_feature: MA Experiment 20000117 PARAMETER Experiment Name: At_100uM_ABA_Mutants_cDNA_P Parameter: Timepoint (hr) Value: 6
  misc_feature: MA Experiment 20000117 PARAMETER Experiment Name: At_100uM_ABA_Mutants_cDNA_P Parameter: Tissue Value: Aerial
  misc_feature: MA Experiment 20000117 PARAMETER Experiment Name: At_100uM_ABA_Mutants_cDNA_P Parameter: Treatment Value: 100uM ABA vs. No Treatment
  misc_feature: MA Experiment ID: 20000182 Result: Up-regulated in Transcription
  misc_feature: MA Experiment 20000182 PARAMETER Experiment Name: At_2mM_SA_P Parameter: Age (day) Value: 14
  misc_feature: MA Experiment 20000182 PARAMETER Experiment Name: At_2mM_SA_P Parameter: Organism Value: A. thaliana
  misc_feature: MA Experiment 20000182 PARAMETER Experiment Name: At_2mM_SA_P Parameter: Plant Line Value: WS
  misc_feature: MA Experiment 20000182 PARAMETER Experiment Name: At_2mM_SA_P Parameter: Timepoint (hr) Value: 6
  misc_feature: MA Experiment 20000182 PARAMETER Experiment Name: At_2mM_SA_P Parameter: Tissue Value: Aerial
  misc_feature: MA Experiment 20000182 PARAMETER Experiment Name: At_2mM_SA_P Parameter: Treatment Value: 2mM SA vs. No Treatment
  misc_feature: MA Experiment ID: 20000184 Result: Down-regulated in Transcription
  misc_feature: MA Experiment 20000184 PARAMETER Experiment Name: At_Shoots__P Parameter: Age (day) Value: 7
  misc_feature: MA Experiment 20000184 PARAMETER Experiment Name: At_Shoots__P Parameter: Tissue Value: Shoots vs. Whole Plant
  misc_feature: MA Experiment ID: 20000234 Result: Down-regulated in Transcription
  misc_feature: MA Experiment 20000234 PARAMETER Experiment Name: At_Siliques_P Parameter: Age (day) Value: 21
  misc_feature: MA Experiment 20000234 PARAMETER Experiment Name: At_Siliques_P Parameter: Organism Value: A. thaliana
  misc_feature: MA Experiment 20000234 PARAMETER Experiment Name: At_Siliques_P Parameter: Plant Line Value: WS
  misc_feature: MA Experiment 20000234 PARAMETER Experiment Name: At_Siliques_P Parameter: Tissue Value: Less Than 5mm Siliques vs. Whole Plant
  misc_feature: MA Experiment ID: 20000235 Result: Down-regulated in Transcription
  misc_feature: MA Experiment 20000235 PARAMETER Experiment Name: At_Siliques_P Parameter: Age (day) Value: 21
  misc_feature: MA Experiment 20000235 PARAMETER Experiment Name: At_Siliques_P Parameter: Organism Value: A. thaliana
  misc_feature: MA Experiment 20000235 PARAMETER Experiment Name: At_Siliques_P Parameter: Plant Line Value: WS
  misc_feature: MA Experiment 20000235 PARAMETER Experiment Name: At_Siliques_P Parameter: Tissue Value: 5-10mm Siliques vs. Whole Plant
  misc_feature: MA Experiment ID: 20000264 Result: Down-regulated in Transcription
  misc_feature: MA Experiment 20000264 PARAMETER Experiment Name: At_Open_Flower_P Parameter: Age (day) Value: 21
  misc_feature: MA Experiment 20000264 PARAMETER Experiment Name: At_Open_Flower_P Parameter: Plant Line Value: WS
  misc_feature: MA Experiment 20000264 PARAMETER Experiment Name: At_Open_Flower_P Parameter: Tissue Value: Open Flower vs. Whole Plant
  misc_feature: MA Experiment ID: 20000265 Result: Down-regulated in Transcription
  misc_feature: MA Experiment 20000265 PARAMETER Experiment Name: At_Open_Flower_P Parameter: Age (day) Value: 21
  misc_feature: MA Experiment 20000265 PARAMETER Experiment Name: At_Open_Flower_P Parameter: Plant Line Value: WS
  misc_feature: MA Experiment 20000265 PARAMETER Experiment Name: At_Open_Flower_P Parameter: Tissue Value: Closed Flower vs. Whole Plant
  misc_feature: MA Experiment ID: 20000286 Result: Down-regulated in Transcription
  misc_feature: MA Experiment 20000286 PARAMETER Experiment Name: At_Open_Flower_P Parameter: Age (day) Value: 21
  misc_feature: MA Experiment 20000286 PARAMETER Experiment Name: At_Open_Flower_P Parameter: Plant Line Value: WS
  misc_feature: MA Experiment 20000286 PARAMETER Experiment Name: At_Open_Flower_P Parameter: Tissue Value: Half Open vs. Whole Plant
  misc_feature: MA Experiment ID: 20000436 Result: Up-regulated in Transcription
  misc_feature: MA Experiment 20000436 PARAMETER Experiment Name: At_Drought_P Parameter: Age (day) Value: 7
  misc_feature: MA Experiment 20000436 PARAMETER Experiment Name: At_Drought_P Parameter: Organism Value: A. thaliana
  misc_feature: MA Experiment 20000436 PARAMETER Experiment Name: At_Drought_P Parameter: Plant Line Value: WS
  misc_feature: MA Experiment 20000436 PARAMETER Experiment Name: At_Drought_P Parameter: Timepoint (hr) Value: 12
  misc_feature: MA Experiment 20000436 PARAMETER Experiment Name: At_Drought_P Parameter: Tissue Value: Whole Plant
  misc_feature: MA Experiment 20000436 PARAMETER Experiment Name: At_Drought_P Parameter: Treatment Value: Drought vs. No Drought
  misc_feature: MA Experiment ID: 20000437 Result: Up-regulated in Transcription
  misc_feature: MA Experiment 20000437 PARAMETER Experiment Name: At_Drought_P Parameter: Age (day) Value: 8
  misc_feature: MA Experiment 20000437 PARAMETER Experiment Name: At_Drought_P Parameter: Organism Value: A. thaliana
  misc_feature: MA Experiment 20000437 PARAMETER Experiment Name: At_Drought_P Parameter: Plant Line Value: WS
  misc_feature: MA Experiment 20000437 PARAMETER Experiment Name: At_Drought_P Parameter: Timepoint (hr) Value: 24
  misc_feature: MA Experiment 20000437 PARAMETER Experiment Name: At_Drought_P Parameter: Tissue Value: Whole Plant
  misc_feature: MA Experiment 20000437 PARAMETER Experiment Name: At_Drought_P Parameter: Treatment Value: Drought vs. No Drought
  misc_feature: MA Experiment ID: 20000438 Result: Down-regulated in Transcription
  misc_feature: MA Experiment 20000438 PARAMETER Experiment Name: At_Shoots__P Parameter: Age (day) Value: 14
  misc_feature: MA Experiment 20000438 PARAMETER Experiment Name: At_Shoots__P Parameter: Tissue Value: Shoots vs. Whole Plant
  misc_feature: MA Experiment ID: 20000439 Result: Down-regulated in Transcription
  misc_feature: MA Experiment 20000439 PARAMETER Experiment Name: At_Roots__P Parameter: Age (day) Value: 14 vs. 21
  misc_feature: MA Experiment 20000439 PARAMETER Experiment Name: At_Roots__P Parameter: Organism Value: A. thaliana
  misc_feature: MA Experiment 20000439 PARAMETER Experiment Name: At_Roots__P Parameter: Tissue Value: Roots vs. Whole Plant
  misc_feature: MA Experiment ID: 20000441 Result: Up-regulated in Transcription
  misc_feature: MA Experiment 20000441 PARAMETER Experiment Name: At_1uM_BR-BRZ__P Parameter: Tissue Value: Shoot Apices
  misc_feature: MA Experiment 20000441 PARAMETER Experiment Name: At_1uM_BR-BRZ__P Parameter: Treatment Value: 1uM BR vs. No Treatment
  misc_feature: MA Experiment ID: 20000453 Result: Up-regulated in Transcription
  misc_feature: MA Experiment 20000453 PARAMETER Experiment Name: At_100uM_ABA_P Parameter: Age (day) Value: 15
  misc_feature: MA Experiment 20000453 PARAMETER Experiment Name: At_100uM_ABA_P Parameter: Organism Value: A. thaliana
  misc_feature: MA Experiment 20000453 PARAMETER Experiment Name: At_100uM_ABA_P Parameter: Plant Line Value: WS
  misc_feature: MA Experiment 20000453 PARAMETER Experiment Name: At_100uM_ABA_P Parameter: Timepoint (hr) Value: 24
  misc_feature: MA Experiment 20000453 PARAMETER Experiment Name: At_100uM_ABA_P Parameter: Tissue Value: Aerial
  misc_feature: MA Experiment 20000453 PARAMETER Experiment Name: At_100uM_ABA_P Parameter: Treatment Value: 100uM ABA vs. No Treatment
  misc_feature: MA Experiment ID: 20000460 Result: Up-regulated in Transcription
  misc_feature: MA Experiment 20000460 PARAMETER Experiment Name: At_10percent_PEG_P Parameter: Age (day) Value: 12
  misc_feature: MA Experiment 20000460 PARAMETER Experiment Name: At_10percent_PEG_P Parameter: Organism Value: A. thaliana
  misc_feature: MA Experiment 20000460 PARAMETER Experiment Name: At_10percent_PEG_P Parameter: Plant Line Value: WS
  misc_feature: MA Experiment 20000460 PARAMETER Experiment Name: At_10percent_PEG_P Parameter: Timepoint (day) Value: 12
  misc_feature: MA Experiment 20000460 PARAMETER Experiment Name: At_10percent_PEG_P Parameter: Tissue Value: Whole Plant
  misc_feature: MA Experiment 20000460 PARAMETER Experiment Name: At_10percent_PEG_P Parameter: Treatment Value: 10percent PEG vs. No Treatment
  misc_feature: MA Experiment ID: 20000495 Result: Down-regulated in Transcription
  misc_feature: MA Experiment 20000495 PARAMETER Experiment Name: At_Guard_Cells_P Parameter: Harvest Date Value: 8/2/2002
  misc_feature: MA Experiment 20000495 PARAMETER Experiment Name: At_Guard_Cells_P Parameter: Organism Value: A. thaliana
  misc_feature: MA Experiment 20000495 PARAMETER Experiment Name: At_Guard_Cells_P Parameter: Tissue Value: Guard Cells vs. Leaves
  misc_feature: MA Experiment ID: 20001911 Result: Up-regulated in Transcription
  misc_feature: MA Experiment 20001911 PARAMETER Experiment Name: At_Drought_Reproduction_P Parameter: Age (day) Value: 40
  misc_feature: MA Experiment 20001911 PARAMETER Experiment Name: At_Drought_Reproduction_P Parameter: Organism Value: A. thaliana
  misc_feature: MA Experiment 20001911 PARAMETER Experiment Name: At_Drought_Reproduction_P Parameter: Plant Line Value: WS
  misc_feature: MA Experiment 20001911 PARAMETER Experiment Name: At_Drought_Reproduction_P Parameter: Timepoint (day) Value: 10
  misc_feature: MA Experiment 20001911 PARAMETER Experiment Name: At_Drought_Reproduction_P Parameter: Tissue Value: Flowers
  misc_feature: MA Experiment 20001911 PARAMETER Experiment Name: At_Drought_Reproduction_P Parameter: Treatment Value: Drought vs. No Drought
aagctgattcttgagtatgcaaggaaaacttctcttttgtccccttgtcaacaaaaatctcccattcaacaaaatttcttcagcttctctccttcaaaaggtttttattctccttggtttgaacaagttacactgtagagagtgatttggctaaaagaagattgattcaggagctgtgtagtgtattgctggggtttttccaatgcaaacgtctcagaaacatcacagtgcggctggactgcacatgctgtatcctcaagtctactgttcacctcagtttcaagcgaaagacaacaaaggcttctctgatatcccgtccaaagaaaacttttttaccctcgaatcctccactgcttctggtagtcttccttcgtatgactctccttctgtgagcattacatctggccggagcccgtttctcctcagggctctcagtcttgcatctcggatctccatcattcccctgacaacgtctatggatcacctttgagtggggtgtcatctcttgcctatgatgaagctggagtcaagagtaagattcgggaacttgaggtctcgctgctgagtggtgatacaaaagttgaagaattctcaggttttagccccgctgctgggaagtcgtggaactgggatgaacttttggctttgactccacagttggacttgaaagaggtgctggtggaggctgctcgggcagtcgctgatggggatttcgctacagcgtatggattccttgatgtcttggaacagatggtgtcagtctcaggcagtccgatccaacggctaggcacttacatggcagaagggcttagagcgaggcttgaggggtctgggagcaatatatacaaatccttgaaatgcaatgaaccaacgggaagggaactgatgtcttacatgagtgttctctatgaaatctgcccctactggaaattcgcgtacacaactgcgaatgttgagatcttggaagcaatagctggggaaaccagagtccacattatcgattttcagattgcacagggatcacaatacatgtttttgattcaggagcttgcgaaacgccctggtgggccgccgttgctgcgtgtgacgggtgtggatgattcacagtccacctatgctcgtgggggaggactcagcttggtaggtgagaggcttgcaactttggcgcagtcatgtggtgtcccgtttgagtttcacgatgccatcatgtctgggtgcaaggtgcagcgggaacatctcgggttggaacctggctttgctgttgttgtgaacttcccatatgtattacaccacatgccagacgagagcgtaagtgttgaaaatcacagagacaggctgctgcatctgatcaagagcctctccccaaaactggttactctagtagagcaagaatccaacacaaacacctcgccattcctgtcacggtttgtggaaacactggattactacacagcgatgtttgagtcgatagatgcagcacggccacgggatgataagcagagaatcagcgcagaacaacactgtgtagcaagagacatagtgaacatgatagcatgtgaggagtcagagagagtagagagacacgaggtactgggaaatggagggtcagaatgatgatggctgggttcacgggttggccggtcagcacatctgcagcgtttgcagcgagtgagatgctgaaagcttatgacaaaaactacaaactgggaggccatgaaggagcgctctacctcttctggaagagacgacccatggctacatgttccgtgtggaagccaaacccaaactagattgggtaagttatagtgatgatggttacttgagtggataaagaagagcacaacaaaaacacatctgtcgctgtaaattttttaggatgtgcaatgatgttttaagttgtaacacaacctaagttatatatgtatacaaaccaaacctggtggttgtttttctcttgtaaattgtcatgtggttgtgggtgggttgctagtaatgaaatataaccaaaacattgattaggtc

SEQ ID NO: 47364 - protein, 287 aa, Arabidopsis thaliana
  peptide (1)..(287): Ceres Seq. ID no. 12592461
  misc_feature (1)..(252): Pfam Name: GRAS family transcription factor Pfam Description: GRAS family transcription factor
  misc_feature (1)..(282): Homolog of NCBI NO: 30694805 NR Description: scarecrow-like transcription factor 5 (SCL5)
  misc_feature (1)..(282): Homolog of NCBI NO: 25405382 NR Description: scarecrow-like protein [imported] - Arabidopsis
  misc_feature (1)..(282): Homolog of NCBI NO: 23397333 NR Description: putative scarecrow protein [Arabidopsis thaliana]
  misc_feature (1)..(282): Homolog of NCBI NO: 14517552 NR Description: F17J6.12/F17J6.12 [Arabidopsis thaliana]
  misc_feature (1)..(282): Homolog of NCBI NO: 25989334 NR Description: chitin-inducible gibberellin-responsive protein
  misc_feature (1)..(282): Homolog of NCBI NO: 37533564 NR Description: putative SCARECROW gene regulator-like
  misc_feature (66)..(282): Homolog of NCBI NO: 11358824 NR Description: scarecrow-like protein 13
  misc_feature (1)..(287): Homolog of NCBI NO: 15236009 NR Description: scarecrow-like 13 (SCL13)
  misc_feature (1)..(287): Homolog of NCBI NO: 7488182 NR Description: probable SCARECROW - Arabidopsis thaliana
  misc_feature (1)..(282): Homolog of NCBI NO: 16930433 NR Description: AT4g17230/dl4650c [Arabidopsis thaliana]
MVSVSGSPIQRLGTYMAEGLRARLEGSGSNIYKSLKCNEPTGRELMSYMSVLYEICPYWKFAYTTANVEILEAIAGETRVHIIDFQIAQGSQYMFLIQELAKRPGGPPLLRVTGVDDSQSTYARGGGLSLVGERLATLAQSCGVPFEFHDAIMSGCKVQREHLGLEPGFAVVVNFPYVLHHMPDESVSVENHRDRLLHLIKSLSPKLVTLVEQESNTNTSPFLSRFVETLDYYTAMFESIDAARPRDDKQRISAEQHCVARDIVNMIACEESERVERHEVLGNGGSE

SEQ ID NO: 47365 - protein, 272 aa, Arabidopsis thaliana
  peptide (1)..(272): Ceres Seq. ID no. 12592462
  misc_feature (1)..(237): Pfam Name: GRAS family transcription factor Pfam Description: GRAS family transcription factor
  misc_feature (1)..(267): Homolog of NCBI NO: 30694805 NR Description: scarecrow-like transcription factor 5 (SCL5)
  misc_feature (1)..(267): Homolog of NCBI NO: 25405382 NR Description: scarecrow-like protein [imported] - Arabidopsis
  misc_feature (1)..(267): Homolog of NCBI NO: 23397333 NR Description: putative scarecrow protein [Arabidopsis thaliana]
  misc_feature (1)..(267): Homolog of NCBI NO: 14517552 NR Description: F17J6.12/F17J6.12 [Arabidopsis thaliana]
  misc_feature (1)..(267): Homolog of NCBI NO: 25989334 NR Description: chitin-inducible gibberellin-responsive protein
  misc_feature (1)..(267): Homolog of NCBI NO: 37533564 NR Description: putative SCARECROW gene regulator-like
  misc_feature (51)..(267): Homolog of NCBI NO: 11358824 NR Description: scarecrow-like protein 13
  misc_feature (1)..(272): Homolog of NCBI NO: 15236009 NR Description: scarecrow-like 13 (SCL13)
  misc_feature (1)..(272): Homolog of NCBI NO: 7488182 NR Description: probable SCARECROW - Arabidopsis thaliana
  misc_feature (1)..(267): Homolog of NCBI NO: 16930433 NR Description: AT4g17230/dl4650c [Arabidopsis thaliana]
MAEGLRARLEGSGSNIYKSLKCNEPTGRELMSYMSVLYEICPYWKFAYTTANVEILEAIAGETRVHIIDFQIAQGSQYMFLIQELAKRPGGPPLLRVTGVDDSQSTYARGGGLSLVGERLATLAQSCGVPFEFHDAIMSGCKVQREHLGLEPGFAVVVNFPYVLHHMPDESVSVENHRDRLLHLIKSLSPKLVTLVEQESNTNTSPFLSRFVETLDYYTAMFESIDAARPRDDKQRISAEQHCVARDIVNMIACEESERVERHEVLGNGGSE

SEQ ID NO: 47366 - protein, 242 aa, Arabidopsis thaliana
  peptide (1)..(242): Ceres Seq. ID no. 12592463
  misc_feature (1)..(207): Pfam Name: GRAS family transcription factor Pfam Description: GRAS family transcription factor
  misc_feature (1)..(237): Homolog of NCBI NO: 30694805 NR Description: scarecrow-like transcription factor 5 (SCL5)
  misc_feature (1)..(237): Homolog of NCBI NO: 25405382 NR Description: scarecrow-like protein [imported] - Arabidopsis
  misc_feature (1)..(237): Homolog of NCBI NO: 23397333 NR Description: putative scarecrow protein [Arabidopsis thaliana]
  misc_feature (1)..(237): Homolog of NCBI NO: 14517552 NR Description: F17J6.12/F17J6.12 [Arabidopsis thaliana]
  misc_feature (1)..(237): Homolog of NCBI NO: 25989334 NR Description: chitin-inducible gibberellin-responsive protein
  misc_feature (1)..(237): Homolog of NCBI NO: 37533564 NR Description: putative SCARECROW gene regulator-like
  misc_feature (21)..(237): Homolog of NCBI NO: 11358824 NR Description: scarecrow-like protein 13
  misc_feature (1)..(242): Homolog of NCBI NO: 15236009 NR Description: scarecrow-like 13 (SCL13)
  misc_feature (1)..(242): Homolog of NCBI NO: 7488182 NR Description: probable SCARECROW - Arabidopsis thaliana
  misc_feature (1)..(237): Homolog of NCBI NO: 16930433 NR Description: AT4g17230/dl4650c [Arabidopsis thaliana]
MSYMSVLYEICPYWKFAYTTANVEILEAIAGETRVHIIDFQIAQGSQYMFLIQELAKRPGGPPLLRVTGVDDSQSTYARGGGLSLVGERLATLAQSCGVPFEFHDAIMSGCKVQREHLGLEPGFAVVVNFPYVLHHMPDESVSVENHRDRLLHLIKSLSPKLVTLVEQESNTNTSPFLSRFVETLDYYTAMFESIDAARPRDDKQRISAEQHCVARDIVNMIACEESERVERHEVLGNGGSE

SEQ ID NO: 47367 - DNA, 2051 bp, Arabidopsis thaliana; identical to SEQ ID NO: 46700
  misc_feature (1)..(2051): Ceres Seq. ID no. 12575552
  misc_feature: MA Experiment ID: 20000173 Result: Up-regulated in Transcription
  misc_feature: MA Experiment 20000173 PARAMETER Experiment Name: At_42deg_Heat_P Parameter: Age (day) Value: 14
  misc_feature: MA Experiment 20000173 PARAMETER Experiment Name: At_42deg_Heat_P Parameter: Organism Value: A. thaliana
  misc_feature: MA Experiment 20000173 PARAMETER Experiment Name: At_42deg_Heat_P Parameter: Plant Line Value: WS
  misc_feature: MA Experiment 20000173 PARAMETER Experiment Name: At_42deg_Heat_P Parameter: Temperature (deg C) Value: 42 vs. 22
  misc_feature: MA Experiment 20000173 PARAMETER Experiment Name: At_42deg_Heat_P Parameter: Timepoint (hr) Value: 6
  misc_feature: MA Experiment 20000173 PARAMETER Experiment Name: At_42deg_Heat_P Parameter: Tissue Value: Aerial
  misc_feature: MA Experiment ID: 20000234 Result: Down-regulated in Transcription
  misc_feature: MA Experiment 20000234 PARAMETER Experiment Name: At_Siliques_P Parameter: Age (day) Value: 21
  misc_feature: MA Experiment 20000234 PARAMETER Experiment Name: At_Siliques_P Parameter: Organism Value: A. thaliana
  misc_feature: MA Experiment 20000234 PARAMETER Experiment Name: At_Siliques_P Parameter: Plant Line Value: WS
  misc_feature: MA Experiment 20000234 PARAMETER Experiment Name: At_Siliques_P Parameter: Tissue Value: Less Than 5mm Siliques vs. Whole Plant
  misc_feature: MA Experiment ID: 20000264 Result: Down-regulated in Transcription
  misc_feature: MA Experiment 20000264 PARAMETER Experiment Name: At_Open_Flower_P Parameter: Age (day) Value: 21
  misc_feature: MA Experiment 20000264 PARAMETER Experiment Name: At_Open_Flower_P Parameter: Plant Line Value: WS
  misc_feature: MA Experiment 20000264 PARAMETER Experiment Name: At_Open_Flower_P Parameter: Tissue Value: Open Flower vs. Whole Plant
  misc_feature: MA Experiment ID: 20000265 Result: Down-regulated in Transcription
  misc_feature: MA Experiment 20000265 PARAMETER Experiment Name: At_Open_Flower_P Parameter: Age (day) Value: 21
  misc_feature: MA Experiment 20000265 PARAMETER Experiment Name: At_Open_Flower_P Parameter: Plant Line Value: WS
  misc_feature: MA Experiment 20000265 PARAMETER Experiment Name: At_Open_Flower_P Parameter: Tissue Value: Closed Flower vs. Whole Plant
  misc_feature: MA Experiment ID: 20000286 Result: Down-regulated in Transcription
  misc_feature: MA Experiment 20000286 PARAMETER Experiment Name: At_Open_Flower_P Parameter: Age (day) Value: 21
  misc_feature: MA Experiment 20000286 PARAMETER Experiment Name: At_Open_Flower_P Parameter: Plant Line Value: WS
  misc_feature: MA Experiment 20000286 PARAMETER Experiment Name: At_Open_Flower_P Parameter: Tissue Value: Half Open vs. Whole Plant
  misc_feature: MA Experiment ID: 20001757 Result: Up-regulated in Transcription
  misc_feature: MA Experiment 20001757 PARAMETER Experiment Name: At_50mM_NH4NO3_L-to-H_P Parameter: Timepoint (hr) Value: 6
  misc_feature: MA Experiment 20001757 PARAMETER Experiment Name: At_50mM_NH4NO3_L-to-H_P Parameter: Tissue Value: Leaf
  misc_feature: MA Experiment 20001757 PARAMETER Experiment Name: At_50mM_NH4NO3_L-to-H_P Parameter: Treatment Value: 50mM NH4NO3 vs 100mM Mannitol
  misc_feature: MA Experiment ID: 20001905 Result: Up-regulated in Transcription
  misc_feature: MA Experiment 20001905 PARAMETER Experiment Name: At_Drought_Reproduction_P Parameter: Age (day) Value: 40
  misc_feature: MA Experiment 20001905 PARAMETER Experiment Name: At_Drought_Reproduction_P Parameter: Organism Value: A. thaliana
  misc_feature: MA Experiment 20001905 PARAMETER Experiment Name: At_Drought_Reproduction_P Parameter: Plant Line Value: WS
  misc_feature: MA Experiment 20001905 PARAMETER Experiment Name: At_Drought_Reproduction_P Parameter: Timepoint (day) Value: 10
  misc_feature: MA Experiment 20001905 PARAMETER Experiment Name: At_Drought_Reproduction_P Parameter: Tissue Value: Rosettes
  misc_feature: MA Experiment 20001905 PARAMETER Experiment Name: At_Drought_Reproduction_P Parameter: Treatment Value: Drought vs. No Drought

SEQ ID NO: 47368 - protein, 258 aa, Arabidopsis thaliana; identical to SEQ ID NO: 46701
  peptide (1)..(258): Ceres Seq. ID no. 12575553
  misc_feature (1)..(257): Pfam Name: Sugar (and other) transporter Pfam Description: Sugar (and other) transporter
  misc_feature (1)..(257): Pfam Name: Sugar (and other) transporter Pfam Description: Sugar (and other) transporter
  misc_feature (1)..(254): Homolog of NCBI NO: 30695810 NR Description: sugar transporter, putative [Arabidopsis thaliana]
  misc_feature (1)..(255): Homolog of NCBI NO: 23504385 NR Description: putative sugar transporter [Lycopersicon
  misc_feature (1)..(258): Homolog of NCBI NO: 18419741 NR Description: sugar transporter - like protein
  misc_feature (1)..(256): Homolog of NCBI NO: 18407508 NR Description: putative sugar transporter
  misc_feature (1)..(256): Homolog of NCBI NO: 21536914 NR Description: putative sugar transporter [Arabidopsis thaliana]
  misc_feature (1)..(254): Homolog of NCBI NO: 30695810 NR Description: sugar transporter, putative [Arabidopsis thaliana]
  misc_feature (1)..(258): Homolog of NCBI NO: 18419741 NR Description: sugar transporter - like protein
  misc_feature (1)..(256): Homolog of NCBI NO: 21536914 NR Description: putative sugar transporter [Arabidopsis thaliana]
  misc_feature (1)..(258): Homolog of NCBI NO: 15222158 NR Description: integral membrane protein, putative
  misc_feature (1)..(258): Homolog of NCBI NO: 15223557 NR Description: integral membrane protein, putative
  misc_feature (1)..(258): Homolog of NCBI NO: 8778437 NR Description: F18O14.22 [Arabidopsis thaliana]
  misc_feature (1)..(258): Homolog of NCBI NO: 7446725 NR Description: probable sugar transporter protein - beet
  misc_feature (1)..(258): Homolog of NCBI NO: 5091611 NR Description: Similar to gb|U43629 integral membrane protein Beta vulgaris and is a member of the sugar transporter family
  misc_feature (1)..(256): Homolog of NCBI NO: 18407508 NR Description: putative sugar transporter
  misc_feature (1)..(255): Homolog of NCBI NO: 23504385 NR Description: putative sugar transporter [Lycopersicon
  misc_feature (1)..(258): Homolog of NCBI NO: 5091611 NR Description: Similar to gb|U43629 integral membrane protein Beta vulgaris and is a member of the sugar transporter family
  misc_feature (1)..(258): Homolog of NCBI NO: 7446725 NR Description: probable sugar transporter protein - beet
  misc_feature (1)..(258): Homolog of NCBI NO: 8778437 NR Description: F18O14.22 [Arabidopsis thaliana]
  misc_feature (1)..(258): Homolog of NCBI NO: 15223557 NR Description: integral membrane protein, putative
  misc_feature (1)..(258): Homolog of NCBI NO: 15222158 NR Description: integral membrane protein, putative

SEQ ID NO: 47369 - protein, 256 aa, Arabidopsis thaliana; identical to SEQ ID NO: 46702
  peptide (1)..(256): Ceres Seq. ID no. 12575554
  misc_feature (1)..(255): Pfam Name: Sugar (and other) transporter Pfam Description: Sugar (and other) transporter
  misc_feature (1)..(255): Pfam Name: Sugar (and other) transporter Pfam Description: Sugar (and other) transporter
  misc_feature (1)..(252): Homolog of NCBI NO: 30695810 NR Description: sugar transporter, putative [Arabidopsis thaliana]
  misc_feature (1)..(253): Homolog of NCBI NO: 23504385 NR Description: putative sugar transporter [Lycopersicon
  misc_feature (1)..(256): Homolog of NCBI NO: 18419741 NR Description: sugar transporter - like protein
  misc_feature (1)..(254): Homolog of NCBI NO: 18407508 NR Description: putative sugar transporter
  misc_feature (1)..(254): Homolog of NCBI NO: 21536914 NR Description: putative sugar transporter [Arabidopsis thaliana]
  misc_feature (1)..(252): Homolog of NCBI NO: 30695810 NR Description: sugar transporter, putative [Arabidopsis thaliana]
  misc_feature (1)..(256): Homolog of NCBI NO: 18419741 NR Description: sugar transporter - like protein
  misc_feature (1)..(254): Homolog of NCBI NO: 21536914 NR Description: putative sugar transporter [Arabidopsis thaliana]
  misc_feature (1)..(256): Homolog of NCBI NO: 15222158 NR Description: integral membrane protein, putative
  misc_feature (1)..(256): Homolog of NCBI NO: 15223557 NR Description: integral membrane protein, putative
  misc_feature (1)..(256): Homolog of NCBI NO: 8778437 NR Description: F18O14.22 [Arabidopsis thaliana]
  misc_feature (1)..(256): Homolog of NCBI NO: 7446725 NR Description: probable sugar transporter protein - beet
  misc_feature (1)..(256): Homolog of NCBI NO: 5091611 NR Description: Similar to gb|U43629 integral membrane protein Beta vulgaris and is a member of the sugar transporter family
  misc_feature (1)..(254): Homolog of NCBI NO: 18407508 NR Description: putative sugar transporter
  misc_feature (1)..(253): Homolog of NCBI NO: 23504385 NR Description: putative sugar transporter [Lycopersicon
  misc_feature (1)..(256): Homolog of NCBI NO: 5091611 NR Description: Similar to gb|U43629 integral membrane protein Beta vulgaris and is a member of the sugar transporter family
  misc_feature (1)..(256): Homolog of NCBI NO: 7446725 NR Description: probable sugar transporter protein - beet
  misc_feature (1)..(256): Homolog of NCBI NO: 8778437 NR Description: F18O14.22 [Arabidopsis thaliana]
  misc_feature (1)..(256): Homolog of NCBI NO: 15223557 NR Description: integral membrane protein, putative
  misc_feature (1)..(256): Homolog of NCBI NO: 15222158 NR Description: integral membrane protein, putative

SEQ ID NO: 47370 - protein, 211 aa, Arabidopsis thaliana; identical to SEQ ID NO: 46703
  peptide (1)..(211): Ceres Seq. ID no. 12575555
  misc_feature (51)..(211): Pfam Name: Sugar (and other) transporter Pfam Description: Sugar (and other) transporter
  misc_feature (51)..(211): Pfam Name: Sugar (and other) transporter Pfam Description: Sugar (and other) transporter
  misc_feature (42)..(211): Homolog of NCBI NO: 30695810 NR Description: sugar transporter, putative [Arabidopsis thaliana]
  misc_feature (4)..(211): Homolog of NCBI NO: 23504385 NR Description: putative sugar transporter [Lycopersicon
  misc_feature (43)..(211): Homolog of NCBI NO: 18419741 NR Description: sugar transporter - like protein
  misc_feature (33)..(211): Homolog of NCBI NO: 18407508 NR Description: putative sugar transporter
  misc_feature (33)..(211): Homolog of NCBI NO: 21536914 NR Description: putative sugar transporter [Arabidopsis thaliana]
  misc_feature (42)..(211): Homolog of NCBI NO: 30695810 NR Description: sugar transporter, putative [Arabidopsis thaliana]
  misc_feature (43)..(211): Homolog of NCBI NO: 18419741 NR Description: sugar transporter - like protein
  misc_feature (33)..(211): Homolog of NCBI NO: 21536914 NR Description: putative sugar transporter [Arabidopsis thaliana]
  misc_feature (1)..(211): Homolog of NCBI NO: 15222158 NR Description: integral membrane protein, putative
  misc_feature (1)..(211): Homolog of NCBI NO: 15223557 NR Description: integral membrane protein, putative
  misc_feature (1)..(211): Homolog of NCBI NO: 8778437 NR Description: F18O14.22 [Arabidopsis thaliana]
  misc_feature (13)..(211): Homolog of NCBI NO: 7446725 NR Description: probable sugar transporter protein - beet
  misc_feature (12)..(211): Homolog of NCBI NO: 5091611 NR Description: Similar to gb|U43629 integral membrane protein Beta vulgaris and is a member of the sugar transporter family
  misc_feature (33)..(211): Homolog of NCBI NO: 18407508 NR Description: putative sugar transporter
  misc_feature (4)..(211): Homolog of NCBI NO: 23504385 NR Description: putative sugar transporter [Lycopersicon
  misc_feature (12)..(211): Homolog of NCBI NO: 5091611 NR Description: Similar to gb|U43629 integral membrane protein Beta vulgaris and is a member of the sugar transporter family
  misc_feature (13)..(211): Homolog of NCBI NO: 7446725 NR Description: probable sugar transporter protein - beet
  misc_feature (1)..(211): Homolog of NCBI NO: 8778437 NR Description: F18O14.22 [Arabidopsis thaliana]
  misc_feature (1)..(211): Homolog of NCBI NO: 15223557 NR Description: integral membrane protein, putative
  misc_feature (1)..(211): Homolog of NCBI NO: 15222158 NR Description: integral membrane protein, putative

SEQ ID NO: 47371 - DNA, 1485 bp, Arabidopsis thaliana
  misc_feature (1)..(1485): Ceres Seq. ID no. 13588364
  misc_feature: MA Experiment ID: 20000794 Result: Up-regulated in Transcription
  misc_feature: MA Experiment 20000794 PARAMETER Experiment Name: At_Petals_P Parameter: Age (day) Value: 23-25 days
  misc_feature: MA Experiment 20000794 PARAMETER Experiment Name: At_Petals_P Parameter: Plant Line Value: WS
  misc_feature: MA Experiment 20000794 PARAMETER Experiment Name: At_Petals_P Parameter: Tissue Value: Petals vs. Whole plant
  misc_feature: MA Experiment ID: 20001248 Result: Down-regulated in Transcription
  misc_feature: MA Experiment 20001248 PARAMETER Experiment Name: At_Far-red-induction_P Parameter: Age (day) Value: 7
  misc_feature: MA Experiment 20001248 PARAMETER Experiment Name: At_Far-red-induction_P Parameter: Light Value: Far-red vs. White
  misc_feature: MA Experiment 20001248 PARAMETER Experiment Name: At_Far-red-induction_P Parameter: Organism Value: A. thaliana
  misc_feature: MA Experiment 20001248 PARAMETER Experiment Name: At_Far-red-induction_P Parameter: Plant Line Value: Columbia
  misc_feature: MA Experiment 20001248 PARAMETER Experiment Name: At_Far-red-induction_P Parameter: Timepoint (hr) Value: 4
  misc_feature: MA Experiment 20001248 PARAMETER Experiment Name: At_Far-red-induction_P Parameter: Tissue Value: Whole Plant
atgcatctgattaatgcggtggcggcggcgaggattttatccggaatcggacaatctaacggtaataacggaggagaagcgattccgtttggatcgtttgagtggatcacttacgccggaatatcttgtttcctcgtactcttcgccgggattatgtctggtcttactttgggacttatgtctcttggtcttgtcgagcttgagattcttcaacgtagtggtactcctaatgagaagaaacaagccgctgcgatttttccggttgttcagaaacagcatcagcttttagtgacactgcttctgtgtaatgctatggctatggaggggcttcctatatatttggataagttattcaatgaatacgttgcgattattctttctgtcacattcgttcttgcttacggtgaggttattcctcaagcgatatgcactaggtatggactcgcggttggagcgaattttgtctggcttgtccgcattttaatgactctctgctatccgattgcctttcccattggcaagattttagatttggtgctgggacacaatgatgctttatttaggcgggctcagttgaaagctcttgtatccattcacagccaagaggctggtaagggaggtgagcttacacatgatgagacgacaatcattagtggagctcttgatttgactgagaagactgcacaagaagccatgacaccaattgagtctaccttctccttggatgtaaattcaaaattggattgggaagctatggggaagattctggcacgaggccatagccgcgttcctgtctactctgggaatccgaaaaacgttatcggacttctcttggtgaagagtcttcttacagttcgccctgaaacagagacccttgtcagcgcagtttgtatacgccggattccaagggttccagctgatatgcctctctatgatatactgaatgagtttcaaaagggaagcagtcacatggctgcagttgtgaaggttaaggggaaaagcaaagtcccaccttcaactttgcttgaagaacacactgatgaaagcaatgactccgacttgactgcacctttgttactaaaacgagagggaaaccatgacaatgtcattgtcacaatcgacaaggctaatggacaatctttctttcaaaacaacgagagtggacctcacgggttttcacatacttcagaggctatcgaggatggtgaggtaattggtatcatcactttagaagatgtctttgaagaacttttgcaagaagagattgtggatgaaactgatgaatatgttgacgtacataaaaggattcgagtagcagcagcagcggctgcttcatcaatagcgagagctccttcaagccggaagttgcttgcgcaaaagggaactggaggacaaaataagcaagggcagacgaataaagttcctggtcaggaacaagataaaatgcttggaactattaccgagccgattcgaagaaacaactga

SEQ ID NO: 47372 - protein, 494 aa, Arabidopsis thaliana
  peptide (1)..(494): Ceres Seq. ID no. 13588365
  misc_feature (37)..(213): Pfam Name: Domain of unknown function DUF21 Pfam Description: Domain of unknown function DUF21
  misc_feature (35)..(379): Homolog of NCBI NO: 15237264 NR Description: hypothetical protein [Arabidopsis thaliana]
  misc_feature (1)..(285): Homolog of NCBI NO: 15236442 NR Description: hypothetical protein [Arabidopsis thaliana]
  misc_feature (175)..(494): Homolog of NCBI NO: 15236442 NR Description: hypothetical protein [Arabidopsis thaliana]
  misc_feature (26)..(490): Homolog of NCBI NO: 15218765 NR Description: hypothetical protein [Arabidopsis thaliana]
  misc_feature (175)..(248): Homolog of NCBI NO: 7485191 NR Description: hypothetical protein - Arabidopsis thaliana
  misc_feature (1)..(158): Homolog of NCBI NO: 7485191 NR Description: hypothetical protein - Arabidopsis thaliana
  misc_feature (300)..(494): Homolog of NCBI NO: 7485191 NR Description: hypothetical protein - Arabidopsis thaliana
  misc_feature (175)..(248): Homolog of NCBI NO: 30682755 NR Description: expressed protein [Arabidopsis thaliana]
  misc_feature (1)..(158): Homolog of NCBI NO: 30682755 NR Description: expressed protein [Arabidopsis thaliana]
  misc_feature (300)..(494): Homolog of NCBI NO: 30682755 NR Description: expressed protein [Arabidopsis thaliana]
MHLINAVAAARILSGIGQSNGNNGGEAIPFGSFEWITYAGISCFLVLFAGIMSGLTLGLMSLGLVELEILQRSGTPNEKKQAAAIFPVVQKQHQLLVTLLLCNAMAMEGLPIYLDKLFNEYVAIILSVTFVLAYGEVIPQAICTRYGLAVGANFVWLVRILMTLCYPIAFPIGKILDLVLGHNDALFRRAQLKALVSIHSQEAGKGGELTHDETTIISGALDLTEKTAQEAMTPIESTFSLDVNSKLDWEAMGKILARGHSRVPVYSGNPKNVIGLLLVKSLLTVRPETETLVSAVCIRRIPRVPADMPLYDILNEFQKGSSHMAAVVKVKGKSKVPPSTLLEEHTDESNDSDLTAPLLLKREGNHDNVIVTIDKANGQSFFQNNESGPHGFSHTSEAIEDGEVIGIITLEDVFEELLQEEIVDETDEYVDVHKRIRVAAAAAASSIARAPSSRKLLAQKGTGGQNKQGQTNKVPGQEQDKMLGTITEPIRRNN

SEQ ID NO: 47373 - protein, 443 aa, Arabidopsis thaliana
  peptide (1)..(443): Ceres Seq. ID no. 13588366
  misc_feature (1)..(162): Pfam Name: Domain of unknown function DUF21 Pfam Description: Domain of unknown function DUF21
  misc_feature (1)..(328): Homolog of NCBI NO: 15237264 NR Description: hypothetical protein [Arabidopsis thaliana]
  misc_feature (1)..(234): Homolog of NCBI NO: 15236442 NR Description: hypothetical protein [Arabidopsis thaliana]
  misc_feature (124)..(443): Homolog of NCBI NO: 15236442 NR Description: hypothetical protein [Arabidopsis thaliana]
  misc_feature (1)..(439): Homolog of NCBI NO: 15218765 NR Description: hypothetical protein [Arabidopsis thaliana]
  misc_feature (124)..(197): Homolog of NCBI NO: 7485191 NR Description: hypothetical protein - Arabidopsis thaliana
  misc_feature (1)..(107): Homolog of NCBI NO: 7485191 NR Description: hypothetical protein - Arabidopsis thaliana
  misc_feature (249)..(443): Homolog of NCBI NO: 7485191 NR Description: hypothetical protein - Arabidopsis thaliana
  misc_feature (124)..(197): Homolog of NCBI NO: 30682755 NR Description: expressed protein [Arabidopsis thaliana]
  misc_feature (1)..(107): Homolog of NCBI NO: 30682755 NR Description: expressed protein [Arabidopsis thaliana]
  misc_feature (249)..(443): Homolog of NCBI NO: 30682755 NR Description: expressed protein [Arabidopsis thaliana]
MSGLTLGLMSLGLVELEILQRSGTPNEKKQAAAIFPVVQKQHQLLVTLLLCNAMAMEGLPIYLDKLFNEYVAIILSVTFVLAYGEVIPQAICTRYGLAVGANFVWLVRILMTLCYPIAFPIGKILDLVLGHNDALFRRAQLKALVSIHSQEAGKGGELTHDETTIISGALDLTEKTAQEAMTPIESTFSLDVNSKLDWEAMGKILARGHSRVPVYSGNPKNVIGLLLVKSLLTVRPETETLVSAVCIRRIPRVPADMPLYDILNEFQKGSSHMAAVVKVKGKSKVPPSTLLEEHTDESNDSDLTAPLLLKREGNHDNVIVTIDKANGQSFFQNNESGPHGFSHTSEAIEDGEVIGIITLEDVFEELLQEEIVDETDEYVDVHKRIRVAAAAAASSIARAPSSRKLLAQKGTGGQNKQGQTNKVPGQEQDKMLGTITEPIRRNN

SEQ ID NO: 47374 - protein, 435 aa, Arabidopsis thaliana
  peptide (1)..(435): Ceres Seq. ID no. 13588367
  misc_feature (1)..(154): Pfam Name: Domain of unknown function DUF21 Pfam Description: Domain of unknown function DUF21
  misc_feature (1)..(320): Homolog of NCBI NO: 15237264 NR Description: hypothetical protein [Arabidopsis thaliana]
  misc_feature (1)..(226): Homolog of NCBI NO: 15236442 NR Description: hypothetical protein [Arabidopsis thaliana]
  misc_feature (116)..(435): Homolog of NCBI NO: 15236442 NR Description: hypothetical protein [Arabidopsis thaliana]
  misc_feature (1)..(431): Homolog of NCBI NO: 15218765 NR Description: hypothetical protein [Arabidopsis thaliana]
  misc_feature (116)..(189): Homolog of NCBI NO: 7485191 NR Description: hypothetical protein - Arabidopsis thaliana
  misc_feature (1)..(99): Homolog of NCBI NO: 7485191 NR Description: hypothetical protein - Arabidopsis thaliana
  misc_feature (241)..(435): Homolog of NCBI NO: 7485191 NR Description: hypothetical protein - Arabidopsis thaliana
  misc_feature (116)..(189): Homolog of NCBI NO: 30682755 NR Description: expressed protein [Arabidopsis thaliana]
  misc_feature (1)..(99): Homolog of NCBI NO: 30682755 NR Description: expressed protein [Arabidopsis thaliana]
  misc_feature (241)..(435): Homolog of NCBI NO: 30682755 NR Description: expressed protein [Arabidopsis thaliana]
MSLGLVELEILQRSGTPNEKKQAAAIFPVVQKQHQLLVTLLLCNAMAMEGLPIYLDKLFNEYVAIILSVTFVLAYGEVIPQAICTRYGLAVGANFVWLVRILMTLCYPIAFPIGKILDLVLGHNDALFRRAQLKALVSIHSQEAGKGGELTHDETTIISGALDLTEKTAQEAMTPIESTFSLDVNSKLDWEAMGKILARGHSRVPVYSGNPKNVIGLLLVKSLLTVRPETETLVSAVCIRRIPRVPADMPLYDILNEFQKGSSHMAAVVKVKGKSKVPPSTLLEEHTDESNDSDLTAPLLLKREGNHDNVIVTIDKANGQSFFQNNESGPHGFSHTSEAIEDGEVIGIITLEDVFEELLQEEIVDETDEYVDVHKRIRVAAAAAASSIARAPSSRKLLAQKGTGGQNKQGQTNKVPGQEQDKMLGTITEPIRRNN

SEQ ID NO: 47375 - DNA, 1572 bp, Arabidopsis thaliana
  misc_feature (1)..(1572): Ceres Seq. ID no. 13588853
  misc_feature: MA Experiment ID: 20000166 Result: Up-regulated in Transcription
  misc_feature: MA Experiment 20000166 PARAMETER Experiment Name: At_100uM_ABA_P Parameter: Age (day) Value: 14
  misc_feature: MA Experiment 20000166 PARAMETER Experiment Name: At_100uM_ABA_P Parameter: Organism Value: A. thaliana
  misc_feature: MA Experiment 20000166 PARAMETER Experiment Name: At_100uM_ABA_P Parameter: Plant Line Value: WS
  misc_feature: MA Experiment 20000166 PARAMETER Experiment Name: At_100uM_ABA_P Parameter: Timepoint (hr) Value: 1
  misc_feature: MA Experiment 20000166 PARAMETER Experiment Name: At_100uM_ABA_P Parameter: Tissue Value: Aerial
  misc_feature: MA Experiment 20000166 PARAMETER Experiment Name: At_100uM_ABA_P Parameter: Treatment Value: 100uM ABA vs. No Treatment
  misc_feature: MA Experiment ID: 20000169 Result: Up-regulated in Transcription
  misc_feature: MA Experiment 20000169 PARAMETER Experiment Name: At_100uM_ABA_P Parameter: Age (day) Value: 14
  misc_feature: MA Experiment 20000169 PARAMETER Experiment Name: At_100uM_ABA_P Parameter: Organism Value: A. thaliana
  misc_feature: MA Experiment 20000169 PARAMETER Experiment Name: At_100uM_ABA_P Parameter: Plant Line Value: WS
  misc_feature: MA Experiment 20000169 PARAMETER Experiment Name: At_100uM_ABA_P Parameter: Timepoint (hr) Value: 6
  misc_feature: MA Experiment 20000169 PARAMETER Experiment Name: At_100uM_ABA_P Parameter: Tissue Value: Aerial
  misc_feature: MA Experiment 20000169 PARAMETER Experiment Name: At_100uM_ABA_P Parameter: Treatment Value: 100uM ABA vs. No Treatment
  misc_feature: MA Experiment ID: 20000182 Result: Up-regulated in Transcription
  misc_feature: MA Experiment 20000182 PARAMETER Experiment Name: At_2mM_SA_P Parameter: Age (day) Value: 14
  misc_feature: MA Experiment 20000182 PARAMETER Experiment Name: At_2mM_SA_P Parameter: Organism Value: A. thaliana
  misc_feature: MA Experiment 20000182 PARAMETER Experiment Name: At_2mM_SA_P Parameter: Plant Line Value: WS
  misc_feature: MA Experiment 20000182 PARAMETER Experiment Name: At_2mM_SA_P Parameter: Timepoint (hr) Value: 6
  misc_feature: MA Experiment 20000182 PARAMETER Experiment Name: At_2mM_SA_P Parameter: Tissue Value: Aerial
  misc_feature: MA Experiment 20000182 PARAMETER Experiment Name: At_2mM_SA_P Parameter: Treatment Value: 2mM SA vs. No Treatment
  misc_feature: MA Experiment ID: 20000227 Result: Down-regulated in Transcription
  misc_feature: MA Experiment 20000227 PARAMETER Experiment Name: At_Root-Tips-vs-Tops_P Parameter: Tissue Value: Root Tips vs. Root Tops
  misc_feature: MA Experiment ID: 20000265 Result: Up-regulated in Transcription
  misc_feature: MA Experiment 20000265 PARAMETER Experiment Name: At_Open_Flower_P Parameter: Age (day) Value: 21
  misc_feature: MA Experiment 20000265 PARAMETER Experiment Name: At_Open_Flower_P Parameter: Plant Line Value: WS
  misc_feature: MA Experiment 20000265 PARAMETER Experiment Name: At_Open_Flower_P Parameter: Tissue Value: Closed Flower vs. Whole Plant
  misc_feature: MA Experiment ID: 20000267 Result: Up-regulated in Transcription
  misc_feature: MA Experiment 20000267 PARAMETER Experiment Name: At_Drought_P Parameter: Age (day) Value: 7
  misc_feature: MA Experiment 20000267 PARAMETER Experiment Name: At_Drought_P Parameter: Organism Value: A. thaliana
  misc_feature: MA Experiment 20000267 PARAMETER Experiment Name: At_Drought_P Parameter: Plant Line Value: WS
  misc_feature: MA Experiment 20000267 PARAMETER Experiment Name: At_Drought_P Parameter: Timepoint (hr) Value: 6
  misc_feature: MA Experiment 20000267 PARAMETER Experiment Name: At_Drought_P Parameter: Tissue Value: Whole Plant
  misc_feature: MA Experiment 20000267 PARAMETER Experiment Name: At_Drought_P Parameter: Treatment Value: Drought vs. No Drought
  misc_feature: MA Experiment ID: 20000268 Result: Up-regulated in Transcription
  misc_feature: MA Experiment 20000268 PARAMETER Experiment Name: At_100mM_NaCl__P Parameter: Age (day) Value: 14
  misc_feature: MA Experiment 20000268 PARAMETER Experiment Name: At_100mM_NaCl__P Parameter: Organism Value: A. thaliana
  misc_feature: MA Experiment 20000268 PARAMETER Experiment Name: At_100mM_NaCl__P Parameter: Plant Line Value: WS
  misc_feature: MA Experiment 20000268 PARAMETER Experiment Name: At_100mM_NaCl__P Parameter: Timepoint (hr) Value: 6
  misc_feature: MA Experiment 20000268 PARAMETER Experiment Name: At_100mM_NaCl__P Parameter: Tissue Value: Whole Plant
  misc_feature: MA Experiment 20000268 PARAMETER Experiment Name: At_100mM_NaCl__P Parameter: Treatment Value: 100mM NaCl vs. No Treatment
  misc_feature: MA Experiment ID: 20000288 Result: Up-regulated in Transcription
  misc_feature: MA Experiment 20000288 PARAMETER Experiment Name: At_Drought_P Parameter: Age (day) Value: 7
  misc_feature: MA Experiment 20000288 PARAMETER Experiment Name: At_Drought_P Parameter: Organism Value: A. thaliana
  misc_feature: MA Experiment 20000288 PARAMETER Experiment Name: At_Drought_P Parameter: Plant Line Value: WS
  misc_feature: MA Experiment 20000288 PARAMETER Experiment Name: At_Drought_P Parameter: Timepoint (hr) Value: 1
  misc_feature: MA Experiment 20000288 PARAMETER Experiment Name: At_Drought_P Parameter: Tissue Value: Whole Plant
  misc_feature: MA Experiment 20000288 PARAMETER Experiment Name: At_Drought_P Parameter: Treatment Value: Drought vs. No Drought
  misc_feature: MA Experiment ID: 20000436 Result: Up-regulated in Transcription
  misc_feature: MA Experiment 20000436 PARAMETER Experiment Name: At_Drought_P Parameter: Age (day) Value: 7
  misc_feature: MA Experiment 20000436 PARAMETER Experiment Name: At_Drought_P Parameter: Organism Value: A. thaliana
  misc_feature: MA Experiment 20000436 PARAMETER Experiment Name: At_Drought_P Parameter: Plant Line Value: WS
  misc_feature: MA Experiment 20000436 PARAMETER Experiment Name: At_Drought_P Parameter: Timepoint (hr) Value: 12
  misc_feature: MA Experiment 20000436 PARAMETER Experiment Name: At_Drought_P Parameter: Tissue Value: Whole Plant
  misc_feature: MA Experiment 20000436 PARAMETER Experiment Name: At_Drought_P Parameter: Treatment Value: Drought vs. No Drought
  misc_feature: MA Experiment ID: 20000437 Result: Up-regulated in Transcription
  misc_feature: MA Experiment 20000437 PARAMETER Experiment Name: At_Drought_P Parameter: Age (day) Value: 8
  misc_feature: MA Experiment 20000437 PARAMETER Experiment Name: At_Drought_P Parameter: Organism Value: A. thaliana
  misc_feature: MA Experiment 20000437 PARAMETER Experiment Name: At_Drought_P Parameter: Plant Line Value: WS
  misc_feature: MA Experiment 20000437 PARAMETER Experiment Name: At_Drought_P Parameter: Timepoint (hr) Value: 24
  misc_feature: MA Experiment 20000437 PARAMETER Experiment Name: At_Drought_P Parameter: Tissue Value: Whole Plant
  misc_feature: MA Experiment 20000437 PARAMETER Experiment Name: At_Drought_P Parameter: Treatment Value: Drought vs. No Drought
  misc_feature: MA Experiment ID: 20000794 Result: Up-regulated in Transcription
  misc_feature: MA Experiment 20000794 PARAMETER Experiment Name: At_Petals_P Parameter: Age (day) Value: 23-25 days
  misc_feature: MA Experiment 20000794 PARAMETER Experiment Name: At_Petals_P Parameter: Plant Line Value: WS
  misc_feature: MA Experiment 20000794 PARAMETER Experiment Name: At_Petals_P Parameter: Tissue Value: Petals vs. Whole plant
  misc_feature: MA Experiment ID: 20001248 Result: Down-regulated in Transcription
  misc_feature: MA Experiment 20001248 PARAMETER Experiment Name: At_Far-red-induction_P Parameter: Age (day) Value: 7
  misc_feature: MA Experiment 20001248 PARAMETER Experiment Name: At_Far-red-induction_P Parameter: Light Value: Far-red vs. White
  misc_feature: MA Experiment 20001248 PARAMETER Experiment Name: At_Far-red-induction_P Parameter: Organism Value: A. thaliana
  misc_feature: MA Experiment 20001248 PARAMETER Experiment Name: At_Far-red-induction_P Parameter: Plant Line Value: Columbia
  misc_feature: MA Experiment 20001248 PARAMETER Experiment Name: At_Far-red-induction_P Parameter: Timepoint (hr) Value: 4
  misc_feature: MA Experiment 20001248 PARAMETER Experiment Name: At_Far-red-induction_P Parameter: Tissue Value: Whole Plant
  misc_feature: MA Experiment ID: 20001451 Result: Down-regulated in Transcription
  misc_feature: MA Experiment 20001451 PARAMETER Experiment Name: At_Far-red-induction_P Parameter: Age (day) Value: 7
  misc_feature: MA Experiment 20001451 PARAMETER Experiment Name: At_Far-red-induction_P Parameter: Light Value: Far-red vs. White
  misc_feature: MA Experiment 20001451 PARAMETER Experiment Name: At_Far-red-induction_P Parameter: Organism Value: A. thaliana
  misc_feature: MA Experiment 20001451 PARAMETER Experiment Name: At_Far-red-induction_P Parameter: Plant Line Value: Columbia
  misc_feature: MA Experiment 20001451 PARAMETER Experiment Name: At_Far-red-induction_P Parameter: Timepoint (hr) Value: 24
  misc_feature: MA Experiment 20001451 PARAMETER Experiment Name: At_Far-red-induction_P Parameter: Tissue Value: Whole Plant
  misc_feature: MA Experiment ID: 20001554 Result: Up-regulated in Transcription
  misc_feature: MA Experiment 20001554 PARAMETER Experiment Name: At_Drought_Soil_Dry_P Parameter: Age (day) Value: 21
  misc_feature: MA Experiment 20001554 PARAMETER Experiment Name: At_Drought_Soil_Dry_P Parameter: Organism Value: A. thaliana
  misc_feature: MA Experiment 20001554 PARAMETER Experiment Name: At_Drought_Soil_Dry_P Parameter: Plant Line Value: WS
  misc_feature: MA Experiment 20001554 PARAMETER Experiment Name: At_Drought_Soil_Dry_P Parameter: Post Timepoint (hr) Value: None
  misc_feature: MA Experiment 20001554 PARAMETER Experiment Name: At_Drought_Soil_Dry_P Parameter: Post-Treatment Value: None
  misc_feature: MA Experiment 20001554 PARAMETER Experiment Name: At_Drought_Soil_Dry_P Parameter: Timepoint (day) Value: 7
  misc_feature: MA Experiment 20001554 PARAMETER Experiment Name: At_Drought_Soil_Dry_P Parameter: Treatment Value: Drought vs. No Drought
tttttttctgctttcatctgttgggattgtagtttcgttaagctttagaaatgggatgctttgcatcaaggccgaatgatactggtggaaacagaagaaagccaacgagcatcggagatgtttcagtatatgtacctggtttaaggatacctaagcccgtggagttttctcagtcactgggtgatcaattgccaaagactctagtggagcgcttgacagctttaagaacgagaatagttgtgatggcaaatcaagaaggaccaactataacaagaaccaggaggaagacacagcatggaggttctacgctcgcagatctccatcacgctttggaagattatctaccggttctcttaggattaactaaagatggtagccatttacaattcaaagtacagtttaattgggtaaatcaggaagatgaagaagaggaaacagccatgtcaaatgtttggtatgaaatattgtcggttttgcatctaatggcaatgttacaaatgtcacaagccaatttactgcttcttcctagaggttccagtgatggctatcatccaaaaatatcagaagaaaataggcgagcttcaatcgatatcttcttaaaagcagctggatacctggactgtgctgtgaagcatgttcttcctcatttttcaaccgagcagaggagaagtttaccaattgacctagcagaaggagctttacgtgcactttgcttgcaagcattaggccagggtgttgatatccaacttgggatggcgattgatagtgcaaaagccactcttgccgtgaagcgaagactttcatgtgaaatggtgaaatactggcagcaggcacaagataacttaatgaatcttccattagcaaacgggtggggcgaaaagcatatgctctttgttaagtggaagtatgttgaagctaaggctgcagcttactactaccacggtctgattcttgatgaaggaaatacagagaaatcacatggcatggcggttgctgctttacaggctgcagatgagtgtttgaaagaaagtaagaaagcaagtgaggcgtttaacacctcttcacccacgtcaaggactccttcacttttcgggacaatgaaatatctatcagagaaaataccaaaagaaacttcaagtaaagtcaggataaaccgtgatctatactcttatgaaaagatcatggagacagcaccaacgcttcctgattttgccttggcattgaaacccgatgagtaccaacttccttctgttgatgcgtcatggtctgaagccagtctacggactaaaaacacatcaaatcacatatagggcaaccaaagatagagcagtgaatagaatgcatatcaacaccttatagagttacaatgccaatggccgccatagaaacacaaatggtatagctctataactaccctagtgattctccaaatgtcaaataatatatgggtgtgaaaaaagtaccgaattggattagttttcaggtaaaaatatgggaagatgtcgtctgttttctctgtatgttgttgtaattttgtatgtttagtgcaataaaattcgattctttctgttc

SEQ ID NO: 47376 - protein, 419 aa, Arabidopsis thaliana
  peptide (1)..(419): Ceres Seq. ID no. 13588854
  misc_feature (1)..(402): Homolog of NCBI NO: 30684716 NR Description: expressed protein [Arabidopsis thaliana]
  misc_feature (1)..(411): Homolog of NCBI NO: 38344447 NR Description: OSJNBa0038O10.19 [Oryza sativa (japonica
  misc_feature (1)..(404): Homolog of NCBI NO: 15220908 NR Description: hypothetical protein [Arabidopsis thaliana]
  misc_feature (1)..(404): Homolog of NCBI NO: 25372891 NR Description: protein F2H15.16 [imported] - Arabidopsis
  misc_feature (1)..(419): Homolog of NCBI NO: 15219459 NR Description: expressed protein [Arabidopsis thaliana]
MGCFASRPNDTGGNRRKPTSIGDVSVYVPGLRIPKPVEFSQSLGDQLPKTLVERLTALRTRIVVMANQEGPTITRTRRKTQHGGSTLADLHHALEDYLPVLLGLTKDGSHLQFKVQFNWVNQEDEEEETAMSNVWYEILSVLHLMAMLQMSQANLLLLPRGSSDGYHPKISEENRRASIDIFLKAAGYLDCAVKHVLPHFSTEQRRSLPIDLAEGALRALCLQALGQGVDIQLGMAIDSAKATLAVKRRLSCEMVKYWQQAQDNLMNLPLANGWGEKHMLFVKWKYVEAKAAAYYYHGLILDEGNTEKSHGMAVAALQAADECLKESKKASEAFNTSSPTSRTPSLFGTMKYLSEKIPKETSSKVRINRDLYSYEKIMETAPTLPDFALALKPDEYQLPSVDASWSEASLRTKNTSNHI

SEQ ID NO: 47377 - protein, 355 aa, Arabidopsis thaliana
  peptide (1)..(355): Ceres Seq. ID no. 13588855
  misc_feature (1)..(338): Homolog of NCBI NO: 30684716 NR Description: expressed protein [Arabidopsis thaliana]
  misc_feature (1)..(347): Homolog of NCBI NO: 38344447 NR Description: OSJNBa0038O10.19 [Oryza sativa (japonica
  misc_feature (1)..(340): Homolog of NCBI NO: 15220908 NR Description: hypothetical protein [Arabidopsis thaliana]
  misc_feature (1)..(340): Homolog of NCBI NO: 25372891 NR Description: protein F2H15.16 [imported] - Arabidopsis
  misc_feature (1)..(355): Homolog of NCBI NO: 15219459 NR Description: expressed protein [Arabidopsis thaliana]
MANQEGPTITRTRRKTQHGGSTLADLHHALEDYLPVLLGLTKDGSHLQFKVQFNWVNQEDEEEETAMSNVWYEILSVLHLMAMLQMSQANLLLLPRGSSDGYHPKISEENRRASIDIFLKAAGYLDCAVKHVLPHFSTEQRRSLPIDLAEGALRALCLQALGQGVDIQLGMAIDSAKATLAVKRRLSCEMVKYWQQAQDNLMNLPLANGWGEKHMLFVKWKYVEAKAAAYYYHGLILDEGNTEKSHGMAVAALQAADECLKESKKASEAFNTSSPTSRTPSLFGTMKYLSEKIPKETSSKVRINRDLYSYEKIMETAPTLPDFALALKPDEYQLPSVDASWSEASLRTKNTSNHI

SEQ ID NO: 47378 - protein, 289 aa, Arabidopsis thaliana
  peptide (1)..(289): Ceres Seq. ID no. 13588856
  misc_feature (1)..(272): Homolog of NCBI NO: 30684716 NR Description: expressed protein [Arabidopsis thaliana]
  misc_feature (1)..(281): Homolog of NCBI NO: 38344447 NR Description: OSJNBa0038O10.19 [Oryza sativa (japonica
  misc_feature (1)..(274): Homolog of NCBI NO: 15220908 NR Description: hypothetical protein [Arabidopsis thaliana]
  misc_feature (1)..(274): Homolog of NCBI NO: 25372891 NR Description: protein F2H15.16 [imported] - Arabidopsis
  misc_feature (1)..(289): Homolog of NCBI NO: 15219459 NR Description: expressed protein [Arabidopsis thaliana]
MSNVWYEILSVLHLMAMLQMSQANLLLLPRGSSDGYHPKISEENRRASIDIFLKAAGYLDCAVKHVLPHFSTEQRRSLPIDLAEGALRALCLQALGQGVDIQLGMAIDSAKATLAVKRRLSCEMVKYWQQAQDNLMNLPLANGWGEKHMLFVKWKYVEAKAAAYYYHGLILDEGNTEKSHGMAVAALQAADECLKESKKASEAFNTSSPTSRTPSLFGTMKYLSEKIPKETSSKVRINRDLYSYEKIMETAPTLPDFALALKPDEYQLPSVDASWSEASLRTKNTSNHI

SEQ ID NO: 47379 - DNA, 1856 bp, Arabidopsis thaliana; identical to SEQ ID NO: 42665
  misc_feature (1)..(1856): Ceres Seq. ID no. 12605224
  misc_feature: MA Experiment ID: 108434 Result: Down-regulated in Transcription
  misc_feature: MA Experiment 108434 PARAMETER Experiment Name: At_Root_Tips_cDNA_P Parameter: Tissue Value: Root Tips
  misc_feature: MA Experiment ID: 108463 Result: Up-regulated in Transcription
  misc_feature: MA Experiment 108463 PARAMETER Experiment Name: At_Germinating_Seeds_cDNA_P Parameter: Age (day) Value: 3 vs. 0
  misc_feature: MA Experiment 108463 PARAMETER Experiment Name: At_Germinating_Seeds_cDNA_P Parameter: Tissue Value: Germinating Seeds
  misc_feature: MA Experiment ID: 108464 Result: Up-regulated in Transcription
  misc_feature: MA Experiment 108464 PARAMETER Experiment Name: At_Germinating_Seeds_cDNA_P Parameter: Age (day) Value: 4 vs. 0
  misc_feature: MA Experiment 108464 PARAMETER Experiment Name: At_Germinating_Seeds_cDNA_P Parameter: Tissue Value: Germinating Seeds
  misc_feature: MA Experiment ID: 108473 Result: Down-regulated in Transcription
  misc_feature: MA Experiment 108473 PARAMETER Experiment Name: At_Drought_Flowers_cDNA_P Parameter: Timepoint (hr) Value: 7 d
  misc_feature: MA Experiment 108473 PARAMETER Experiment Name: At_Drought_Flowers_cDNA_P Parameter: Tissue Value: Flower
  misc_feature: MA Experiment 108473 PARAMETER Experiment Name: At_Drought_Flowers_cDNA_P Parameter: Treatment Value: Drought vs. No Drought
  misc_feature: MA Experiment ID: 108488 Result: Down-regulated in Transcription
  misc_feature: MA Experiment ID: 20000117 Result: Up-regulated in Transcription
  misc_feature: MA Experiment 20000117 PARAMETER Experiment Name: At_100uM_ABA_Mutants_cDNA_P Parameter: Plant Line Value: Columbia
  misc_feature: MA Experiment 20000117 PARAMETER Experiment Name: At_100uM_ABA_Mutants_cDNA_P Parameter: Timepoint (hr) Value: 6
  misc_feature: MA Experiment 20000117 PARAMETER Experiment Name: At_100uM_ABA_Mutants_cDNA_P Parameter: Tissue Value: Aerial
  misc_feature: MA Experiment 20000117 PARAMETER Experiment Name: At_100uM_ABA_Mutants_cDNA_P Parameter: Treatment Value: 100uM ABA vs. No Treatment
  misc_feature: MA Experiment ID: 20000182 Result: Down-regulated in Transcription
  misc_feature: MA Experiment 20000182 PARAMETER Experiment Name: At_2mM_SA_P Parameter: Age (day) Value: 14
  misc_feature: MA Experiment 20000182 PARAMETER Experiment Name: At_2mM_SA_P Parameter: Organism Value: A. thaliana
  misc_feature: MA Experiment 20000182 PARAMETER Experiment Name: At_2mM_SA_P Parameter: Plant Line Value: WS
  misc_feature: MA Experiment 20000182 PARAMETER Experiment Name: At_2mM_SA_P Parameter: Timepoint (hr) Value: 6
  misc_feature: MA Experiment 20000182 PARAMETER Experiment Name: At_2mM_SA_P Parameter: Tissue Value: Aerial
  misc_feature: MA Experiment 20000182 PARAMETER Experiment Name: At_2mM_SA_P Parameter: Treatment Value: 2mM SA vs. No Treatment
  misc_feature: MA Experiment ID: 20000184 Result: Up-regulated in Transcription
  misc_feature: MA Experiment 20000184 PARAMETER Experiment Name: At_Shoots__P Parameter: Age (day) Value: 7
  misc_feature: MA Experiment 20000184 PARAMETER Experiment Name: At_Shoots__P Parameter: Tissue Value: Shoots vs. Whole Plant
  misc_feature: MA Experiment ID: 20000185 Result: Down-regulated in Transcription
  misc_feature: MA Experiment 20000185 PARAMETER Experiment Name: At_Roots__P Parameter: Age (day) Value: 7 vs. 21
  misc_feature: MA Experiment 20000185 PARAMETER Experiment Name: At_Roots__P Parameter: Organism Value: A. thaliana
  misc_feature: MA Experiment 20000185 PARAMETER Experiment Name: At_Roots__P Parameter: Tissue Value: Roots vs. Whole Plant
  misc_feature: MA Experiment ID: 20000224 Result: Down-regulated in Transcription
  misc_feature: MA Experiment ID: 20000265 Result: Down-regulated in Transcription
  misc_feature: MA Experiment 20000265 PARAMETER Experiment Name: At_Open_Flower_P Parameter: Age (day) Value: 21
  misc_feature: MA Experiment 20000265 PARAMETER Experiment Name: At_Open_Flower_P Parameter: Plant Line Value: WS
  misc_feature: MA Experiment 20000265 PARAMETER Experiment Name: At_Open_Flower_P Parameter: Tissue Value: Closed Flower vs. Whole Plant
  misc_feature: MA Experiment ID: 20000267 Result: Up-regulated in Transcription
  misc_feature: MA Experiment 20000267 PARAMETER Experiment Name: At_Drought_P Parameter: Age (day) Value: 7
  misc_feature: MA Experiment 20000267 PARAMETER Experiment Name: At_Drought_P Parameter: Organism Value: A. thaliana
  misc_feature: MA Experiment 20000267 PARAMETER Experiment Name: At_Drought_P Parameter: Plant Line Value: WS
  misc_feature: MA Experiment 20000267 PARAMETER Experiment Name: At_Drought_P Parameter: Timepoint (hr) Value: 6
  misc_feature: MA Experiment 20000267 PARAMETER Experiment Name: At_Drought_P Parameter: Tissue Value: Whole Plant
  misc_feature: MA Experiment 20000267 PARAMETER Experiment Name: At_Drought_P Parameter: Treatment Value: Drought vs. No Drought
  misc_feature: MA Experiment ID: 20000268 Result: Down-regulated in Transcription
  misc_feature: MA Experiment 20000268 PARAMETER Experiment Name: At_100mM_NaCl__P Parameter: Age (day) Value: 14
  misc_feature: MA Experiment 20000268 PARAMETER Experiment Name: At_100mM_NaCl__P Parameter: Organism Value: A. thaliana
  misc_feature: MA Experiment 20000268 PARAMETER Experiment Name: At_100mM_NaCl__P Parameter: Plant Line Value: WS
  misc_feature: MA Experiment 20000268 PARAMETER Experiment Name: At_100mM_NaCl__P Parameter: Timepoint (hr) Value: 6
  misc_feature: MA Experiment 20000268 PARAMETER Experiment Name: At_100mM_NaCl__P Parameter: Tissue Value: Whole Plant
  misc_feature: MA Experiment 20000268 PARAMETER Experiment Name: At_100mM_NaCl__P Parameter: Treatment Value: 100mM NaCl vs. No Treatment
  misc_feature: MA Experiment ID: 20000308 Result: Down-regulated in Transcription
  misc_feature: MA Experiment 20000308 PARAMETER Experiment Name: At_100mM_NaCl__P Parameter: Age (day) Value: 17
  misc_feature: MA Experiment 20000308 PARAMETER Experiment Name: At_100mM_NaCl__P Parameter: Organism Value: A. thaliana
  misc_feature: MA Experiment 20000308 PARAMETER Experiment Name: At_100mM_NaCl__P Parameter: Plant Line Value: WS
  misc_feature: MA Experiment 20000308 PARAMETER Experiment Name: At_100mM_NaCl__P Parameter: Timepoint (hr) Value: 72
  misc_feature: MA Experiment 20000308 PARAMETER Experiment Name: At_100mM_NaCl__P Parameter: Tissue Value: Whole Plant
  misc_feature: MA Experiment 20000308 PARAMETER Experiment Name: At_100mM_NaCl__P Parameter: Treatment Value: 100mM NaCl vs. No Treatment
  misc_feature: MA Experiment ID: 20000437 Result: Down-regulated in Transcription
  misc_feature: MA Experiment 20000437 PARAMETER Experiment Name: At_Drought_P Parameter: Age (day) Value: 8
  misc_feature: MA Experiment 20000437 PARAMETER Experiment Name: At_Drought_P Parameter: Organism Value: A. thaliana
  misc_feature: MA Experiment 20000437 PARAMETER Experiment Name: At_Drought_P Parameter: Plant Line Value: WS
  misc_feature: MA Experiment 20000437 PARAMETER Experiment Name: At_Drought_P Parameter: Timepoint (hr) Value: 24
  misc_feature: MA Experiment 20000437 PARAMETER Experiment Name: At_Drought_P Parameter: Tissue Value: Whole Plant
  misc_feature: MA Experiment 20000437 PARAMETER Experiment Name: At_Drought_P Parameter: Treatment Value: Drought vs. No Drought
  misc_feature: MA Experiment ID: 20000439 Result: Down-regulated in Transcription
  misc_feature: MA Experiment 20000439 PARAMETER Experiment Name: At_Roots__P Parameter: Age (day) Value: 14 vs. 21
  misc_feature: MA Experiment 20000439 PARAMETER Experiment Name: At_Roots__P Parameter: Organism Value: A. thaliana
  misc_feature: MA Experiment 20000439 PARAMETER Experiment Name: At_Roots__P Parameter: Tissue Value: Roots vs. Whole Plant
  misc_feature: MA Experiment ID: 20000495 Result: Down-regulated in Transcription
  misc_feature: MA Experiment 20000495 PARAMETER Experiment Name: At_Guard_Cells_P Parameter: Harvest Date Value: 8/2/2002
  misc_feature: MA Experiment 20000495 PARAMETER Experiment Name: At_Guard_Cells_P Parameter: Organism Value: A. thaliana
  misc_feature: MA Experiment 20000495 PARAMETER Experiment Name: At_Guard_Cells_P Parameter: Tissue Value: Guard Cells vs. Leaves
  misc_feature: MA Experiment ID: 20001247 Result: Up-regulated in Transcription
  misc_feature: MA Experiment 20001247 PARAMETER Experiment Name: At_Far-red-induction_P Parameter: Age (day) Value: 7
  misc_feature: MA Experiment 20001247 PARAMETER Experiment Name: At_Far-red-induction_P Parameter: Light Value: Far-red vs. White
  misc_feature: MA Experiment 20001247 PARAMETER Experiment Name: At_Far-red-induction_P Parameter: Organism Value: A. thaliana
  misc_feature: MA Experiment 20001247 PARAMETER Experiment Name: At_Far-red-induction_P Parameter: Plant Line Value: Columbia
  misc_feature: MA Experiment 20001247 PARAMETER Experiment Name: At_Far-red-induction_P Parameter: Timepoint (hr) Value: 1
  misc_feature: MA Experiment 20001247 PARAMETER Experiment Name: At_Far-red-induction_P Parameter: Tissue Value: Whole Plant
  misc_feature: MA Experiment ID: 20001450 Result: Up-regulated in Transcription
  misc_feature: MA Experiment 20001450 PARAMETER Experiment Name: At_Far-red-induction_P Parameter: Age (day) Value: 7
  misc_feature: MA Experiment 20001450 PARAMETER Experiment Name: At_Far-red-induction_P Parameter: Light Value: Far-red vs. White
  misc_feature: MA Experiment 20001450 PARAMETER Experiment Name: At_Far-red-induction_P Parameter: Organism Value: A. thaliana
  misc_feature: MA Experiment 20001450 PARAMETER Experiment Name: At_Far-red-induction_P Parameter: Plant Line Value: Columbia
  misc_feature: MA Experiment 20001450 PARAMETER Experiment Name: At_Far-red-induction_P Parameter: Timepoint (hr) Value: 8
  misc_feature: MA Experiment 20001450 PARAMETER Experiment Name: At_Far-red-induction_P Parameter: Tissue Value: Whole Plant
  misc_feature: MA Experiment ID: 20001451 Result: Up-regulated in Transcription
  misc_feature: MA Experiment 20001451 PARAMETER Experiment Name: At_Far-red-induction_P Parameter: Age (day) Value: 7
  misc_feature: MA Experiment 20001451 PARAMETER Experiment Name: At_Far-red-induction_P Parameter: Light Value: Far-red vs. White
  misc_feature: MA Experiment 20001451 PARAMETER Experiment Name: At_Far-red-induction_P Parameter: Organism Value: A. thaliana
  misc_feature: MA Experiment 20001451 PARAMETER Experiment Name: At_Far-red-induction_P Parameter: Plant Line Value: Columbia
  misc_feature: MA Experiment 20001451 PARAMETER Experiment Name: At_Far-red-induction_P Parameter: Timepoint (hr) Value: 24
  misc_feature: MA Experiment 20001451 PARAMETER Experiment Name: At_Far-red-induction_P Parameter: Tissue Value: Whole Plant
  misc_feature: MA Experiment ID: 20001554 Result: Down-regulated in Transcription
  misc_feature: MA Experiment 20001554 PARAMETER Experiment Name: At_Drought_Soil_Dry_P Parameter: Age (day) Value: 21
  misc_feature: MA Experiment 20001554 PARAMETER Experiment Name: At_Drought_Soil_Dry_P Parameter: Organism Value: A. thaliana
  misc_feature: MA Experiment 20001554 PARAMETER Experiment Name: At_Drought_Soil_Dry_P Parameter: Plant Line Value: WS
  misc_feature: MA Experiment 20001554 PARAMETER Experiment Name: At_Drought_Soil_Dry_P Parameter: Post Timepoint (hr) Value: None
  misc_feature: MA Experiment 20001554 PARAMETER Experiment Name: At_Drought_Soil_Dry_P Parameter: Post-Treatment Value: None
  misc_feature: MA Experiment 20001554 PARAMETER Experiment Name: At_Drought_Soil_Dry_P Parameter: Timepoint (day) Value: 7
  misc_feature: MA Experiment 20001554 PARAMETER Experiment Name: At_Drought_Soil_Dry_P Parameter: Treatment Value: Drought vs. No Drought
  misc_feature: MA Experiment ID: 20001555 Result: Down-regulated in Transcription
  misc_feature: MA Experiment 20001555 PARAMETER Experiment Name: At_Drought_Soil_Dry_P Parameter: Age (day) Value: 24
  misc_feature: MA Experiment 20001555 PARAMETER Experiment Name: At_Drought_Soil_Dry_P Parameter: Organism Value: A. thaliana
  misc_feature: MA Experiment 20001555 PARAMETER Experiment Name: At_Drought_Soil_Dry_P Parameter: Plant Line Value: WS
  misc_feature: MA Experiment 20001555 PARAMETER Experiment Name: At_Drought_Soil_Dry_P Parameter: Post Timepoint (hr) Value: None
  misc_feature: MA Experiment 20001555 PARAMETER Experiment Name: At_Drought_Soil_Dry_P Parameter: Post-Treatment Value: None
  misc_feature: MA Experiment 20001555 PARAMETER Experiment Name: At_Drought_Soil_Dry_P Parameter: Timepoint (day) Value: 10
  misc_feature: MA Experiment 20001555 PARAMETER Experiment Name: At_Drought_Soil_Dry_P Parameter: Treatment Value: Drought vs. No Drought
  misc_feature: MA Experiment ID: 20001556 Result: Down-regulated in Transcription
  misc_feature: MA Experiment 20001556 PARAMETER Experiment Name: At_Drought_Soil_Dry_P Parameter: Age (day) Value: 26
  misc_feature: MA Experiment 20001556 PARAMETER Experiment Name: At_Drought_Soil_Dry_P Parameter: Organism Value: A. thaliana
  misc_feature: MA Experiment 20001556 PARAMETER Experiment Name: At_Drought_Soil_Dry_P Parameter: Plant Line Value: WS
  misc_feature: MA Experiment 20001556 PARAMETER Experiment Name: At_Drought_Soil_Dry_P Parameter: Post Timepoint (hr) Value: None
  misc_feature: MA Experiment 20001556 PARAMETER Experiment Name: At_Drought_Soil_Dry_P Parameter: Post-Treatment Value: None
  misc_feature: MA Experiment 20001556 PARAMETER Experiment Name: At_Drought_Soil_Dry_P Parameter: Timepoint (day) Value: 12
  misc_feature: MA Experiment 20001556 PARAMETER Experiment Name: At_Drought_Soil_Dry_P Parameter: Treatment Value: Drought vs. No Drought
  misc_feature: MA Experiment ID: 20001557 Result: Up-regulated in Transcription
  misc_feature: MA Experiment 20001557 PARAMETER Experiment Name: At_Drought_Soil_Dry_P Parameter: Age (day) Value: 27
  misc_feature: MA Experiment 20001557 PARAMETER Experiment Name: At_Drought_Soil_Dry_P Parameter: Organism Value: A. thaliana
  misc_feature: MA Experiment 20001557 PARAMETER Experiment Name: At_Drought_Soil_Dry_P Parameter: Plant Line Value: WS
  misc_feature: MA Experiment 20001557 PARAMETER Experiment Name: At_Drought_Soil_Dry_P Parameter: Post Timepoint (hr) Value: 3
  misc_feature: MA Experiment 20001557 PARAMETER Experiment Name: At_Drought_Soil_Dry_P Parameter: Post-Treatment Value: Re-Water vs. No Drought
  misc_feature: MA Experiment 20001557 PARAMETER Experiment Name: At_Drought_Soil_Dry_P Parameter: Timepoint (day) Value: 13
  misc_feature: MA Experiment 20001557 PARAMETER Experiment Name: At_Drought_Soil_Dry_P Parameter: Treatment Value: Drought vs. No Drought
  misc_feature: MA Experiment ID: 20001558 Result: Up-regulated in Transcription
  misc_feature: MA Experiment 20001558 PARAMETER Experiment Name: At_Drought_Soil_Dry_P Parameter: Age (day) Value: 27
  misc_feature: MA Experiment 20001558 PARAMETER Experiment Name: At_Drought_Soil_Dry_P Parameter: Organism Value: A. thaliana
  misc_feature: MA Experiment 20001558 PARAMETER Experiment Name: At_Drought_Soil_Dry_P Parameter: Plant Line Value: WS
  misc_feature: MA Experiment 20001558 PARAMETER Experiment Name: At_Drought_Soil_Dry_P Parameter: Post Timepoint (hr) Value: 6
  misc_feature: MA Experiment 20001558 PARAMETER Experiment Name: At_Drought_Soil_Dry_P Parameter: Post-Treatment Value: Re-Water vs. No Drought
  misc_feature: MA Experiment 20001558 PARAMETER Experiment Name: At_Drought_Soil_Dry_P Parameter: Timepoint (day) Value: 13
  misc_feature: MA Experiment 20001558 PARAMETER Experiment Name: At_Drought_Soil_Dry_P Parameter: Treatment Value: Drought vs. No Drought
  misc_feature: MA Experiment ID: 20001559 Result: Down-regulated in Transcription
  misc_feature: MA Experiment 20001559 PARAMETER Experiment Name: At_Drought_Soil_Dry_P Parameter: Age (day) Value: 28
  misc_feature: MA Experiment 20001559 PARAMETER Experiment Name: At_Drought_Soil_Dry_P Parameter: Organism Value: A. thaliana
  misc_feature: MA Experiment 20001559 PARAMETER Experiment Name: At_Drought_Soil_Dry_P Parameter: Plant Line Value: WS
  misc_feature: MA Experiment 20001559 PARAMETER Experiment Name: At_Drought_Soil_Dry_P Parameter: Post Timepoint (hr) Value: 29
  misc_feature: MA Experiment 20001559 PARAMETER Experiment Name: At_Drought_Soil_Dry_P Parameter: Post-Treatment Value: Re-Water vs. No Drought
  misc_feature: MA Experiment 20001559 PARAMETER Experiment Name: At_Drought_Soil_Dry_P Parameter: Timepoint (day) Value: 14
  misc_feature: MA Experiment 20001559 PARAMETER Experiment Name: At_Drought_Soil_Dry_P Parameter: Treatment Value: Drought vs. No Drought
  misc_feature: MA Experiment ID: 20001560 Result: Up-regulated in Transcription
  misc_feature: MA Experiment 20001560 PARAMETER Experiment Name: At_Drought_Soil_Dry_P Parameter: Age (day) Value: 28
  misc_feature: MA Experiment 20001560 PARAMETER Experiment Name: At_Drought_Soil_Dry_P Parameter: Organism Value: A. thaliana
  misc_feature: MA Experiment 20001560 PARAMETER Experiment Name: At_Drought_Soil_Dry_P Parameter: Plant Line Value: WS
  misc_feature: MA Experiment 20001560 PARAMETER Experiment Name: At_Drought_Soil_Dry_P Parameter: Post Timepoint (hr) Value: None
  misc_feature: MA Experiment 20001560 PARAMETER Experiment Name: At_Drought_Soil_Dry_P Parameter: Post-Treatment Value: None
  misc_feature: MA Experiment 20001560 PARAMETER Experiment Name: At_Drought_Soil_Dry_P Parameter: Timepoint (day) Value: 14
  misc_feature: MA Experiment 20001560 PARAMETER Experiment Name: At_Drought_Soil_Dry_P Parameter: Treatment Value: Drought vs. No Drought
  misc_feature: MA Experiment ID: 20001904 Result: Down-regulated in Transcription
  misc_feature: MA Experiment 20001904 PARAMETER Experiment Name: At_Drought_Reproduction_P Parameter: Age (day) Value: 37
  misc_feature: MA Experiment 20001904 PARAMETER Experiment Name: At_Drought_Reproduction_P Parameter: Organism Value: A. thaliana
  misc_feature: MA Experiment 20001904 PARAMETER Experiment Name: At_Drought_Reproduction_P Parameter: Plant Line Value: WS
  misc_feature: MA Experiment 20001904 PARAMETER Experiment Name: At_Drought_Reproduction_P Parameter: Timepoint (day) Value: 7
  misc_feature: MA Experiment 20001904 PARAMETER Experiment Name: At_Drought_Reproduction_P Parameter: Tissue Value: Rosettes
  misc_feature: MA Experiment 20001904 PARAMETER Experiment Name: At_Drought_Reproduction_P Parameter: Treatment Value: Drought vs. No Drought
  misc_feature: MA Experiment ID: 20001905 Result: Down-regulated in Transcription
  misc_feature: MA Experiment 20001905 PARAMETER Experiment Name: At_Drought_Reproduction_P Parameter: Age (day) Value: 40
  misc_feature: MA Experiment 20001905 PARAMETER Experiment Name: At_Drought_Reproduction_P Parameter: Organism Value: A. thaliana
  misc_feature: MA Experiment 20001905 PARAMETER Experiment Name: At_Drought_Reproduction_P Parameter: Plant Line Value: WS
  misc_feature: MA Experiment 20001905 PARAMETER Experiment Name: At_Drought_Reproduction_P Parameter: Timepoint (day) Value: 10
  misc_feature: MA Experiment 20001905 PARAMETER Experiment Name: At_Drought_Reproduction_P Parameter: Tissue Value: Rosettes
  misc_feature: MA Experiment 20001905 PARAMETER Experiment Name: At_Drought_Reproduction_P Parameter: Treatment Value: Drought vs. No Drought
  misc_feature: MA Experiment ID: 20001906 Result: Down-regulated in Transcription
  misc_feature: MA Experiment 20001906 PARAMETER Experiment Name: At_Drought_Reproduction_P Parameter: Age (day) Value: 35
  misc_feature: MA Experiment 20001906 PARAMETER Experiment Name: At_Drought_Reproduction_P Parameter: Organism Value: A. thaliana
  misc_feature: MA Experiment 20001906 PARAMETER Experiment Name: At_Drought_Reproduction_P Parameter: Plant Line Value: WS
  misc_feature: MA Experiment 20001906 PARAMETER Experiment Name: At_Drought_Reproduction_P Parameter: Timepoint (day) Value: 5
  misc_feature: MA Experiment 20001906 PARAMETER Experiment Name: At_Drought_Reproduction_P Parameter: Tissue Value: Siliques
  misc_feature: MA Experiment 20001906 PARAMETER Experiment Name: At_Drought_Reproduction_P Parameter: Treatment Value: Drought vs. No Drought
  misc_feature: MA Experiment ID: 20001907 Result: Down-regulated in Transcription
  misc_feature: MA Experiment 20001907 PARAMETER Experiment Name: At_Drought_Reproduction_P Parameter: Age (day) Value: 37
  misc_feature: MA Experiment 20001907 PARAMETER Experiment Name: At_Drought_Reproduction_P Parameter: Organism Value: A. thaliana
  misc_feature: MA Experiment 20001907 PARAMETER Experiment Name: At_Drought_Reproduction_P Parameter: Plant Line Value: WS
  misc_feature: MA Experiment 20001907 PARAMETER Experiment Name: At_Drought_Reproduction_P Parameter: Timepoint (day) Value: 7
  misc_feature: MA Experiment 20001907 PARAMETER Experiment Name: At_Drought_Reproduction_P Parameter: Tissue Value: Siliques
  misc_feature: MA Experiment 20001907 PARAMETER Experiment Name: At_Drought_Reproduction_P Parameter: Treatment Value: Drought vs. No Drought
  misc_feature: MA Experiment ID: 20001908 Result: Down-regulated in Transcription
  misc_feature: MA Experiment 20001908 PARAMETER Experiment Name: At_Drought_Reproduction_P Parameter: Age (day) Value: 40
  misc_feature: MA Experiment 20001908 PARAMETER Experiment Name: At_Drought_Reproduction_P Parameter: Organism Value: A. thaliana
  misc_feature: MA Experiment 20001908 PARAMETER Experiment Name: At_Drought_Reproduction_P Parameter: Plant Line Value: WS
  misc_feature: MA Experiment 20001908 PARAMETER Experiment Name: At_Drought_Reproduction_P Parameter: Timepoint (day) Value: 10
  misc_feature: MA Experiment 20001908 PARAMETER Experiment Name: At_Drought_Reproduction_P Parameter: Tissue Value: Siliques
  misc_feature: MA Experiment 20001908 PARAMETER Experiment Name: At_Drought_Reproduction_P Parameter: Treatment Value: Drought vs. No Drought
  misc_feature: MA Experiment ID: 20001910 Result: Down-regulated in Transcription
  misc_feature: MA Experiment 20001910 PARAMETER Experiment Name: At_Drought_Reproduction_P Parameter: Age (day) Value: 37
  misc_feature: MA Experiment 20001910 PARAMETER Experiment Name: At_Drought_Reproduction_P Parameter: Organism Value: A. thaliana
  misc_feature: MA Experiment 20001910 PARAMETER Experiment Name: At_Drought_Reproduction_P Parameter: Plant Line Value: WS
  misc_feature: MA Experiment 20001910 PARAMETER Experiment Name: At_Drought_Reproduction_P Parameter: Timepoint (day) Value: 7
  misc_feature: MA Experiment 20001910 PARAMETER Experiment Name: At_Drought_Reproduction_P Parameter: Tissue Value: Flowers
  misc_feature: MA Experiment 20001910 PARAMETER Experiment Name: At_Drought_Reproduction_P Parameter: Treatment Value: Drought vs. No Drought
  misc_feature: MA Experiment ID: 20001911 Result: Down-regulated in Transcription
  misc_feature: MA Experiment 20001911 PARAMETER Experiment Name: At_Drought_Reproduction_P Parameter: Age (day) Value: 40
  misc_feature: MA Experiment 20001911 PARAMETER Experiment Name: At_Drought_Reproduction_P Parameter: Organism Value: A. thaliana
  misc_feature: MA Experiment 20001911 PARAMETER Experiment Name: At_Drought_Reproduction_P Parameter: Plant Line Value: WS
  misc_feature: MA Experiment 20001911 PARAMETER Experiment Name: At_Drought_Reproduction_P Parameter: Timepoint (day) Value: 10
  misc_feature: MA Experiment 20001911 PARAMETER Experiment Name: At_Drought_Reproduction_P Parameter: Tissue Value: Flowers
  misc_feature: MA Experiment 20001911 PARAMETER Experiment Name: At_Drought_Reproduction_P Parameter: Treatment Value: Drought vs. No Drought

SEQ ID NO: 47380 - protein, 491 aa, Arabidopsis thaliana; identical to SEQ ID NO: 42666
  peptide (1)..(491): Ceres Seq. ID no. 12605225
  misc_feature (282)..(487): Pfam Name: Protein of unknown function (DUF1005) Pfam Description: Protein of unknown function (DUF1005)
  misc_feature (282)..(487): Pfam Name: Protein of unknown function (DUF1005) Pfam Description: Protein of unknown function (DUF1005)
  misc_feature (390)..(482): Homolog of NCBI NO: 34896878 NR Description: unknown protein [Oryza sativa (japonica
  misc_feature (82)..(392): Homolog of NCBI NO: 34896878 NR Description: unknown protein [Oryza sativa (japonica
  misc_feature (390)..(482): Homolog of NCBI NO: 36104436 NR Description: unknown protein [Oryza sativa (japonica
  misc_feature (1)..(392): Homolog of NCBI NO: 36104436 NR Description: unknown protein [Oryza sativa (japonica
  misc_feature (282)..(491): Homolog of NCBI NO: 21553542 NR Description: unknown [Arabidopsis thaliana]
  misc_feature (390)..(482): Homolog of NCBI NO: 34896878 NR Description: unknown protein [Oryza sativa (japonica
  misc_feature (390)..(482): Homolog of NCBI NO: 36104436 NR Description: unknown protein [Oryza sativa (japonica
  misc_feature (282)..(491): Homolog of NCBI NO: 21553542 NR Description: unknown [Arabidopsis thaliana]
  misc_feature (1)..(491): Homolog of NCBI NO: 15230917 NR Description: unknown protein
  misc_feature (1)..(491): Homolog of NCBI NO: 18176372 NR Description: unknown protein [Arabidopsis thaliana]
  misc_feature (124)..(491): Homolog of NCBI NO: 15222861 NR Description: hypothetical protein
  misc_feature (79)..(486): Homolog of NCBI NO: 15218372 NR Description: unknown protein; protein id: At1g10020.1
  misc_feature (1)..(103): Homolog of NCBI NO: 15218372 NR Description: unknown protein; protein id: At1g10020.1
  misc_feature (1)..(392): Homolog of NCBI NO: 36104436 NR Description: unknown protein [Oryza sativa (japonica
  misc_feature (82)..(392): Homolog of NCBI NO: 34896878 NR Description: unknown protein [Oryza sativa (japonica
  misc_feature (1)..(103): Homolog of NCBI NO: 15218372 NR Description: unknown protein; protein id: At1g10020.1
  misc_feature (79)..(486): Homolog of NCBI NO: 15218372 NR Description: unknown protein; protein id: At1g10020.1
  misc_feature (124)..(491): Homolog of NCBI NO: 15222861 NR Description: hypothetical protein
  misc_feature (1)..(491): Homolog of NCBI NO: 18176372 NR Description: unknown protein [Arabidopsis thaliana]
  misc_feature (1)..(491): Homolog of NCBI NO: 15230917 NR Description: unknown protein

SEQ ID NO: 47381 - protein, 430 aa, Arabidopsis thaliana; identical to SEQ ID NO: 42667
  peptide (1)..(430): Ceres Seq. ID no. 12605226
  misc_feature (221)..(426): Pfam Name: Protein of unknown function (DUF1005) Pfam Description: Protein of unknown function (DUF1005)
  misc_feature (221)..(426): Pfam Name: Protein of unknown function (DUF1005) Pfam Description: Protein of unknown function (DUF1005)
  misc_feature (329)..(421): Homolog of NCBI NO: 34896878 NR Description: unknown protein [Oryza sativa (japonica
  misc_feature (21)..(331): Homolog of NCBI NO: 34896878 NR Description: unknown protein [Oryza sativa (japonica
  misc_feature (329)..(421): Homolog of NCBI NO: 36104436 NR Description: unknown protein [Oryza sativa (japonica
  misc_feature (1)..(331): Homolog of NCBI NO: 36104436 NR Description: unknown protein [Oryza sativa (japonica
  misc_feature (221)..(430): Homolog of NCBI NO: 21553542 NR Description: unknown [Arabidopsis thaliana]
  misc_feature (329)..(421): Homolog of NCBI NO: 34896878 NR Description: unknown protein [Oryza sativa (japonica
  misc_feature (329)..(421): Homolog of NCBI NO: 36104436 NR Description: unknown protein [Oryza sativa (japonica
  misc_feature (221)..(430): Homolog of NCBI NO: 21553542 NR Description: unknown [Arabidopsis thaliana]
  misc_feature (1)..(430): Homolog of NCBI NO: 15230917 NR Description: unknown protein
  misc_feature (1)..(430): Homolog of NCBI NO: 18176372 NR Description: unknown protein [Arabidopsis thaliana]
  misc_feature (63)..(430): Homolog of NCBI NO: 15222861 NR Description: hypothetical protein
  misc_feature (18)..(425): Homolog of NCBI NO: 15218372 NR Description: unknown protein; protein id: At1g10020.1
  misc_feature (1)..(42): Homolog of NCBI NO: 15218372 NR Description: unknown protein; protein id: At1g10020.1
  misc_feature (1)..(331): Homolog of NCBI NO: 36104436 NR Description: unknown protein [Oryza sativa (japonica
  misc_feature (21)..(331): Homolog of NCBI NO: 34896878 NR Description: unknown protein [Oryza sativa (japonica
  misc_feature (1)..(42): Homolog of NCBI NO: 15218372 NR Description: unknown protein; protein id: At1g10020.1
  misc_feature (18)..(425): Homolog of NCBI NO: 15218372 NR Description: unknown protein; protein id: At1g10020.1
  misc_feature (63)..(430): Homolog of NCBI NO: 15222861 NR Description: hypothetical protein
  misc_feature (1)..(430): Homolog of NCBI NO: 18176372 NR Description: unknown protein [Arabidopsis thaliana]
  misc_feature (1)..(430): Homolog of NCBI NO: 15230917 NR Description: unknown protein

SEQ ID NO: 47382 - protein, 255 aa, Arabidopsis thaliana; identical to SEQ ID NO: 42668
  peptide (1)..(255): Ceres Seq. ID no. 12605227
  misc_feature (46)..(251): Pfam Name: Protein of unknown function (DUF1005) Pfam Description: Protein of unknown function (DUF1005)
  misc_feature (46)..(251): Pfam Name: Protein of unknown function (DUF1005) Pfam Description: Protein of unknown function (DUF1005)
  misc_feature (1)..(163): Homolog of NCBI NO: 34909364 NR Description: P0638D12.14 [Oryza sativa (japonica
  misc_feature (154)..(246): Homolog of NCBI NO: 34896878 NR Description: unknown protein [Oryza sativa (japonica
  misc_feature (1)..(156): Homolog of NCBI NO: 34896878 NR Description: unknown protein [Oryza sativa (japonica
  misc_feature (154)..(246): Homolog of NCBI NO: 36104436 NR Description: unknown protein [Oryza sativa (japonica
  misc_feature (1)..(156): Homolog of NCBI NO: 36104436 NR Description: unknown protein [Oryza sativa (japonica
  misc_feature (1)..(163): Homolog of NCBI NO: 34909364 NR Description: P0638D12.14 [Oryza sativa (japonica
  misc_feature (1)..(156): Homolog of NCBI NO: 34896878 NR Description: unknown protein [Oryza sativa (japonica
  misc_feature (1)..(156): Homolog of NCBI NO: 36104436 NR Description: unknown protein [Oryza sativa (japonica
  misc_feature (1)..(255): Homolog of NCBI NO: 15230917 NR Description: unknown protein
  misc_feature (1)..(255): Homolog of NCBI NO: 18176372 NR Description: unknown protein [Arabidopsis thaliana]
  misc_feature (1)..(255): Homolog of NCBI NO: 15222861 NR Description: hypothetical protein
  misc_feature (1)..(250): Homolog of NCBI NO: 15218372 NR Description: unknown protein; protein id: At1g10020.1
  misc_feature (46)..(255): Homolog of NCBI NO: 21553542 NR Description: unknown [Arabidopsis thaliana]
  misc_feature (154)..(246): Homolog of NCBI NO: 36104436 NR Description: unknown protein [Oryza sativa (japonica
  misc_feature (154)..(246): Homolog of NCBI NO: 34896878 NR Description: unknown protein [Oryza sativa (japonica
  misc_feature (46)..(255): Homolog of NCBI NO: 21553542 NR Description: unknown [Arabidopsis thaliana]
  misc_feature (1)..(250): Homolog of NCBI NO: 15218372 NR Description: unknown protein; protein id: At1g10020.1
  misc_feature (1)..(255): Homolog of NCBI NO: 15222861 NR Description: hypothetical protein
  misc_feature (1)..(255): Homolog of NCBI NO: 18176372 NR Description: unknown protein [Arabidopsis thaliana]
  misc_feature (1)..(255): Homolog of NCBI NO: 15230917 NR Description: unknown protein

SEQ ID NO: 47383 - DNA, 1581 bp, Arabidopsis thaliana
  misc_feature (1)..(1581): Ceres Seq. ID no. 13592659
  misc_feature: MA Experiment ID: 20000265 Result: Up-regulated in Transcription
  misc_feature: MA Experiment 20000265 PARAMETER Experiment Name: At_Open_Flower_P Parameter: Age (day) Value: 21
  misc_feature: MA Experiment 20000265 PARAMETER Experiment Name: At_Open_Flower_P Parameter: Plant Line Value: WS
  misc_feature: MA Experiment 20000265 PARAMETER Experiment Name: At_Open_Flower_P Parameter: Tissue Value: Closed Flower vs. Whole Plant
  misc_feature: MA Experiment ID: 20000286 Result: Up-regulated in Transcription
  misc_feature: MA Experiment 20000286 PARAMETER Experiment Name: At_Open_Flower_P Parameter: Age (day) Value: 21
  misc_feature: MA Experiment 20000286 PARAMETER Experiment Name: At_Open_Flower_P Parameter: Plant Line Value: WS
  misc_feature: MA Experiment 20000286 PARAMETER Experiment Name: At_Open_Flower_P Parameter: Tissue Value: Half Open vs. Whole Plant
  misc_feature: MA Experiment ID: 20000794 Result: Up-regulated in Transcription
  misc_feature: MA Experiment 20000794 PARAMETER Experiment Name: At_Petals_P Parameter: Age (day) Value: 23-25 days
  misc_feature: MA Experiment 20000794 PARAMETER Experiment Name: At_Petals_P Parameter: Plant Line Value: WS
  misc_feature: MA Experiment 20000794 PARAMETER Experiment Name: At_Petals_P Parameter: Tissue Value: Petals vs. Whole plant
  misc_feature: MA Experiment ID: 20001248 Result: Down-regulated in Transcription
  misc_feature: MA Experiment 20001248 PARAMETER Experiment Name: At_Far-red-induction_P Parameter: Age (day) Value: 7
  misc_feature: MA Experiment 20001248 PARAMETER Experiment Name: At_Far-red-induction_P Parameter: Light Value: Far-red vs. White
  misc_feature: MA Experiment 20001248 PARAMETER Experiment Name: At_Far-red-induction_P Parameter: Organism Value: A. thaliana
  misc_feature: MA Experiment 20001248 PARAMETER Experiment Name: At_Far-red-induction_P Parameter: Plant Line Value: Columbia
  misc_feature: MA Experiment 20001248 PARAMETER Experiment Name: At_Far-red-induction_P Parameter: Timepoint (hr) Value: 4
  misc_feature: MA Experiment 20001248 PARAMETER Experiment Name: At_Far-red-induction_P Parameter: Tissue Value: Whole Plant
  misc_feature: MA Experiment ID: 20001757 Result: Down-regulated in Transcription
  misc_feature: MA Experiment 20001757 PARAMETER Experiment Name: At_50mM_NH4NO3_L-to-H_P Parameter: Timepoint (hr) Value: 6
  misc_feature: MA Experiment 20001757 PARAMETER Experiment Name: At_50mM_NH4NO3_L-to-H_P Parameter: Tissue Value: Leaf
  misc_feature: MA Experiment 20001757 PARAMETER Experiment Name: At_50mM_NH4NO3_L-to-H_P Parameter: Treatment Value: 50mM NH4NO3 vs 100mM Mannitol
aaaaaaaagcaaaatgaaactttactctctactttccgttttcttggtcatcctcttggcaacaagcgacagtgatgcctttaccagaaacaattttccaaaggatttcctctttggagccgccacttctgcttatcagtgggaaggagctgttgctgaagatggaagaactcctagcgtctgggatactttctcacacacttacaatagaggtaatttaggtaatggagatataacatccgatgggtatcacaaatacaaggaagatgttaagctgatggcagaaatgggcttagaatcattcagattctctatctcctggtcaagacttatacctaatggaaggggactcattaacccaaaaggtctactgttttacaagaacctcatcaaagaactaataagccatggaatcgaaccacatgttacactttaccactatgatcttcctcagtctcttgaagatgagtatggaggctggatcaaccgcaaaatcatagaagacttcactgcttatgcagatgtatgtttcagagagtttggggaggatgtgaagttatggactacaataaacgaagctacaattttcgccattggttcttatgaccaaggaatctcgccccctggacattgttctcctaacaaattcatcaattgtactagtggaaattcttctacagaaccatatcttgcaggccataacatattgctagctcatgcctctgcttcaaagttgtataaactaaagtacaagagtacgcagaaaggatccatagggcttagtatatttgcattcgggttatctccatatacaaactccaaggatgatgaaatcgcaactcaaagagctaaagctttcttctatggctggatgttgaagcctttggtatttggagactatccggatgaaatgaagagaactgttggatcgagattaccggtgttttcggaggaagagtcagagcaacttaaaggatcatctgactttataggaattattcactacacgacattttatgtcacaaacaaaccctcaccttctatctttcccagcatgaatgaaggcttctttaaagacatgggagtatatatgatttccgctgcgaattcttcatttcttctgtgggaggctactccatggggtcttgaaggtattcttgagtatataaagcagagctataacaatcctccaatctatattcttgaaaatggtatgccgatgggacgcgactcgacattacaagacacacaaagaattgaattcattcaagcttacattggtgctatgctcaatgccatcaagaatggatcggacacgagaggttactttgtatggtcgatgattgatttgtatgagttactgagtggatatacgaccagcttcggaatgtactatgtgaatttcagcgatcctggtcgcaagaggactccaaagctctctgcttcttggtacactggtttcctcaatggtacaattgatgttgctactcaagatactattcagttgcagagcaacatctctggctcttcttcattgtaatatatttaaccaaaggatccttatttggtttatttcatcta

SEQ ID NO: 47384 - protein, 512 aa, Arabidopsis thaliana
  peptide (1)..(512): Ceres Seq. ID no. 13592660
  misc_feature (6)..(509): Homolog of NCBI NO: 22330338 NR Description: glycosyl hydrolase family 1 [Arabidopsis thaliana]
  misc_feature (5)..(436): Homolog of NCBI NO: 22331910 NR Description: glycosyl hydrolase family 1 [Arabidopsis thaliana]
  misc_feature (5)..(206): Homolog of NCBI NO: 11264268 NR Description: beta-glucosidase-like protein - Arabidopsis
  misc_feature (260)..(512): Homolog of NCBI NO: 11264268 NR Description: beta-glucosidase-like protein - Arabidopsis
  misc_feature (9)..(511): Homolog of NCBI NO: 22328869 NR Description: glycosyl hydrolase family 1 [Arabidopsis thaliana]
  misc_feature (5)..(512): Homolog of NCBI NO: 15228847 NR Description: glycosyl hydrolase family 1 [Arabidopsis
  misc_feature (5)..(512): Homolog of NCBI NO: 7435451 NR Description: beta-glucosidase homolog T27E11.60 - Arabidopsis
  misc_feature (5)..(512): Homolog of NCBI NO: 30687750 NR Description: glycosyl hydrolase family 1 [Arabidopsis thaliana]
  misc_feature (5)..(512): Homolog of NCBI NO: 7435452 NR Description: beta-glucosidase homolog T27E11.70 - Arabidopsis
  misc_feature (5)..(512): Homolog of NCBI NO: 18417073 NR Description: glycosyl hydrolase family 1 [Arabidopsis
KKSKMKLYSLLSVFLVILLATSDSDAFTRNNFPKDFLFGAATSAYQWEGAVAEDGRTPSVWDTFSHTYNRGNLGNGDITSDGYHKYKEDVKLMAEMGLESFRFSISWSRLIPNGRGLINPKGLLFYKNLIKELISHGIEPHVTLYHYDLPQSLEDEYGGWINRKIIEDFTAYADVCFREFGEDVKLWTTINEATIFAIGSYDQGISPPGHCSPNKFINCTSGNSSTEPYLAGHNILLAHASASKLYKLKYKSTQKGSIGLSIFAFGLSPYTNSKDDEIATQRAKAFFYGWMLKPLVFGDYPDEMKRTVGSRLPVFSEEESEQLKGSSDFIGIIHYTTFYVTNKPSPSIFPSMNEGFFKDMGVYMISAANSSFLLWEATPWGLEGILEYIKQSYNNPPIYILENGMPMGRDSTLQDTQRIEFIQAYIGAMLNAIKNGSDTRGYFVWSMIDLYELLSGYTTSFGMYYVNFSDPGRKRTPKLSASWYTGFLNGTIDVATQDTIQLQSNISGSSSL

SEQ ID NO: 47385 - protein, 508 aa, Arabidopsis thaliana
  peptide (1)..(508): Ceres Seq. ID no. 13592661
  misc_feature (2)..(505): Homolog of NCBI NO: 22330338 NR Description: glycosyl hydrolase family 1 [Arabidopsis thaliana]
  misc_feature (1)..(432): Homolog of NCBI NO: 22331910 NR Description: glycosyl hydrolase family 1 [Arabidopsis thaliana]
  misc_feature (1)..(202): Homolog of NCBI NO: 11264268 NR Description: beta-glucosidase-like protein - Arabidopsis
  misc_feature (256)..(508): Homolog of NCBI NO: 11264268 NR Description: beta-glucosidase-like protein - Arabidopsis
  misc_feature (5)..(507): Homolog of NCBI NO: 22328869 NR Description: glycosyl hydrolase family 1 [Arabidopsis thaliana]
  misc_feature (1)..(508): Homolog of NCBI NO: 15228847 NR Description: glycosyl hydrolase family 1 [Arabidopsis
  misc_feature (1)..(508): Homolog of NCBI NO: 7435451 NR Description: beta-glucosidase homolog T27E11.60 - Arabidopsis
  misc_feature (1)..(508): Homolog of NCBI NO: 30687750 NR Description: glycosyl hydrolase family 1 [Arabidopsis thaliana]
  misc_feature (1)..(508): Homolog of NCBI NO: 7435452 NR Description: beta-glucosidase homolog T27E11.70 - Arabidopsis
  misc_feature (1)..(508): Homolog of NCBI NO: 18417073 NR Description: glycosyl hydrolase family 1 [Arabidopsis
MKLYSLLSVFLVILLATSDSDAFTRNNFPKDFLFGAATSAYQWEGAVAEDGRTPSVWDTFSHTYNRGNLGNGDITSDGYHKYKEDVKLMAEMGLESFRFSISWSRLIPNGRGLINPKGLLFYKNLIKELISHGIEPHVTLYHYDLPQSLEDEYGGWINRKIIEDFTAYADVCFREFGEDVKLWTTINEATIFAIGSYDQGISPPGHCSPNKFINCTSGNSSTEPYLAGHNILLAHASASKLYKLKYKSTQKGSIGLSIFAFGLSPYTNSKDDEIATQRAKAFFYGWMLKPLVFGDYPDEMKRTVGSRLPVFSEEESEQLKGSSDFIGIIHYTTFYVTNKPSPSIFPSMNEGFFKDMGVYMISAANSSFLLWEATPWGLEGILEYIKQSYNNPPIYILENGMPMGRDSTLQDTQRIEFIQAYIGAMLNAIKNGSDTRGYFVWSMIDLYELLSGYTTSFGMYYVNFSDPGRKRTPKLSASWYTGFLNGTIDVATQDTIQLQSNISGSSSL

SEQ ID NO: 47386 - protein, 420 aa, Arabidopsis thaliana
  peptide (1)..(420): Ceres Seq. ID no. 13592662
  misc_feature (1)..(417): Homolog of NCBI NO: 22330338 NR Description: glycosyl hydrolase family 1 [Arabidopsis thaliana]
  misc_feature (1)..(344): Homolog of NCBI NO: 22331910 NR Description: glycosyl hydrolase family 1 [Arabidopsis thaliana]
  misc_feature (1)..(114): Homolog of NCBI NO: 11264268 NR Description: beta-glucosidase-like protein - Arabidopsis
  misc_feature (168)..(420): Homolog of NCBI NO: 11264268 NR Description: beta-glucosidase-like protein - Arabidopsis
  misc_feature (1)..(419): Homolog of NCBI NO: 22328869 NR Description: glycosyl hydrolase family 1 [Arabidopsis thaliana]
  misc_feature (1)..(420): Homolog of NCBI NO: 15228847 NR Description: glycosyl hydrolase family 1 [Arabidopsis
  misc_feature (1)..(420): Homolog of NCBI NO: 7435451 NR Description: beta-glucosidase homolog T27E11.60 - Arabidopsis
  misc_feature (1)..(420): Homolog of NCBI NO: 30687750 NR Description: glycosyl hydrolase family 1 [Arabidopsis thaliana]
  misc_feature (1)..(420): Homolog of NCBI NO: 7435452 NR Description: beta-glucosidase homolog T27E11.70 - Arabidopsis
  misc_feature (1)..(420): Homolog of NCBI NO: 18417073 NR Description: glycosyl hydrolase family 1 [Arabidopsis
MAEMGLESFRFSISWSRLIPNGRGLINPKGLLFYKNLIKELISHGIEPHVTLYHYDLPQSLEDEYGGWINRKIIEDFTAYADVCFREFGEDVKLWTTINEATIFAIGSYDQGISPPGHCSPNKFINCTSGNSSTEPYLAGHNILLAHASASKLYKLKYKSTQKGSIGLSIFAFGLSPYTNSKDDEIATQRAKAFFYGWMLKPLVFGDYPDEMKRTVGSRLPVFSEEESEQLKGSSDFIGIIHYTTFYVTNKPSPSIFPSMNEGFFKDMGVYMISAANSSFLLWEATPWGLEGILEYIKQSYNNPPIYILENGMPMGRDSTLQDTQRIEFIQAYIGAMLNAIKNGSDTRGYFVWSMIDLYELLSGYTTSFGMYYVNFSDPGRKRTPKLSASWYTGFLNGTIDVATQDTIQLQSNISGSSSL

SEQ ID NO: 47387 - DNA, 1081 bp, Arabidopsis thaliana
  misc_feature (1)..(1081): Ceres Seq. ID no. 13647806
  misc_feature: MA Experiment ID: 20000171 Result: Up-regulated in Transcription
  misc_feature: MA Experiment 20000171 PARAMETER Experiment Name: At_42deg_Heat_P Parameter: Age (day) Value: 14
  misc_feature: MA Experiment 20000171 PARAMETER Experiment Name: At_42deg_Heat_P Parameter: Organism Value: A. thaliana
  misc_feature: MA Experiment 20000171 PARAMETER Experiment Name: At_42deg_Heat_P Parameter: Plant Line Value: WS
  misc_feature: MA Experiment 20000171 PARAMETER Experiment Name: At_42deg_Heat_P Parameter: Temperature (deg C) Value: 42 vs. 22
  misc_feature: MA Experiment 20000171 PARAMETER Experiment Name: At_42deg_Heat_P Parameter: Timepoint (hr) Value: 1
  misc_feature: MA Experiment 20000171 PARAMETER Experiment Name: At_42deg_Heat_P Parameter: Tissue Value: Aerial
gagaaggaaaaaaaattctggaactttcgagcttctgttttgcggtgctctcaaagcttatatcggatctcgaatcttgaatcggactcagaacctcggatcttcgaaaatcgacgaacatgtcttctcctggcgaattctataactcacttccacctataaccaaggcttatggtacgttgtgctttttcactacagtagccacgcagcttggcttagttgctcccgttcacattgctttaattcctgaacttgtacttaagcagttccagatctggaggctgataacaaacttgtttttcctcggtggtttctctatcaattttggaatacgtcttttgatgatagcaagatatggagttcaactcgagaaagggccatttgaaaggcggacagcagactttttgtggatgatgatctttggatccttcactctattggtattatcagtcataccatttttctggacaccgtttcttggtgtttcacttgtgttcatgcttctttatctctggagccgagaatttccaaatgccaacatcagcctatacggtcttgtcactcttaaggctttctacctcccatgggcaatgctagcacttgatgttatcttcggttctccgatcatgccagatcttcttggcatcatagctggacatctatactacttcctaacagtccttcatcctcttgctaccggaaaaaactacctgaaaaccccaaaatgggttaataaaatcgtagcaagatggcgaattggagctccagttgcaagtgttcgacaagcaggtggtgtaggagcagcaggacccggagctggaggaggagtaggaggaggaggagcttattcaagcgctcgtgccccacccgagagttcaaacacagcattcagaggtcgatcatatcgtctcaccgactgaaatagaaatcttctcgagtttctttgttttcatcatatcaaatctttttcaaacaatgccactaactaatcccaggtagctttgtgttttcgaacagtacagtttttgaatatatgactctgtaggaagaatctttgaggttttaatacaatgttcttttc

SEQ ID NO: 47388 - protein, 266 aa, Arabidopsis thaliana
  peptide (1)..(266): Ceres Seq. ID no. 13647807
  misc_feature (11)..(202): Pfam Name: Der1-like family Pfam Description: Der1-like family
  misc_feature (6)..(201): Homolog of NCBI NO: 15777933 NR Description: putative NADH oxidoreductase complex I subunit
  misc_feature (6)..(208): Homolog of NCBI NO: 35505512 NR Description: FLJ43842 protein [Homo sapiens]
  misc_feature (8)..(207): Homolog of NCBI NO: 31455614 NR Description: carcinoma related gene [Homo sapiens]
  misc_feature (6)..(228): Homolog of NCBI NO: 27573354 NR Description: putative Der1-like protein
  misc_feature (8)..(207): Homolog of NCBI NO: 16151831 NR Description: F-LANa [Mus musculus]
  misc_feature (8)..(207): Homolog of NCBI NO: 26350675 NR Description: unnamed protein product [Mus musculus]
  misc_feature (8)..(207): Homolog of NCBI NO: 15808990 NR Description: carcinoma related gene [Mus musculus]
  misc_feature (7)..(236): Homolog of NCBI NO: 9187743 NR Description: putative NADH oxidoreductase [Zea mays]
  misc_feature (7)..(266): Homolog of NCBI NO: 25407607 NR Description: hypothetical protein AT4g29330 [imported] -
  misc_feature (1)..(266): Homolog of NCBI NO: 22329014 NR Description: expressed protein [Arabidopsis thaliana]
MSSPGEFYNSLPPITKAYGTLCFFTTVATQLGLVAPVHIALIPELVLKQFQIWRLITNLFFLGGFSINFGIRLLMIARYGVQLEKGPFERRTADFLWMMIFGSFTLLVLSVIPFFWTPFLGVSLVFMLLYLWSREFPNANISLYGLVTLKAFYLPWAMLALDVIFGSPIMPDLLGIIAGHLYYFLTVLHPLATGKNYLKTPKWVNKIVARWRIGAPVASVRQAGGVGAAGPGAGGGVGGGGAYSSARAPPESSNTAFRGRSYRLTD

SEQ ID NO: 47389 - protein, 192 aa, Arabidopsis thaliana
  peptide (1)..(192): Ceres Seq. ID no. 13647808
  misc_feature (1)..(128): Pfam Name: Der1-like family Pfam Description: Der1-like family
  misc_feature (1)..(127): Homolog of NCBI NO: 15777933 NR Description: putative NADH oxidoreductase complex I subunit
  misc_feature (1)..(134): Homolog of NCBI NO: 35505512 NR Description: FLJ43842 protein [Homo sapiens]
  misc_feature (1)..(133): Homolog of NCBI NO: 31455614 NR Description: carcinoma related gene [Homo sapiens]
  misc_feature (1)..(154): Homolog of NCBI NO: 27573354 NR Description: putative Der1-like protein
  misc_feature (1)..(133): Homolog of NCBI NO: 26350675 NR Description: unnamed protein product [Mus musculus]
  misc_feature (1)..(133): Homolog of NCBI NO: 16151831 NR Description: F-LANa [Mus musculus]
  misc_feature (1)..(133): Homolog of NCBI NO: 15808990 NR Description: carcinoma related gene [Mus musculus]
  misc_feature (1)..(162): Homolog of NCBI NO: 9187743 NR Description: putative NADH oxidoreductase [Zea mays]
  misc_feature (1)..(192): Homolog of NCBI NO: 25407607 NR Description: hypothetical protein AT4g29330 [imported] -
  misc_feature (1)..(192): Homolog of NCBI NO: 22329014 NR Description: expressed protein [Arabidopsis thaliana]
MIARYGVQLEKGPFERRTADFLWMMIFGSFTLLVLSVIPFFWTPFLGVSLVFMLLYLWSREFPNANISLYGLVTLKAFYLPWAMLALDVIFGSPIMPDLLGIIAGHLYYFLTVLHPLATGKNYLKTPKWVNKIVARWRIGAPVASVRQAGGVGAAGPGAGGGVGGGGAYSSARAPPESSNTAFRGRSYRLTD

SEQ ID NO: 47390 - protein, 169 aa, Arabidopsis thaliana
  peptide (1)..(169): Ceres Seq. ID no. 13647809
  misc_feature (1)..(105): Pfam Name: Der1-like family Pfam Description: Der1-like family
  misc_feature (1)..(104): Homolog of NCBI NO: 15777933 NR Description: putative NADH oxidoreductase complex I subunit
  misc_feature (1)..(111): Homolog of NCBI NO: 35505512 NR Description: FLJ43842 protein [Homo sapiens]
  misc_feature (1)..(110): Homolog of NCBI NO: 31455614 NR Description: carcinoma related gene [Homo sapiens]
  misc_feature (1)..(131): Homolog of NCBI NO: 27573354 NR Description: putative Der1-like protein
  misc_feature (1)..(110): Homolog of NCBI NO: 26350675 NR Description: unnamed protein product [Mus musculus]
  misc_feature (1)..(110): Homolog of NCBI NO: 16151831 NR Description: F-LANa [Mus musculus]
  misc_feature (1)..(110): Homolog of NCBI NO: 15808990 NR Description: carcinoma related gene [Mus musculus]
  misc_feature (1)..(139): Homolog of NCBI NO: 9187743 NR Description: putative NADH oxidoreductase [Zea mays]
  misc_feature (1)..(169): Homolog of NCBI NO: 25407607 NR Description: hypothetical protein AT4g29330 [imported] -
  misc_feature (1)..(169): Homolog of NCBI NO: 22329014 NR Description: expressed protein [Arabidopsis thaliana]
MMIFGSFTLLVLSVIPFFWTPFLGVSLVFMLLYLWSREFPNANISLYGLVTLKAFYLPWAMLALDVIFGSPIMPDLLGIIAGHLYYFLTVLHPLATGKNYLKTPKWVNKIVARWRIGAPVASVRQAGGVGAAGPGAGGGVGGGGAYSSARAPPESSNTAFRGRSYRLTD

SEQ ID NO: 47391 - DNA, 1824 bp, Arabidopsis thaliana
  misc_feature (1)..(1824): Ceres Seq. ID no. 13647846
  misc_feature: MA Experiment ID: 20000185 Result: Up-regulated in Transcription
  misc_feature: MA Experiment 20000185 PARAMETER Experiment Name: At_Roots__P Parameter: Age (day) Value: 7 vs. 21
  misc_feature: MA Experiment 20000185 PARAMETER Experiment Name: At_Roots__P Parameter: Organism Value: A. thaliana
  misc_feature: MA Experiment 20000185 PARAMETER Experiment Name: At_Roots__P Parameter: Tissue Value: Roots vs. Whole Plant
  misc_feature: MA Experiment ID: 20000438 Result: Down-regulated in Transcription
  misc_feature: MA Experiment 20000438 PARAMETER Experiment Name: At_Shoots__P Parameter: Age (day) Value: 14
  misc_feature: MA Experiment 20000438 PARAMETER Experiment Name: At_Shoots__P Parameter: Tissue Value: Shoots vs. Whole Plant
  misc_feature: MA Experiment ID: 20000439 Result: Up-regulated in Transcription
  misc_feature: MA Experiment 20000439 PARAMETER Experiment Name: At_Roots__P Parameter: Age (day) Value: 14 vs. 21
  misc_feature: MA Experiment 20000439 PARAMETER Experiment Name: At_Roots__P Parameter: Organism Value: A. thaliana
  misc_feature: MA Experiment 20000439 PARAMETER Experiment Name: At_Roots__P Parameter: Tissue Value: Roots vs. Whole Plant
  misc_feature: MA Experiment ID: 20000794 Result: Up-regulated in Transcription
  misc_feature: MA Experiment 20000794 PARAMETER Experiment Name: At_Petals_P Parameter: Age (day) Value: 23-25 days
  misc_feature: MA Experiment 20000794 PARAMETER Experiment Name: At_Petals_P Parameter: Plant Line Value: WS
  misc_feature: MA Experiment 20000794 PARAMETER Experiment Name: At_Petals_P Parameter: Tissue Value: Petals vs. Whole plant
  misc_feature: MA Experiment ID: 20001904 Result: Up-regulated in Transcription
  misc_feature: MA Experiment 20001904 PARAMETER Experiment Name: At_Drought_Reproduction_P Parameter: Age (day) Value: 37
  misc_feature: MA Experiment 20001904 PARAMETER Experiment Name: At_Drought_Reproduction_P Parameter: Organism Value: A. thaliana
  misc_feature: MA Experiment 20001904 PARAMETER Experiment Name: At_Drought_Reproduction_P Parameter: Plant Line Value: WS
  misc_feature: MA Experiment 20001904 PARAMETER Experiment Name: At_Drought_Reproduction_P Parameter: Timepoint (day) Value: 7
  misc_feature: MA Experiment 20001904 PARAMETER Experiment Name: At_Drought_Reproduction_P Parameter: Tissue Value: Rosettes
  misc_feature: MA Experiment 20001904 PARAMETER Experiment Name: At_Drought_Reproduction_P Parameter: Treatment Value: Drought vs. No Drought
  misc_feature: MA Experiment ID: 20001905 Result: Up-regulated in Transcription
  misc_feature: MA Experiment 20001905 PARAMETER Experiment Name: At_Drought_Reproduction_P Parameter: Age (day) Value: 40
  misc_feature: MA Experiment 20001905 PARAMETER Experiment Name: At_Drought_Reproduction_P Parameter: Organism Value: A. thaliana
  misc_feature: MA Experiment 20001905 PARAMETER Experiment Name: At_Drought_Reproduction_P Parameter: Plant Line Value: WS
  misc_feature: MA Experiment 20001905 PARAMETER Experiment Name: At_Drought_Reproduction_P Parameter: Timepoint (day) Value: 10
  misc_feature: MA Experiment 20001905 PARAMETER Experiment Name: At_Drought_Reproduction_P Parameter: Tissue Value: Rosettes
  misc_feature: MA Experiment 20001905 PARAMETER Experiment Name: At_Drought_Reproduction_P Parameter: Treatment Value: Drought vs. No Drought
  misc_feature: MA Experiment ID: 20001911 Result: Up-regulated in Transcription
  misc_feature: MA Experiment 20001911 PARAMETER Experiment Name: At_Drought_Reproduction_P Parameter: Age (day) Value: 40
  misc_feature: MA Experiment 20001911 PARAMETER Experiment Name: At_Drought_Reproduction_P Parameter: Organism Value: A. thaliana
  misc_feature: MA Experiment 20001911 PARAMETER Experiment Name: At_Drought_Reproduction_P Parameter: Plant Line Value: WS
  misc_feature: MA Experiment 20001911 PARAMETER Experiment Name: At_Drought_Reproduction_P Parameter: Timepoint (day) Value: 10
  misc_feature: MA Experiment 20001911 PARAMETER Experiment Name: At_Drought_Reproduction_P Parameter: Tissue Value: Flowers
  misc_feature: MA Experiment 20001911 PARAMETER Experiment Name: At_Drought_Reproduction_P Parameter: Treatment Value: Drought vs. No Drought
gaaaaagcaaaaacctcatcgacataaaaagaaaaatggcgtttgcgatatcaaagcgaaacgcaaccttgtttcttgtaacgctactactaatctccgttccattgtcttcctccacgctacaacaagatttcgtgaagtgccttgtcgacaactccgacgtctccttccccataacggcgtcgtttttctcaccggaccaaaacgctactttgtttaaagaggagcttgaatcaacggcacagaatctccgttacttgacgccgtcaaacccgaagcccgtgttcatattcgagcctttgtacgagacgcatgtccaagcagcggtcgtgtgtgccaagaagcttcagcttcacctccggctacgtagcggtggtcacgactacgaagggctctcgtttgttgccgaggacgaaacgccgtttgtgatcgttgatttgtcgaagcttagacaggttgacgttgatttggacagtaacagtgcgtgggctcatgctggtgctaccatcggagaggtttattacaggatccaagagaaaagccaaacccatggttttccggccggtttatgctcaagccttggcatcggtggccacttagtcggtggagcgtacggttccatgatgaggaagttcggtctcggcgctgacaatgtcctcgacgccagaatcgtcgacgccaacggccaaatcctcgatcgcgcggcaatgggagaagacgtcttctgggcgattcgcggcggcggcggtggtagcttcggcgtgatattggcctggaagattaagctcgtccccgttccggcgaccgttacggtattcacagtcacgaagacgcttgagcaagacggaactaaagttttatacaaatgggaacaaatcgctgataagcttgacgatgatctcttcattcgcgtcattatttcaccggccagtaaaaccaccaaaccgggaaatcgaaccatctcgatgtcgtaccaagctcagtttctcggagactccaatcggctcttgcaggtgatgcagaagagtttccctgagttaggactgacgaagaaggactgcacagaaatgagctggatcaaatcagtgatgtacattgcaggttttccaaacagtgcagcaccggaagctttactagccggaaaatcattgttcaagaatcacttcaaagccaagtcagactttgtgaaagagccaattccagtagaaggtttagaaggattatgggaaaggtttctagaagaagattcaccgttaacgatatggaacccttacggaggaatgatgtcgaggatctccgagtcagagatacctttccctcataggaacgggacattgttcaagattcagtggctaagcacgtggcaagatgggaaagtgagcgaggaaaggcatatgaagtggattagggagatgtatagttacatggagcagtatgtgtcgaagaacccgagacaggcgtatgtgaattacagggatcttgatttggggactaatgaaggagagactgatgctagagagtggggtgctaagtattacaaagggaatttcgagaggttggtgaagattaagggtgagtttgatcctgataatttcttcaggcatgaacagagtgttccgacaaagattggttgatggatttggagttccttgttcaatgggtttttaaattctaataaagaaaatatatacacaagatagaaataatatgtatttgtgttttgtcatagggagaattctgcattttgtatttctatttttgatatataacaatctttacttaaagaaaaaaaaaaaaaaaaaaactcgagggggggcccggtac

SEQ ID NO: 47392 - protein, 543 aa, Arabidopsis thaliana
  peptide (1)..(543): Ceres Seq. ID no. 15219499
  misc_feature (93)..(250): Pfam Name: FAD binding domain Pfam Description: FAD binding domain
  misc_feature (22)..(540): Homolog of NCBI NO: 13161397 NR Description: CPRD2 [Vigna unguiculata]
  misc_feature (23)..(539): Homolog of NCBI NO: 15221473 NR Description: FAD-linked oxidoreductase family [Arabidopsis
  misc_feature (12)..(540): Homolog of NCBI NO: 18652400 NR Description: carbohydrate oxidase [Helianthus annuus]
  misc_feature (36)..(539): Homolog of NCBI NO: 15241476 NR Description: FAD-linked oxidoreductase family [Arabidopsis
  misc_feature (22)..(540): Homolog of NCBI NO: 15241478 NR Description: FAD-linked oxidoreductase family [Arabidopsis
  misc_feature (22)..(540): Homolog of NCBI NO: 16648925 NR Description: berberine bridge enzyme-like protein [Arabidopsis
  misc_feature (23)..(539): Homolog of NCBI NO: 15241494 NR Description: FAD-linked oxidoreductase family [Arabidopsis
  misc_feature (12)..(440): Homolog of NCBI NO: 25528573 NR Description: hypothetical protein T5I8.22 [imported] -
  misc_feature (12)..(542): Homolog of NCBI NO: 15220954 NR Description: FAD-linked oxidoreductase family [Arabidopsis
  misc_feature (12)..(543): Homolog of NCBI NO: 15226830 NR Description: FAD-linked oxidoreductase family [Arabidopsis
KSKNLIDIKRKMAFAISKRNATLFLVTLLLISVPLSSSTLQQDFVKCLVDNSDVSFPITASFFSPDQNATLFKEELESTAQNLRYLTPSNPKPVFIFEPLYETHVQAAVVCAKKLQLHLRLRSGGHDYEGLSFVAEDETPFVIVDLSKLRQVDVDLDSNSAWAHAGATIGEVYYRIQEKSQTHGFPAGLCSSLGIGGHLVGGAYGSMMRKFGLGADNVLDARIVDANGQILDRAAMGEDVFWAIRGGGGGSFGVILAWKIKLVPVPATVTVFTVTKTLEQDGTKVLYKWEQIADKLDDDLFIRVIISPASKTTKPGNRTISMSYQAQFLGDSNRLLQVMQKSFPELGLTKKDCTEMSWIKSVMYIAGFPNSAAPEALLAGKSLFKNHFKAKSDFVKEPIPVEGLEGLWERFLEEDSPLTIWNPYGGMMSRISESEIPFPHRNGTLFKIQWLSTWQDGKVSEERHMKWIREMYSYMEQYVSKNPRQAYVNYRDLDLGTNEGETDAREWGAKYYKGNFERLVKIKGEFDPDNFFRHEQSVPTKIG

SEQ ID NO: 47393 - protein, 532 aa, Arabidopsis thaliana
  peptide (1)..(532): Ceres Seq. ID no. 15219500
  misc_feature (82)..(239): Pfam Name: FAD binding domain Pfam Description: FAD binding domain
  misc_feature (11)..(529): Homolog of NCBI NO: 13161397 NR Description: CPRD2 [Vigna unguiculata]
  misc_feature (12)..(528): Homolog of NCBI NO: 15221473 NR Description: FAD-linked oxidoreductase family [Arabidopsis
  misc_feature (1)..(529): Homolog of NCBI NO: 18652400 NR Description: carbohydrate oxidase [Helianthus annuus]
  misc_feature (25)..(528): Homolog of NCBI NO: 15241476 NR Description: FAD-linked oxidoreductase family [Arabidopsis
  misc_feature (11)..(529): Homolog of NCBI NO: 15241478 NR Description: FAD-linked oxidoreductase family [Arabidopsis
  misc_feature (11)..(529): Homolog of NCBI NO: 16648925 NR Description: berberine bridge enzyme-like protein [Arabidopsis
  misc_feature (12)..(528): Homolog of NCBI NO: 15241494 NR Description: FAD-linked oxidoreductase family [Arabidopsis
  misc_feature (1)..(429): Homolog of NCBI NO: 25528573 NR Description: hypothetical protein T5I8.22 [imported] -
  misc_feature (1)..(531): Homolog of NCBI NO: 15220954 NR Description: FAD-linked oxidoreductase family [Arabidopsis
  misc_feature (1)..(532): Homolog of NCBI NO: 15226830 NR Description: FAD-linked oxidoreductase family [Arabidopsis
MAFAISKRNATLFLVTLLLISVPLSSSTLQQDFVKCLVDNSDVSFPITASFFSPDQNATLFKEELESTAQNLRYLTPSNPKPVFIFEPLYETHVQAAVVCAKKLQLHLRLRSGGHDYEGLSFVAEDETPFVIVDLSKLRQVDVDLDSNSAWAHAGATIGEVYYRIQEKSQTHGFPAGLCSSLGIGGHLVGGAYGSMMRKFGLGADNVLDARIVDANGQILDRAAMGEDVFWAIRGGGGGSFGVILAWKIKLVPVPATVTVFTVTKTLEQDGTKVLYKWEQIADKLDDDLFIRVIISPASKTTKPGNRTISMSYQAQFLGDSNRLLQVMQKSFPELGLTKKDCTEMSWIKSVMYIAGFPNSAAPEALLAGKSLFKNHFKAKSDFVKEPIPVEGLEGLWERFLEEDSPLTIWNPYGGMMSRISESEIPFPHRNGTLFKIQWLSTWQDGKVSEERHMKWIREMYSYMEQYVSKNPRQAYVNYRDLDLGTNEGETDAREWGAKYYKGNFERLVKIKGEFDPDNFFRHEQSVPTKIG

SEQ ID NO: 47394 - protein, 337 aa, Arabidopsis thaliana
  peptide (1)..(337): Ceres Seq. ID no. 15219501
  misc_feature (1)..(334): Homolog of NCBI NO: 13161397 NR Description: CPRD2 [Vigna unguiculata]
  misc_feature (1)..(333): Homolog of NCBI NO: 15221473 NR Description: FAD-linked oxidoreductase family [Arabidopsis
  misc_feature (1)..(334): Homolog of NCBI NO: 18652400 NR Description: carbohydrate oxidase [Helianthus annuus]
  misc_feature (1)..(333): Homolog of NCBI NO: 15241476 NR Description: FAD-linked oxidoreductase family [Arabidopsis
  misc_feature (1)..(334): Homolog of NCBI NO: 15241478 NR Description: FAD-linked oxidoreductase family [Arabidopsis
  misc_feature (1)..(334): Homolog of NCBI NO: 16648925 NR Description: berberine bridge enzyme-like protein [Arabidopsis
  misc_feature (1)..(333): Homolog of NCBI NO: 15241494 NR Description: FAD-linked oxidoreductase family [Arabidopsis
  misc_feature (1)..(234): Homolog of NCBI NO: 25528573 NR Description: hypothetical protein T5I8.22 [imported] -
  misc_feature (1)..(336): Homolog of NCBI NO: 15220954 NR Description: FAD-linked oxidoreductase family [Arabidopsis
  misc_feature (1)..(337): Homolog of NCBI NO: 15226830 NR Description: FAD-linked oxidoreductase family [Arabidopsis
MMRKFGLGADNVLDARIVDANGQILDRAAMGEDVFWAIRGGGGGSFGVILAWKIKLVPVPATVTVFTVTKTLEQDGTKVLYKWEQIADKLDDDLFIRVIISPASKTTKPGNRTISMSYQAQFLGDSNRLLQVMQKSFPELGLTKKDCTEMSWIKSVMYIAGFPNSAAPEALLAGKSLFKNHFKAKSDFVKEPIPVEGLEGLWERFLEEDSPLTIWNPYGGMMSRISESEIPFPHRNGTLFKIQWLSTWQDGKVSEERHMKWIREMYSYMEQYVSKNPRQAYVNYRDLDLGTNEGETDAREWGAKYYKGNFERLVKIKGEFDPDNFFRHEQSVPTKIG

SEQ ID NO: 47395 - DNA, 1740 bp, Arabidopsis thaliana
  misc_feature (1)..(1740): Ceres Seq. ID no. 13593561
  misc_feature: MA Experiment ID: 20001557 Result: Up-regulated in Transcription
  misc_feature: MA Experiment 20001557 PARAMETER Experiment Name: At_Drought_Soil_Dry_P Parameter: Age (day) Value: 27
  misc_feature: MA Experiment 20001557 PARAMETER Experiment Name: At_Drought_Soil_Dry_P Parameter: Organism Value: A. thaliana
  misc_feature: MA Experiment 20001557 PARAMETER Experiment Name: At_Drought_Soil_Dry_P Parameter: Plant Line Value: WS
  misc_feature: MA Experiment 20001557 PARAMETER Experiment Name: At_Drought_Soil_Dry_P Parameter: Post Timepoint (hr) Value: 3
  misc_feature: MA Experiment 20001557 PARAMETER Experiment Name: At_Drought_Soil_Dry_P Parameter: Post-Treatment Value: Re-Water vs. No Drought
  misc_feature: MA Experiment 20001557 PARAMETER Experiment Name: At_Drought_Soil_Dry_P Parameter: Timepoint (day) Value: 13
  misc_feature: MA Experiment 20001557 PARAMETER Experiment Name: At_Drought_Soil_Dry_P Parameter: Treatment Value: Drought vs. No Drought
gattttccaaagtctgtttatttttttaatctctctctcttctctctcacccaatttcacaaacccgaaaccctaattttctcgggacactgaaatttttacagcttctttcctcttcttcaccggggagatttgtcggtactaaatctagggtttttgggtatcaccggagggttgaagagagagaaaaaaactcacaatggaatcagatcagggaaagctatttatcggcgggatttcatgggataccgacgagaatcttctgagagagtacttcagcaatttcggcgaggttttgcaggtcactgttatgcgagagaaagctactggtcgtcctagaggattcggattcgtcgcattctcggatcctgctgttattgatagggttcttcaggacaagcaccatattgataatagagatgttgatgtgaagagagcaatgtctagagaggagcagagtcctgctgggagatcagggacttttaatgcttctaggaattttgatagtggagctaacgtgaggactaagaagatattcgtgggaggtttgcctcctgcattaacatcagatgaatttcgggcttactttgagacttatggtcctgtgagtgatgcagtcattatgattgatcagactacacagcgtcctcgaggatttgggtttgtttcttttgattctgaagattcggttgaccttgttttacataagactttccacgatttgaatggtaaacaagtcgaagttaaaagagctcttcctaaagatgctaaccctggaatagccagtggtggtggtcgtggcagtggtggagctggagggtttccgggctatggtggttctggtggaagtggctatgagggtcgtgtggattctaatagatacatgcagccgcaaaacactggaagtggttatcctccttatggtggttctgggtatggtactggttatggttatggaagcaatggtgtaggttatgggggttttggtgggtatggcaatccagctggtgcgccttatgggaatcctagtgtccctggagctgggtttggaagtggtccaagaagttcatggggcgctcaagcaccatcgggttatgggaatgtgggatatggaaatgcagctccgtggggtggttctggtggtcctggttcagcagtaatgggtcaagctggtgcatctgcaggttatggcagtcaaggttatggctatggtggaaatgattcctcttacgggactccatctgcctatggtgcagtaggggggcgatctgggaatatgcctaacaaccatggtggcggtggctatgcggatgctttagatggctctggaggctatgggaatcaccaagggaacaacgggcaagctggttatggtggaggttatggaagtggtaggcaagctcaacaacagtgattgaagaagaaatactactagaatgtggttttatcgctgaccttgaaacctcctgctttccgccttaaccatgtcacgtctttggcggttagaccaggaggtggacctacgctggattatctcttttgttagtttctcaataagttgttttcaggcaattccggatactatttcctatcaagttgtagtttttaagtttgcgtgcttatttatatttgtcgctttggaatggttttctttctctgttatcctctagtgtttgtgtttaacgatacatcctccagattatcattattcatctcccttttggttcattcatttttgtt

SEQ ID NO: 47396 - protein, 404 aa, Arabidopsis thaliana
  peptide (1)..(404): Ceres Seq. ID no. 13593562
  misc_feature (112)..(182): Pfam Name: RNA recognition motif. (a.k.a. RRM, RBD, or RNP domain) Pfam Description: RNA recognition motif. (a.k.a. RRM, RBD, or RNP
  misc_feature (1)..(404): Homolog of NCBI NO: 9758187 NR Description: RNA-binding protein-like [Arabidopsis thaliana]
  misc_feature (1)..(397): Homolog of NCBI NO: 30680456 NR Description: heterogeneous nuclear ribonucleoprotein (hnRNP),
  misc_feature (1)..(397): Homolog of NCBI NO: 18398061 NR Description: heterogeneous nuclear ribonucleoprotein (hnRNP),
  misc_feature (1)..(397): Homolog of NCBI NO: 6648193 NR Description: putative RNA-binding protein [Arabidopsis
  misc_feature (1)..(397): Homolog of NCBI NO: 15292697 NR Description: putative RNA-binding protein [Arabidopsis
  misc_feature (90)..(397): Homolog of NCBI NO: 37535274 NR Description: putative RNA-binding protein
  misc_feature (1)..(398): Homolog of NCBI NO: 37535274 NR Description: putative RNA-binding protein
  misc_feature (1)..(402): Homolog of NCBI NO: 7439958 NR Description: probable ribonucleoprotein - Arabidopsis thaliana
  misc_feature (1)..(402): Homolog of NCBI NO: 22328624 NR Description: heterogeneous nuclear ribonucleoprotein (hnRNP),
  misc_feature (1)..(404): Homolog of NCBI NO: 15226106 NR Description: heterogeneous nuclear ribonucleoprotein (hnRNP),
MESDQGKLFIGGISWDTDENLLREYFSNFGEVLQVTVMREKATGRPRGFGFVAFSDPAVIDRVLQDKHHIDNRDVDVKRAMSREEQSPAGRSGTFNASRNFDSGANVRTKKIFVGGLPPALTSDEFRAYFETYGPVSDAVIMIDQTTQRPRGFGFVSFDSEDSVDLVLHKTFHDLNGKQVEVKRALPKDANPGIASGGGRGSGGAGGFPGYGGSGGSGYEGRVDSNRYMQPQNTGSGYPPYGGSGYGTGYGYGSNGVGYGGFGGYGNPAGAPYGNPSVPGAGFGSGPRSSWGAQAPSGYGNVGYGNAAPWGGSGGPGSAVMGQAGASAGYGSQGYGYGGNDSSYGTPSAYGAVGGRSGNMPNNHGGGGYADALDGSGGYGNHQGNNGQAGYGGGYGSGRQAQQQ

SEQ ID NO: 47397 - protein, 367 aa, Arabidopsis thaliana
  peptide (1)..(367): Ceres Seq. ID no. 13593563
  misc_feature (75)..(145): Pfam Name: RNA recognition motif. (a.k.a. RRM, RBD, or RNP domain) Pfam Description: RNA recognition motif. (a.k.a. RRM, RBD, or RNP
  misc_feature (1)..(367): Homolog of NCBI NO: 9758187 NR Description: RNA-binding protein-like [Arabidopsis thaliana]
  misc_feature (1)..(360): Homolog of NCBI NO: 18398061 NR Description: heterogeneous nuclear ribonucleoprotein (hnRNP),
  misc_feature (1)..(360): Homolog of NCBI NO: 30680456 NR Description: heterogeneous nuclear ribonucleoprotein (hnRNP),
  misc_feature (1)..(360): Homolog of NCBI NO: 6648193 NR Description: putative RNA-binding protein [Arabidopsis
  misc_feature (1)..(360): Homolog of NCBI NO: 15292697 NR Description: putative RNA-binding protein [Arabidopsis
  misc_feature (53)..(360): Homolog of NCBI NO: 37535274 NR Description: putative RNA-binding protein
  misc_feature (1)..(361): Homolog of NCBI NO: 37535274 NR Description: putative RNA-binding protein
  misc_feature (1)..(365): Homolog of NCBI NO: 7439958 NR Description: probable ribonucleoprotein - Arabidopsis thaliana
  misc_feature (1)..(365): Homolog of NCBI NO: 22328624 NR Description: heterogeneous nuclear ribonucleoprotein (hnRNP),
  misc_feature (1)..(367): Homolog of NCBI NO: 15226106 NR Description: heterogeneous nuclear ribonucleoprotein (hnRNP),
MREKATGRPRGFGFVAFSDPAVIDRVLQDKHHIDNRDVDVKRAMSREEQSPAGRSGTFNASRNFDSGANVRTKKIFVGGLPPALTSDEFRAYFETYGPVSDAVIMIDQTTQRPRGFGFVSFDSEDSVDLVLHKTFHDLNGKQVEVKRALPKDANPGIASGGGRGSGGAGGFPGYGGSGGSGYEGRVDSNRYMQPQNTGSGYPPYGGSGYGTGYGYGSNGVGYGGFGGYGNPAGAPYGNPSVPGAGFGSGPRSSWGAQAPSGYGNVGYGNAAPWGGSGGPGSAVMGQAGASAGYGSQGYGYGGNDSSYGTPSAYGAVGGRSGNMPNNHGGGGYADALDGSGGYGNHQGNNGQAGYGGGYGSGRQAQQQ

SEQ ID NO: 47398 - protein, 324 aa, Arabidopsis thaliana
  peptide (1)..(324): Ceres Seq. ID no. 13593564
  misc_feature (32)..(102): Pfam Name: RNA recognition motif. (a.k.a. RRM, RBD, or RNP domain) Pfam Description: RNA recognition motif. (a.k.a. RRM, RBD, or RNP
  misc_feature (1)..(324): Homolog of NCBI NO: 9758187 NR Description: RNA-binding protein-like [Arabidopsis thaliana]
  misc_feature (1)..(317): Homolog of NCBI NO: 18398061 NR Description: heterogeneous nuclear ribonucleoprotein (hnRNP),
  misc_feature (1)..(317): Homolog of NCBI NO: 30680456 NR Description: heterogeneous nuclear ribonucleoprotein (hnRNP),
  misc_feature (1)..(317): Homolog of NCBI NO: 6648193 NR Description: putative RNA-binding protein [Arabidopsis
  misc_feature (1)..(317): Homolog of NCBI NO: 15292697 NR Description: putative RNA-binding protein [Arabidopsis
  misc_feature (10)..(317): Homolog of NCBI NO: 37535274 NR Description: putative RNA-binding protein
  misc_feature (1)..(318): Homolog of NCBI NO: 37535274 NR Description: putative RNA-binding protein
  misc_feature (1)..(322): Homolog of NCBI NO: 7439958 NR Description: probable ribonucleoprotein - Arabidopsis thaliana
  misc_feature (1)..(322): Homolog of NCBI NO: 22328624 NR Description: heterogeneous nuclear ribonucleoprotein (hnRNP),
  misc_feature (1)..(324): Homolog of NCBI NO: 15226106 NR Description: heterogeneous nuclear ribonucleoprotein (hnRNP),
MSREEQSPAGRSGTFNASRNFDSGANVRTKKIFVGGLPPALTSDEFRAYFETYGPVSDAVIMIDQTTQRPRGFGFVSFDSEDSVDLVLHKTFHDLNGKQVEVKRALPKDANPGIASGGGRGSGGAGGFPGYGGSGGSGYEGRVDSNRYMQPQNTGSGYPPYGGSGYGTGYGYGSNGVGYGGFGGYGNPAGAPYGNPSVPGAGFGSGPRSSWGAQAPSGYGNVGYGNAAPWGGSGGPGSAVMGQAGASAGYGSQGYGYGGNDSSYGTPSAYGAVGGRSGNMPNNHGGGGYADALDGSGGYGNHQGNNGQAGYGGGYGSGRQAQQQ

SEQ ID NO: 47399 - DNA, 738 bp, Arabidopsis thaliana; identical to SEQ ID NO: 37407
  misc_feature (1)..(738): Ceres Seq. ID no. 13592500
  misc_feature: MA Experiment ID: 108462 Result: Up-regulated in Transcription
  misc_feature: MA Experiment 108462 PARAMETER Experiment Name: At_Germinating_Seeds_cDNA_P Parameter: Age (day) Value: 2 vs. 0
  misc_feature: MA Experiment 108462 PARAMETER Experiment Name: At_Germinating_Seeds_cDNA_P Parameter: Tissue Value: Germinating Seeds
  misc_feature: MA Experiment ID: 108463 Result: Up-regulated in Transcription
  misc_feature: MA Experiment 108463 PARAMETER Experiment Name: At_Germinating_Seeds_cDNA_P Parameter: Age (day) Value: 3 vs. 0
  misc_feature: MA Experiment 108463 PARAMETER Experiment Name: At_Germinating_Seeds_cDNA_P Parameter: Tissue Value: Germinating Seeds
  misc_feature: MA Experiment ID: 108464 Result: Up-regulated in Transcription
  misc_feature: MA Experiment 108464 PARAMETER Experiment Name: At_Germinating_Seeds_cDNA_P Parameter: Age (day) Value: 4 vs. 0
  misc_feature: MA Experiment 108464 PARAMETER Experiment Name: At_Germinating_Seeds_cDNA_P Parameter: Tissue Value: Germinating Seeds
  misc_feature: MA Experiment ID: 108577 Result: Down-regulated in Transcription
  misc_feature: MA Experiment 108577 PARAMETER Experiment Name: At_42deg_Heat_cDNA_P Parameter: Temperature (deg C) Value: 42 vs. 22
  misc_feature: MA Experiment 108577 PARAMETER Experiment Name: At_42deg_Heat_cDNA_P Parameter: Timepoint (hr) Value: 6
  misc_feature: MA Experiment 108577 PARAMETER Experiment Name: At_42deg_Heat_cDNA_P Parameter: Tissue Value: Aerial
  misc_feature: MA Experiment ID: 108595 Result: Down-regulated in Transcription
  misc_feature: MA Experiment 108595 PARAMETER Experiment Name: At_Ler-pi_Ovule_cDNA_P Parameter: Plant Line Value: null
  misc_feature: MA Experiment ID: 108668 Result: Down-regulated in Transcription
  misc_feature: MA Experiment 108668 PARAMETER Experiment Name: At_2mM_SA_cDNA_P Parameter: Plant Line Value: WS
  misc_feature: MA Experiment 108668 PARAMETER Experiment Name: At_2mM_SA_cDNA_P Parameter: Timepoint (hr) Value: 6
  misc_feature: MA Experiment 108668 PARAMETER Experiment Name: At_2mM_SA_cDNA_P Parameter: Treatment Value: 2mM SA vs. No Treatment
  misc_feature: MA Experiment ID: 20000069 Result: Down-regulated in Transcription
  misc_feature: MA Experiment 20000069 PARAMETER Experiment Name: At_100uM_ABA_Mutants_cDNA_P Parameter: Plant Line Value: CS23
  misc_feature: MA Experiment 20000069 PARAMETER Experiment Name: At_100uM_ABA_Mutants_cDNA_P Parameter: Timepoint (hr) Value: 6
  misc_feature: MA Experiment 20000069 PARAMETER Experiment Name: At_100uM_ABA_Mutants_cDNA_P Parameter: Tissue Value: Aerial
  misc_feature: MA Experiment 20000069 PARAMETER Experiment Name: At_100uM_ABA_Mutants_cDNA_P Parameter: Treatment Value: 100uM ABA vs. No Treatment
  misc_feature: MA Experiment ID: 20000070 Result: Down-regulated in Transcription
  misc_feature: MA Experiment 20000070 PARAMETER Experiment Name: At_100uM_ABA_Mutants_cDNA_P Parameter: Plant Line Value: CS24
  misc_feature: MA Experiment 20000070 PARAMETER Experiment Name: At_100uM_ABA_Mutants_cDNA_P Parameter: Timepoint (hr) Value: 6
  misc_feature: MA Experiment 20000070 PARAMETER Experiment Name: At_100uM_ABA_Mutants_cDNA_P Parameter: Tissue Value: Aerial
  misc_feature: MA Experiment 20000070 PARAMETER Experiment Name: At_100uM_ABA_Mutants_cDNA_P Parameter: Treatment Value: 100uM ABA vs. No Treatment
  misc_feature: MA Experiment ID: 20000071 Result: Down-regulated in Transcription
  misc_feature: MA Experiment 20000071 PARAMETER Experiment Name: At_100uM_ABA_Mutants_cDNA_P Parameter: Plant Line Value: CS8104
  misc_feature: MA Experiment 20000071 PARAMETER Experiment Name: At_100uM_ABA_Mutants_cDNA_P Parameter: Timepoint (hr) Value: 6
  misc_feature: MA Experiment 20000071 PARAMETER Experiment Name: At_100uM_ABA_Mutants_cDNA_P Parameter: Tissue Value: Aerial
  misc_feature: MA Experiment 20000071 PARAMETER Experiment Name: At_100uM_ABA_Mutants_cDNA_P Parameter: Treatment Value: 100uM ABA vs. No Treatment
  misc_feature: MA Experiment ID: 20000072 Result: Down-regulated in Transcription
  misc_feature: MA Experiment 20000072 PARAMETER Experiment Name: At_100uM_ABA_Mutants_cDNA_P Parameter: Plant Line Value: CS8105
  misc_feature: MA Experiment 20000072 PARAMETER Experiment Name: At_100uM_ABA_Mutants_cDNA_P Parameter: Timepoint (hr) Value: 6
  misc_feature: MA Experiment 20000072 PARAMETER Experiment Name: At_100uM_ABA_Mutants_cDNA_P Parameter: Tissue Value: Aerial
  misc_feature: MA Experiment 20000072 PARAMETER Experiment Name: At_100uM_ABA_Mutants_cDNA_P Parameter: Treatment Value: 100uM ABA vs. No Treatment
  misc_feature: MA Experiment ID: 20000086 Result: Down-regulated in Transcription
  misc_feature: MA Experiment 20000086 PARAMETER Experiment Name: At_100uM_ABA_Mutants_cDNA_P Parameter: Plant Line Value: CS22
  misc_feature: MA Experiment 20000086 PARAMETER Experiment Name: At_100uM_ABA_Mutants_cDNA_P Parameter: Timepoint (hr) Value: 6
  misc_feature: MA Experiment 20000086 PARAMETER Experiment Name: At_100uM_ABA_Mutants_cDNA_P Parameter: Tissue Value: Aerial
  misc_feature: MA Experiment 20000086 PARAMETER Experiment Name: At_100uM_ABA_Mutants_cDNA_P Parameter: Treatment Value: 100uM ABA vs. No Treatment
  misc_feature: MA Experiment ID: 20000087 Result: Down-regulated in Transcription
  misc_feature: MA Experiment 20000087 PARAMETER Experiment Name: At_100uM_ABA_Mutants_cDNA_P Parameter: Plant Line Value: WS
  misc_feature: MA Experiment 20000087 PARAMETER Experiment Name: At_100uM_ABA_Mutants_cDNA_P Parameter: Timepoint (hr) Value: 6
  misc_feature: MA Experiment 20000087 PARAMETER Experiment Name: At_100uM_ABA_Mutants_cDNA_P Parameter: Tissue Value: Aerial
  misc_feature: MA Experiment 20000087 PARAMETER Experiment Name: At_100uM_ABA_Mutants_cDNA_P Parameter: Treatment Value: 100uM ABA vs. No Treatment
  misc_feature: MA Experiment ID: 20000088 Result: Down-regulated in Transcription
  misc_feature: MA Experiment 20000088 PARAMETER Experiment Name: At_100uM_ABA_Mutants_cDNA_P Parameter: Plant Line Value: Landsberg
  misc_feature: MA Experiment 20000088 PARAMETER Experiment Name: At_100uM_ABA_Mutants_cDNA_P Parameter: Timepoint (hr) Value: 6
  misc_feature: MA Experiment 20000088 PARAMETER Experiment Name: At_100uM_ABA_Mutants_cDNA_P Parameter: Tissue Value: Aerial
  misc_feature: MA Experiment 20000088 PARAMETER Experiment Name: At_100uM_ABA_Mutants_cDNA_P Parameter: Treatment Value: 100uM ABA vs. No Treatment
  misc_feature: MA Experiment ID: 20000090 Result: Down-regulated in Transcription
  misc_feature: MA Experiment ID: 20000111 Result: Down-regulated in Transcription
  misc_feature: MA Experiment 20000111 PARAMETER Experiment Name: At_42deg_Heat_cDNA_P Parameter: Temperature (deg C) Value: 42 vs. 22
  misc_feature: MA Experiment 20000111 PARAMETER Experiment Name: At_42deg_Heat_cDNA_P Parameter: Timepoint (hr) Value: 6
  misc_feature: MA Experiment 20000111 PARAMETER Experiment Name: At_42deg_Heat_cDNA_P Parameter: Tissue Value: Aerial
  misc_feature: MA Experiment ID: 20000117 Result: Down-regulated in Transcription
  misc_feature: MA Experiment 20000117 PARAMETER Experiment Name: At_100uM_ABA_Mutants_cDNA_P Parameter: Plant Line Value: Columbia
  misc_feature: MA Experiment 20000117 PARAMETER Experiment Name: At_100uM_ABA_Mutants_cDNA_P Parameter: Timepoint (hr) Value: 6
  misc_feature: MA Experiment 20000117 PARAMETER Experiment Name: At_100uM_ABA_Mutants_cDNA_P Parameter: Tissue Value: Aerial
  misc_feature: MA Experiment 20000117 PARAMETER Experiment Name: At_100uM_ABA_Mutants_cDNA_P Parameter: Treatment Value: 100uM ABA vs. No Treatment
  misc_feature: MA Experiment ID: 20000173 Result: Down-regulated in Transcription
  misc_feature: MA Experiment 20000173 PARAMETER Experiment Name: At_42deg_Heat_P Parameter: Age (day) Value: 14
  misc_feature: MA Experiment 20000173 PARAMETER Experiment Name: At_42deg_Heat_P Parameter: Organism Value: A. thaliana
  misc_feature: MA Experiment 20000173 PARAMETER Experiment Name: At_42deg_Heat_P Parameter: Plant Line Value: WS
  misc_feature: MA Experiment 20000173 PARAMETER Experiment Name: At_42deg_Heat_P Parameter: Temperature (deg C) Value: 42 vs. 22
  misc_feature: MA Experiment 20000173 PARAMETER Experiment Name: At_42deg_Heat_P Parameter: Timepoint (hr) Value: 6
  misc_feature: MA Experiment 20000173 PARAMETER Experiment Name: At_42deg_Heat_P Parameter: Tissue Value: Aerial
  misc_feature: MA Experiment ID: 20000182 Result: Down-regulated in Transcription
  misc_feature: MA Experiment 20000182 PARAMETER Experiment Name: At_2mM_SA_P Parameter: Age (day) Value: 14
  misc_feature: MA Experiment 20000182 PARAMETER Experiment Name: At_2mM_SA_P Parameter: Organism Value: A. thaliana
  misc_feature: MA Experiment 20000182 PARAMETER Experiment Name: At_2mM_SA_P Parameter: Plant Line Value: WS
  misc_feature: MA Experiment 20000182 PARAMETER Experiment Name: At_2mM_SA_P Parameter: Timepoint (hr) Value: 6
  misc_feature: MA Experiment 20000182 PARAMETER Experiment Name: At_2mM_SA_P Parameter: Tissue Value: Aerial
  misc_feature: MA Experiment 20000182 PARAMETER Experiment Name: At_2mM_SA_P Parameter: Treatment Value: 2mM SA vs. No Treatment
  misc_feature: MA Experiment ID: 20000185 Result: Down-regulated in Transcription
  misc_feature: MA Experiment 20000185 PARAMETER Experiment Name: At_Roots__P Parameter: Age (day) Value: 7 vs. 21
  misc_feature: MA Experiment 20000185 PARAMETER Experiment Name: At_Roots__P Parameter: Organism Value: A. thaliana
  misc_feature: MA Experiment 20000185 PARAMETER Experiment Name: At_Roots__P Parameter: Tissue Value: Roots vs. Whole Plant
  misc_feature: MA Experiment ID: 20000264 Result: Down-regulated in Transcription
  misc_feature: MA Experiment 20000264 PARAMETER Experiment Name: At_Open_Flower_P Parameter: Age (day) Value: 21
  misc_feature: MA Experiment 20000264 PARAMETER Experiment Name: At_Open_Flower_P Parameter: Plant Line Value: WS
  misc_feature: MA Experiment 20000264 PARAMETER Experiment Name: At_Open_Flower_P Parameter: Tissue Value: Open Flower vs. Whole Plant
  misc_feature: MA Experiment ID: 20000286 Result: Down-regulated in Transcription
  misc_feature: MA Experiment 20000286 PARAMETER Experiment Name: At_Open_Flower_P Parameter: Age (day) Value: 21
  misc_feature: MA Experiment 20000286 PARAMETER Experiment Name: At_Open_Flower_P Parameter: Plant Line Value: WS
  misc_feature: MA Experiment 20000286 PARAMETER Experiment Name: At_Open_Flower_P Parameter: Tissue Value: Half Open vs. Whole Plant
  misc_feature: MA Experiment ID: 20000436 Result: Down-regulated in Transcription
  misc_feature: MA Experiment 20000436 PARAMETER Experiment Name: At_Drought_P Parameter: Age (day) Value: 7
  misc_feature: MA Experiment 20000436 PARAMETER Experiment Name: At_Drought_P Parameter: Organism Value: A. thaliana
  misc_feature: MA Experiment 20000436 PARAMETER Experiment Name: At_Drought_P Parameter: Plant Line Value: WS
  misc_feature: MA Experiment 20000436 PARAMETER Experiment Name: At_Drought_P Parameter: Timepoint (hr) Value: 12
  misc_feature: MA Experiment 20000436 PARAMETER Experiment Name: At_Drought_P Parameter: Tissue Value: Whole Plant
  misc_feature: MA Experiment 20000436 PARAMETER Experiment Name: At_Drought_P Parameter: Treatment Value: Drought vs. No Drought
  misc_feature: MA Experiment ID: 20000438 Result: Up-regulated in Transcription
  misc_feature: MA Experiment 20000438 PARAMETER Experiment Name: At_Shoots__P Parameter: Age (day) Value: 14
  misc_feature: MA Experiment 20000438 PARAMETER Experiment Name: At_Shoots__P Parameter: Tissue Value: Shoots vs. Whole Plant
  misc_feature: MA Experiment ID: 20000439 Result: Down-regulated in Transcription
  misc_feature: MA Experiment 20000439 PARAMETER Experiment Name: At_Roots__P Parameter: Age (day) Value: 14 vs. 21
  misc_feature: MA Experiment 20000439 PARAMETER Experiment Name: At_Roots__P Parameter: Organism Value: A. thaliana
  misc_feature: MA Experiment 20000439 PARAMETER Experiment Name: At_Roots__P Parameter: Tissue Value: Roots vs. Whole Plant
  misc_feature: MA Experiment ID: 20000460 Result: Down-regulated in Transcription
  misc_feature: MA Experiment 20000460 PARAMETER Experiment Name: At_10percent_PEG_P Parameter: Age (day) Value: 12
  misc_feature: MA Experiment 20000460 PARAMETER Experiment Name: At_10percent_PEG_P Parameter: Organism Value: A. thaliana
  misc_feature: MA Experiment 20000460 PARAMETER Experiment Name: At_10percent_PEG_P Parameter: Plant Line Value: WS
  misc_feature: MA Experiment 20000460 PARAMETER Experiment Name: At_10percent_PEG_P Parameter: Timepoint (day) Value: 12
  misc_feature: MA Experiment 20000460 PARAMETER Experiment Name: At_10percent_PEG_P Parameter: Tissue Value: Whole Plant
  misc_feature: MA Experiment 20000460 PARAMETER Experiment Name: At_10percent_PEG_P Parameter: Treatment Value: 10percent PEG vs. No Treatment
  misc_feature: MA Experiment ID: 20000495 Result: Down-regulated in Transcription
  misc_feature: MA Experiment 20000495 PARAMETER Experiment Name: At_Guard_Cells_P Parameter: Harvest Date Value: 8/2/2002
  misc_feature: MA Experiment 20000495 PARAMETER Experiment Name: At_Guard_Cells_P Parameter: Organism Value: A. thaliana
  misc_feature: MA Experiment 20000495 PARAMETER Experiment Name: At_Guard_Cells_P Parameter: Tissue Value: Guard Cells vs. Leaves
  misc_feature: MA Experiment ID: 20000496 Result: Down-regulated in Transcription
  misc_feature: MA Experiment 20000496 PARAMETER Experiment Name: At_Guard_Cells_P Parameter: Harvest Date Value: 7/19/2002
  misc_feature: MA Experiment 20000496 PARAMETER Experiment Name: At_Guard_Cells_P Parameter: Organism Value: Canola
  misc_feature: MA Experiment 20000496 PARAMETER Experiment Name: At_Guard_Cells_P Parameter: Tissue Value: Guard Cells vs. Leaves
  misc_feature: MA Experiment ID: 20000527 Result: Down-regulated in Transcription
  misc_feature: MA Experiment 20000527 PARAMETER Experiment Name: At_10percent_PEG_P Parameter: Age (day) Value: 20
  misc_feature: MA Experiment 20000527 PARAMETER Experiment Name: At_10percent_PEG_P Parameter: Organism Value: A. thaliana
  misc_feature: MA Experiment 20000527 PARAMETER Experiment Name: At_10percent_PEG_P Parameter: Plant Line Value: WS
  misc_feature: MA Experiment 20000527 PARAMETER Experiment Name: At_10percent_PEG_P Parameter: Timepoint (day) Value: 20
  misc_feature: MA Experiment 20000527 PARAMETER Experiment Name: At_10percent_PEG_P Parameter: Tissue Value: Whole Plant
  misc_feature: MA Experiment 20000527 PARAMETER Experiment Name: At_10percent_PEG_P Parameter: Treatment Value: 10percent PEG vs. No Treatment
  misc_feature: MA Experiment ID: 20000794 Result: Down-regulated in Transcription
  misc_feature: MA Experiment 20000794 PARAMETER Experiment Name: At_Petals_P Parameter: Age (day) Value: 23-25 days
  misc_feature: MA Experiment 20000794 PARAMETER Experiment Name: At_Petals_P Parameter: Plant Line Value: WS
  misc_feature: MA Experiment 20000794 PARAMETER Experiment Name: At_Petals_P Parameter: Tissue Value: Petals vs. Whole plant
  misc_feature: MA Experiment ID: 20001248 Result: Down-regulated in Transcription
  misc_feature: MA Experiment 20001248 PARAMETER Experiment Name: At_Far-red-induction_P Parameter: Age (day) Value: 7
  misc_feature: MA Experiment 20001248 PARAMETER Experiment Name: At_Far-red-induction_P Parameter: Light Value: Far-red vs. White
  misc_feature: MA Experiment 20001248 PARAMETER Experiment Name: At_Far-red-induction_P Parameter: Organism Value: A. thaliana
  misc_feature: MA Experiment 20001248 PARAMETER Experiment Name: At_Far-red-induction_P Parameter: Plant Line Value: Columbia
  misc_feature: MA Experiment 20001248 PARAMETER Experiment Name: At_Far-red-induction_P Parameter: Timepoint (hr) Value: 4
  misc_feature: MA Experiment 20001248 PARAMETER Experiment Name: At_Far-red-induction_P Parameter: Tissue Value: Whole Plant
  misc_feature: MA Experiment ID: 20001503 Result: Down-regulated in Transcription
  misc_feature: MA Experiment 20001503 PARAMETER Experiment Name: At_Far-red-enriched_P Parameter: Age (day) Value: 7
  misc_feature: MA Experiment 20001503 PARAMETER Experiment Name: At_Far-red-enriched_P Parameter: Light Value: Far-red enriched vs. White
  misc_feature: MA Experiment 20001503 PARAMETER Experiment Name: At_Far-red-enriched_P Parameter: Organism Value: A. thaliana
  misc_feature: MA Experiment 20001503 PARAMETER Experiment Name: At_Far-red-enriched_P Parameter: Plant Line Value: Columbia
  misc_feature: MA Experiment 20001503 PARAMETER Experiment Name: At_Far-red-enriched_P Parameter: Timepoint (day) Value: 3
  misc_feature: MA Experiment 20001503 PARAMETER Experiment Name: At_Far-red-enriched_P Parameter: Tissue Value: Whole Plant
  misc_feature: MA Experiment ID: 20001556 Result: Down-regulated in Transcription
  misc_feature: MA Experiment 20001556 PARAMETER Experiment Name: At_Drought_Soil_Dry_P Parameter: Age (day) Value: 26
  misc_feature: MA Experiment 20001556 PARAMETER Experiment Name: At_Drought_Soil_Dry_P Parameter: Organism Value: A. thaliana
  misc_feature: MA Experiment 20001556 PARAMETER Experiment Name: At_Drought_Soil_Dry_P Parameter: Plant Line Value: WS
  misc_feature: MA Experiment 20001556 PARAMETER Experiment Name: At_Drought_Soil_Dry_P Parameter: Post Timepoint (hr) Value: None
  misc_feature: MA Experiment 20001556 PARAMETER Experiment Name: At_Drought_Soil_Dry_P Parameter: Post-Treatment Value: None
  misc_feature: MA Experiment 20001556 PARAMETER Experiment Name: At_Drought_Soil_Dry_P Parameter: Timepoint (day) Value: 12
  misc_feature: MA Experiment 20001556 PARAMETER Experiment Name: At_Drought_Soil_Dry_P Parameter: Treatment Value: Drought vs. No Drought
  misc_feature: MA Experiment ID: 20001557 Result: Down-regulated in Transcription
  misc_feature: MA Experiment 20001557 PARAMETER Experiment Name: At_Drought_Soil_Dry_P Parameter: Age (day) Value: 27
  misc_feature: MA Experiment 20001557 PARAMETER Experiment Name: At_Drought_Soil_Dry_P Parameter: Organism Value: A. thaliana
  misc_feature: MA Experiment 20001557 PARAMETER Experiment Name: At_Drought_Soil_Dry_P Parameter: Plant Line Value: WS
  misc_feature: MA Experiment 20001557 PARAMETER Experiment Name: At_Drought_Soil_Dry_P Parameter: Post Timepoint (hr) Value: 3
  misc_feature: MA Experiment 20001557 PARAMETER Experiment Name: At_Drought_Soil_Dry_P Parameter: Post-Treatment Value: Re-Water vs. No Drought
  misc_feature: MA Experiment 20001557 PARAMETER Experiment Name: At_Drought_Soil_Dry_P Parameter: Timepoint (day) Value: 13
  misc_feature: MA Experiment 20001557 PARAMETER Experiment Name: At_Drought_Soil_Dry_P Parameter: Treatment Value: Drought vs. No Drought
  misc_feature: MA Experiment ID: 20001558 Result: Down-regulated in Transcription
  misc_feature: MA Experiment 20001558 PARAMETER Experiment Name: At_Drought_Soil_Dry_P Parameter: Age (day) Value: 27
  misc_feature: MA Experiment 20001558 PARAMETER Experiment Name: At_Drought_Soil_Dry_P Parameter: Organism Value: A. thaliana
  misc_feature: MA Experiment 20001558 PARAMETER Experiment Name: At_Drought_Soil_Dry_P Parameter: Plant Line Value: WS
  misc_feature: MA Experiment 20001558 PARAMETER Experiment Name: At_Drought_Soil_Dry_P Parameter: Post Timepoint (hr) Value: 6
  misc_feature: MA Experiment 20001558 PARAMETER Experiment Name: At_Drought_Soil_Dry_P Parameter: Post-Treatment Value: Re-Water vs. No Drought
  misc_feature: MA Experiment 20001558 PARAMETER Experiment Name: At_Drought_Soil_Dry_P Parameter: Timepoint (day) Value: 13
  misc_feature: MA Experiment 20001558 PARAMETER Experiment Name: At_Drought_Soil_Dry_P Parameter: Treatment Value: Drought vs. No Drought
  misc_feature: MA Experiment ID: 20001559 Result: Down-regulated in Transcription
  misc_feature: MA Experiment 20001559 PARAMETER Experiment Name: At_Drought_Soil_Dry_P Parameter: Age (day) Value: 28
  misc_feature: MA Experiment 20001559 PARAMETER Experiment Name: At_Drought_Soil_Dry_P Parameter: Organism Value: A. thaliana
  misc_feature: MA Experiment 20001559 PARAMETER Experiment Name: At_Drought_Soil_Dry_P Parameter: Plant Line Value: WS
  misc_feature: MA Experiment 20001559 PARAMETER Experiment Name: At_Drought_Soil_Dry_P Parameter: Post Timepoint (hr) Value: 29
  misc_feature: MA Experiment 20001559 PARAMETER Experiment Name: At_Drought_Soil_Dry_P Parameter: Post-Treatment Value: Re-Water vs. No Drought
  misc_feature: MA Experiment 20001559 PARAMETER Experiment Name: At_Drought_Soil_Dry_P Parameter: Timepoint (day) Value: 14
  misc_feature: MA Experiment 20001559 PARAMETER Experiment Name: At_Drought_Soil_Dry_P Parameter: Treatment Value: Drought vs. No Drought
  misc_feature: MA Experiment ID: 20001560 Result: Down-regulated in Transcription
  misc_feature: MA Experiment 20001560 PARAMETER Experiment Name: At_Drought_Soil_Dry_P Parameter: Age (day) Value: 28
  misc_feature: MA Experiment 20001560 PARAMETER Experiment Name: At_Drought_Soil_Dry_P Parameter: Organism Value: A. thaliana
  misc_feature: MA Experiment 20001560 PARAMETER Experiment Name: At_Drought_Soil_Dry_P Parameter: Plant Line Value: WS
  misc_feature: MA Experiment 20001560 PARAMETER Experiment Name: At_Drought_Soil_Dry_P Parameter: Post Timepoint (hr) Value: None
  misc_feature: MA Experiment 20001560 PARAMETER Experiment Name: At_Drought_Soil_Dry_P Parameter: Post-Treatment Value: None
  misc_feature: MA Experiment 20001560 PARAMETER Experiment Name: At_Drought_Soil_Dry_P Parameter: Timepoint (day) Value: 14
  misc_feature: MA Experiment 20001560 PARAMETER Experiment Name: At_Drought_Soil_Dry_P Parameter: Treatment Value: Drought vs. No Drought
  misc_feature: MA Experiment ID: 20001756 Result: Down-regulated in Transcription
  misc_feature: MA Experiment 20001756 PARAMETER Experiment Name: At_50mM_NH4NO3_L-to-H_P Parameter: Timepoint (hr) Value: 4
  misc_feature: MA Experiment 20001756 PARAMETER Experiment Name: At_50mM_NH4NO3_L-to-H_P Parameter: Tissue Value: Leaf
  misc_feature: MA Experiment 20001756 PARAMETER Experiment Name: At_50mM_NH4NO3_L-to-H_P Parameter: Treatment Value: 50mM NH4NO3 vs 100mM Mannitol
  misc_feature: MA Experiment ID: 20001757 Result: Up-regulated in Transcription
  misc_feature: MA Experiment 20001757 PARAMETER Experiment Name: At_50mM_NH4NO3_L-to-H_P Parameter: Timepoint (hr) Value: 6
  misc_feature: MA Experiment 20001757 PARAMETER Experiment Name: At_50mM_NH4NO3_L-to-H_P Parameter: Tissue Value: Leaf
  misc_feature: MA Experiment 20001757 PARAMETER Experiment Name: At_50mM_NH4NO3_L-to-H_P Parameter: Treatment Value: 50mM NH4NO3 vs 100mM Mannitol
  misc_feature: MA Experiment ID: 20001761 Result: Up-regulated in Transcription
  misc_feature: MA Experiment 20001761 PARAMETER Experiment Name: At_50mM_NH4NO3_L-to-H_P Parameter: Timepoint (hr) Value: 4
  misc_feature: MA Experiment 20001761 PARAMETER Experiment Name: At_50mM_NH4NO3_L-to-H_P Parameter: Tissue Value: Siliques
  misc_feature: MA Experiment 20001761 PARAMETER Experiment Name: At_50mM_NH4NO3_L-to-H_P Parameter: Treatment Value: 50mM NH4NO3 vs 100mM Mannitol
  misc_feature: MA Experiment ID: 20001903 Result: Up-regulated in Transcription
  misc_feature: MA Experiment 20001903 PARAMETER Experiment Name: At_Drought_Reproduction_P Parameter: Age (day) Value: 35
  misc_feature: MA Experiment 20001903 PARAMETER Experiment Name: At_Drought_Reproduction_P Parameter: Organism Value: A. thaliana
  misc_feature: MA Experiment 20001903 PARAMETER Experiment Name: At_Drought_Reproduction_P Parameter: Plant Line Value: WS
  misc_feature: MA Experiment 20001903 PARAMETER Experiment Name: At_Drought_Reproduction_P Parameter: Timepoint (day) Value: 5
  misc_feature: MA Experiment 20001903 PARAMETER Experiment Name: At_Drought_Reproduction_P Parameter: Tissue Value: Rosettes
  misc_feature: MA Experiment 20001903 PARAMETER Experiment Name: At_Drought_Reproduction_P Parameter: Treatment Value: Drought vs. No Drought
  misc_feature: MA Experiment ID: 20001904 Result: Down-regulated in Transcription
  misc_feature: MA Experiment 20001904 PARAMETER Experiment Name: At_Drought_Reproduction_P Parameter: Age (day) Value: 37
  misc_feature: MA Experiment 20001904 PARAMETER Experiment Name: At_Drought_Reproduction_P Parameter: Organism Value: A. thaliana
  misc_feature: MA Experiment 20001904 PARAMETER Experiment Name: At_Drought_Reproduction_P Parameter: Plant Line Value: WS
  misc_feature: MA Experiment 20001904 PARAMETER Experiment Name: At_Drought_Reproduction_P Parameter: Timepoint (day) Value: 7
  misc_feature: MA Experiment 20001904 PARAMETER Experiment Name: At_Drought_Reproduction_P Parameter: Tissue Value: Rosettes
  misc_feature: MA Experiment 20001904 PARAMETER Experiment Name: At_Drought_Reproduction_P Parameter: Treatment Value: Drought vs. No Drought
  misc_feature: MA Experiment ID: 20001905 Result: Down-regulated in Transcription
  misc_feature: MA Experiment 20001905 PARAMETER Experiment Name: At_Drought_Reproduction_P Parameter: Age (day) Value: 40
  misc_feature: MA Experiment 20001905 PARAMETER Experiment Name: At_Drought_Reproduction_P Parameter: Organism Value: A. thaliana
  misc_feature: MA Experiment 20001905 PARAMETER Experiment Name: At_Drought_Reproduction_P Parameter: Plant Line Value: WS
  misc_feature: MA Experiment 20001905 PARAMETER Experiment Name: At_Drought_Reproduction_P Parameter: Timepoint (day) Value: 10
  misc_feature: MA Experiment 20001905 PARAMETER Experiment Name: At_Drought_Reproduction_P Parameter: Tissue Value: Rosettes
  misc_feature: MA Experiment 20001905 PARAMETER Experiment Name: At_Drought_Reproduction_P Parameter: Treatment Value: Drought vs. No Drought
  misc_feature: MA Experiment ID: 20001906 Result: Down-regulated in Transcription
  misc_feature: MA Experiment 20001906 PARAMETER Experiment Name: At_Drought_Reproduction_P Parameter: Age (day) Value: 35
  misc_feature: MA Experiment 20001906 PARAMETER Experiment Name: At_Drought_Reproduction_P Parameter: Organism Value: A. thaliana
  misc_feature: MA Experiment 20001906 PARAMETER Experiment Name: At_Drought_Reproduction_P Parameter: Plant Line Value: WS
  misc_feature: MA Experiment 20001906 PARAMETER Experiment Name: At_Drought_Reproduction_P Parameter: Timepoint (day) Value: 5
  misc_feature: MA Experiment 20001906 PARAMETER Experiment Name: At_Drought_Reproduction_P Parameter: Tissue Value: Siliques
  misc_feature: MA Experiment 20001906 PARAMETER Experiment Name: At_Drought_Reproduction_P Parameter: Treatment Value: Drought vs. No Drought
  misc_feature: MA Experiment ID: 20001908 Result: Down-regulated in Transcription
  misc_feature: MA Experiment 20001908 PARAMETER Experiment Name: At_Drought_Reproduction_P Parameter: Age (day) Value: 40
  misc_feature: MA Experiment 20001908 PARAMETER Experiment Name: At_Drought_Reproduction_P Parameter: Organism Value: A. thaliana
  misc_feature: MA Experiment 20001908 PARAMETER Experiment Name: At_Drought_Reproduction_P Parameter: Plant Line Value: WS
  misc_feature: MA Experiment 20001908 PARAMETER Experiment Name: At_Drought_Reproduction_P Parameter: Timepoint (day) Value: 10
  misc_feature: MA Experiment 20001908 PARAMETER Experiment Name: At_Drought_Reproduction_P Parameter: Tissue Value: Siliques
  misc_feature: MA Experiment 20001908 PARAMETER Experiment Name: At_Drought_Reproduction_P Parameter: Treatment Value: Drought vs. No Drought
  misc_feature: MA Experiment ID: 20001910 Result: Down-regulated in Transcription
  misc_feature: MA Experiment 20001910 PARAMETER Experiment Name: At_Drought_Reproduction_P Parameter: Age (day) Value: 37
  misc_feature: MA Experiment 20001910 PARAMETER Experiment Name: At_Drought_Reproduction_P Parameter: Organism Value: A. thaliana
  misc_feature: MA Experiment 20001910 PARAMETER Experiment Name: At_Drought_Reproduction_P Parameter: Plant Line Value: WS
  misc_feature: MA Experiment 20001910 PARAMETER Experiment Name: At_Drought_Reproduction_P Parameter: Timepoint (day) Value: 7
  misc_feature: MA Experiment 20001910 PARAMETER Experiment Name: At_Drought_Reproduction_P Parameter: Tissue Value: Flowers
  misc_feature: MA Experiment 20001910 PARAMETER Experiment Name: At_Drought_Reproduction_P Parameter: Treatment Value: Drought vs. No Drought
  misc_feature: MA Experiment ID: 20001911 Result: Down-regulated in Transcription
  misc_feature: MA Experiment 20001911 PARAMETER Experiment Name: At_Drought_Reproduction_P Parameter: Age (day) Value: 40
  misc_feature: MA Experiment 20001911 PARAMETER Experiment Name: At_Drought_Reproduction_P Parameter: Organism Value: A. thaliana
  misc_feature: MA Experiment 20001911 PARAMETER Experiment Name: At_Drought_Reproduction_P Parameter: Plant Line Value: WS
  misc_feature: MA Experiment 20001911 PARAMETER Experiment Name: At_Drought_Reproduction_P Parameter: Timepoint (day) Value: 10
  misc_feature: MA Experiment 20001911 PARAMETER Experiment Name: At_Drought_Reproduction_P Parameter: Tissue Value: Flowers
  misc_feature: MA Experiment 20001911 PARAMETER Experiment Name: At_Drought_Reproduction_P Parameter: Treatment Value: Drought vs. No Drought

SEQ ID NO: 47400 - protein, 171 aa, Arabidopsis thaliana; identical to SEQ ID NO: 37408
  peptide (1)..(171): Ceres Seq. ID no. 13592501
  misc_feature (34)..(171): Pfam Name: Photosystem I reaction centre subunit N (PSAN or PSI-N) Pfam Description: Photosystem I reaction centre subunit N (PSAN
  misc_feature (34)..(171): Pfam Name: Photosystem I reaction centre subunit N (PSAN or PSI-N) Pfam Description: Photosystem I reaction centre subunit N (PSAN
  misc_feature (34)..(171): Pfam Name: Photosystem I reaction centre subunit N (PSAN or PSI-N) Pfam Description: Photosystem I reaction centre subunit N (PSAN
  misc_feature (87)..(136): Homolog of NCBI NO: 485082 NR Description: photosystem I 9K protein - rice (strain
  misc_feature (74)..(165): Homolog of NCBI NO: 11134150 NR Description: Photosystem I reaction centre subunit N,
  misc_feature (39)..(165): Homolog of NCBI NO: 12744797 NR Description: PsaN precursor [Chlamydomonas reinhardtii]
  misc_feature (81)..(171): Homolog of NCBI NO: 3914466 NR Description: Photosystem I reaction centre subunit N,
  misc_feature (74)..(165): Homolog of NCBI NO: 11134150 NR Description: Photosystem I reaction centre subunit N,
  misc_feature (81)..(171): Homolog of NCBI NO: 3914466 NR Description: Photosystem I reaction centre subunit N,
  misc_feature (1)..(171): Homolog of NCBI NO: 28629385 NR Description: photosystem I-N subunit [Phaseolus vulgaris]
  misc_feature (1)..(171): Homolog of NCBI NO: 15237593 NR Description: photosystem I reaction center subunit PSI-N
  misc_feature (1)..(171): Homolog of NCBI NO: 28629385 NR Description: photosystem I-N subunit [Phaseolus vulgaris]
  misc_feature (30)..(171): Homolog of NCBI NO: 400879 NR Description: Photosystem I reaction centre subunit N,
  misc_feature (81)..(171): Homolog of NCBI NO: 3914466 NR Description: Photosystem I reaction centre subunit N,
  misc_feature (39)..(165): Homolog of NCBI NO: 12744797 NR Description: PsaN precursor [Chlamydomonas reinhardtii]
  misc_feature (74)..(165): Homolog of NCBI NO: 11134150 NR Description: Photosystem I reaction centre subunit N,
  misc_feature (87)..(136): Homolog of NCBI NO: 485082 NR Description: photosystem I 9K protein - rice (strain
  misc_feature (1)..(171): Homolog of NCBI NO: 15237593 NR Description: photosystem I reaction center subunit PSI-N
  misc_feature (30)..(171): Homolog of NCBI NO: 400879 NR Description: Photosystem I reaction centre subunit N,
  misc_feature (39)..(165): Homolog of NCBI NO: 12744797 NR Description: PsaN precursor [Chlamydomonas reinhardtii]
  misc_feature (87)..(136): Homolog of NCBI NO: 485082 NR Description: photosystem I 9K protein - rice (strain
  misc_feature (30)..(171): Homolog of NCBI NO: 400879 NR Description: Photosystem I reaction centre subunit N,
  misc_feature (1)..(171): Homolog of NCBI NO: 28629385 NR Description: photosystem I-N subunit [Phaseolus vulgaris]
  misc_feature (1)..(171): Homolog of NCBI NO: 15237593 NR Description: photosystem I reaction center subunit PSI-N

SEQ ID NO: 47401 - protein, 168 aa, Arabidopsis thaliana; identical to SEQ ID NO: 37409
  peptide (1)..(168): Ceres Seq. ID no. 13592502
  misc_feature (31)..(168): Pfam Name: Photosystem I reaction centre subunit N (PSAN or PSI-N) Pfam Description: Photosystem I reaction centre subunit N (PSAN
  misc_feature (31)..(168): Pfam Name: Photosystem I reaction centre subunit N (PSAN or PSI-N) Pfam Description: Photosystem I reaction centre subunit N (PSAN
  misc_feature (31)..(168): Pfam Name: Photosystem I reaction centre subunit N (PSAN or PSI-N) Pfam Description: Photosystem I reaction centre subunit N (PSAN
  misc_feature (84)..(133): Homolog of NCBI NO: 485082 NR Description: photosystem I 9K protein - rice (strain
  misc_feature (71)..(162): Homolog of NCBI NO: 11134150 NR Description: Photosystem I reaction centre subunit N,
  misc_feature (36)..(162): Homolog of NCBI NO: 12744797 NR Description: PsaN precursor [Chlamydomonas reinhardtii]
  misc_feature (78)..(168): Homolog of NCBI NO: 3914466 NR Description: Photosystem I reaction centre subunit N,
  misc_feature (71)..(162): Homolog of NCBI NO: 11134150 NR Description: Photosystem I reaction centre subunit N,
  misc_feature (78)..(168): Homolog of NCBI NO: 3914466 NR Description: Photosystem I reaction centre subunit N,
  misc_feature (1)..(168): Homolog of NCBI NO: 28629385 NR Description: photosystem I-N subunit [Phaseolus vulgaris]
  misc_feature (1)..(168): Homolog of NCBI NO: 15237593 NR Description: photosystem I reaction center subunit PSI-N
  misc_feature (1)..(168): Homolog of NCBI NO: 28629385 NR Description: photosystem I-N subunit [Phaseolus vulgaris]
  misc_feature (27)..(168): Homolog of NCBI NO: 400879 NR Description: Photosystem I reaction centre subunit N,
  misc_feature (78)..(168): Homolog of NCBI NO: 3914466 NR Description: Photosystem I reaction centre subunit N,
  misc_feature (36)..(162): Homolog of NCBI NO: 12744797 NR Description: PsaN precursor [Chlamydomonas reinhardtii]
  misc_feature (71)..(162): Homolog of NCBI NO: 11134150 NR Description: Photosystem I reaction centre subunit N,
  misc_feature (84)..(133): Homolog of NCBI NO: 485082 NR Description: photosystem I 9K protein - rice (strain
  misc_feature (1)..(168): Homolog of NCBI NO: 15237593 NR Description: photosystem I reaction center subunit PSI-N
  misc_feature (27)..(168): Homolog of NCBI NO: 400879 NR Description: Photosystem I reaction centre subunit N,
  misc_feature (36)..(162): Homolog of NCBI NO: 12744797 NR Description: PsaN precursor [Chlamydomonas reinhardtii]
  misc_feature (84)..(133): Homolog of NCBI NO: 485082 NR Description: photosystem I 9K protein - rice (strain
  misc_feature (27)..(168): Homolog of NCBI NO: 400879 NR Description: Photosystem I reaction centre subunit N,
  misc_feature (1)..(168): Homolog of NCBI NO: 28629385 NR Description: photosystem I-N subunit [Phaseolus vulgaris]
  misc_feature (1)..(168): Homolog of NCBI NO: 15237593 NR Description: photosystem I reaction center subunit PSI-N

SEQ ID NO: 47402 - protein, 130 aa, Arabidopsis thaliana; identical to SEQ ID NO: 37410
  peptide (1)..(130): Ceres Seq. ID no. 13592503
  misc_feature (1)..(130): Pfam Name: Photosystem I reaction centre subunit N (PSAN or PSI-N) Pfam Description: Photosystem I reaction centre subunit N (PSAN
  misc_feature (1)..(130): Pfam Name: Photosystem I reaction centre subunit N (PSAN or PSI-N) Pfam Description: Photosystem I reaction centre subunit N (PSAN
  misc_feature (1)..(130): Pfam Name: Photosystem I reaction centre subunit N (PSAN or PSI-N) Pfam Description: Photosystem I reaction centre subunit N (PSAN
  misc_feature (46)..(95): Homolog of NCBI NO: 485082 NR Description: photosystem I 9K protein - rice (strain
  misc_feature (33)..(124): Homolog of NCBI NO: 11134150 NR Description: Photosystem I reaction centre subunit N,
  misc_feature (1)..(124): Homolog of NCBI NO: 12744797 NR Description: PsaN precursor [Chlamydomonas reinhardtii]
  misc_feature (40)..(130): Homolog of NCBI NO: 3914466 NR Description: Photosystem I reaction centre subunit N,
  misc_feature (33)..(124): Homolog of NCBI NO: 11134150 NR Description: Photosystem I reaction centre subunit N,
  misc_feature (40)..(130): Homolog of NCBI NO: 3914466 NR Description: Photosystem I reaction centre subunit N,
  misc_feature (1)..(130): Homolog of NCBI NO: 28629385 NR Description: photosystem I-N subunit [Phaseolus vulgaris]
  misc_feature (1)..(130): Homolog of NCBI NO: 15237593 NR Description: photosystem I reaction center subunit PSI-N
  misc_feature (1)..(130): Homolog of NCBI NO: 28629385 NR Description: photosystem I-N subunit [Phaseolus vulgaris]
  misc_feature (1)..(130): Homolog of NCBI NO: 400879 NR Description: Photosystem I reaction centre subunit N,
  misc_feature (40)..(130): Homolog of NCBI NO: 3914466 NR Description: Photosystem I reaction centre subunit N,
  misc_feature (1)..(124): Homolog of NCBI NO: 12744797 NR Description: PsaN precursor [Chlamydomonas reinhardtii]
  misc_feature (33)..(124): Homolog of NCBI NO: 11134150 NR Description: Photosystem I reaction centre subunit N,
  misc_feature (46)..(95): Homolog of NCBI NO: 485082 NR Description: photosystem I 9K protein - rice (strain
  misc_feature (1)..(130): Homolog of NCBI NO: 15237593 NR Description: photosystem I reaction center subunit PSI-N
  misc_feature (1)..(130): Homolog of NCBI NO: 400879 NR Description: Photosystem I reaction centre subunit N,
  misc_feature (1)..(124): Homolog of NCBI NO: 12744797 NR Description: PsaN precursor [Chlamydomonas reinhardtii]
  misc_feature (46)..(95): Homolog of NCBI NO: 485082 NR Description: photosystem I 9K protein - rice (strain
  misc_feature (1)..(130): Homolog of NCBI NO: 400879 NR Description: Photosystem I reaction centre subunit N,
  misc_feature (1)..(130): Homolog of NCBI NO: 28629385 NR Description: photosystem I-N subunit [Phaseolus vulgaris]
  misc_feature (1)..(130): Homolog of NCBI NO: 15237593 NR Description: photosystem I reaction center subunit PSI-N

SEQ ID NO: 47403 - DNA, 1546 bp, Arabidopsis thaliana
  misc_feature (1)..(1546): Ceres Seq. ID no. 13592390
  misc_feature: MA Experiment ID: 20000171 Result: Down-regulated in Transcription
  misc_feature: MA Experiment 20000171 PARAMETER Experiment Name: At_42deg_Heat_P Parameter: Age (day) Value: 14
  misc_feature: MA Experiment 20000171 PARAMETER Experiment Name: At_42deg_Heat_P Parameter: Organism Value: A. thaliana
  misc_feature: MA Experiment 20000171 PARAMETER Experiment Name: At_42deg_Heat_P Parameter: Plant Line Value: WS
  misc_feature: MA Experiment 20000171 PARAMETER Experiment Name: At_42deg_Heat_P Parameter: Temperature (deg C) Value: 42 vs. 22
  misc_feature: MA Experiment 20000171 PARAMETER Experiment Name: At_42deg_Heat_P Parameter: Timepoint (hr) Value: 1
  misc_feature: MA Experiment 20000171 PARAMETER Experiment Name: At_42deg_Heat_P Parameter: Tissue Value: Aerial
  misc_feature: MA Experiment ID: 20000173 Result: Down-regulated in Transcription
  misc_feature: MA Experiment 20000173 PARAMETER Experiment Name: At_42deg_Heat_P Parameter: Age (day) Value: 14
  misc_feature: MA Experiment 20000173 PARAMETER Experiment Name: At_42deg_Heat_P Parameter: Organism Value: A. thaliana
  misc_feature: MA Experiment 20000173 PARAMETER Experiment Name: At_42deg_Heat_P Parameter: Plant Line Value: WS
  misc_feature: MA Experiment 20000173 PARAMETER Experiment Name: At_42deg_Heat_P Parameter: Temperature (deg C) Value: 42 vs. 22
  misc_feature: MA Experiment 20000173 PARAMETER Experiment Name: At_42deg_Heat_P Parameter: Timepoint (hr) Value: 6
  misc_feature: MA Experiment 20000173 PARAMETER Experiment Name: At_42deg_Heat_P Parameter: Tissue Value: Aerial
ggcaaagccctctccttttgcttctggtcctctcgtcccgtttcgccgctctctataggggcaagtgagaggttactgtctctttcttctttcagacactcgagacgagaaaggctcgtatctgattttaccgccaccggaccatctgtgatagacaataatgggttacataggagctcatggtgtagcagctcttcataggtacaaatacagtggagtggatcactcttatcttgccaaatacgtcctccaacctttttggactcgatttgtcaaagtcttccctctatggatgccaccaaacatgataacgcttatggggtttatgtttctagtcacttcctccctgctaggctatatatattcacctcagttggattctcctcctccacgatgggttcacttcgcacatggtttacttctcttcttgtatcagacatttgatgcggttgatgggaagcaagcaagaaggacaaattcctctagccccctaggagagctcttcgatcatggttgtgacgcgcttgcttgtgcgtttgaagccatggcatttggaagcactgcaatgtgtggaagagatactttctggttctgggttatttcagctattccattttatggagctacatgggaacactatttcaccaacacacttattcttccggttatcaatgggcctacagaggggcttgcacttatatttgtcagccacttcttcacagccatcgtcggtgctgaatggtgggctcagcagttagggcagtcaataccattgtttagttgggtgccatttgtgaatgagattcaaacttctagagcagtgctatacatgatgatcgcttttgctgttataccaaccgttgcattcaatgtaacaaatgtctacaaagtcgttcgatcaagaaacgggagcatggtgttagcgttagctatgctgtatcccttcgttgtcttacttggaggagttttgatatgggattacttgtctccaatcaatctcatagcaacatatcctcacttagttgtactcggaactggacttgcatttggatttttagtgggaagaatgattcttgctcacttgtgtgatgagcctaaaggactaaaaacaaacatgtgcatgtcactactctatcttccctttgcacttgcaaatgcgctaaccgcaagattgaatgctggggttcctctagtcgacgaattatgggttcttcttggctactgcatattcacagtgtcattatacttgcactttgcaacatcagtcatccatgagatcactgaggcccttggaatctactgctttaggatcacgcgtaaagaagcttgaaaagaaacctttgacactgcgaatggtcgatatggaccagttggatcggtgatgtatttcttcttcttattcattgttgtctgtttgatcaggataggtgaagttatgtagaactttgtataatgttcttgtttttggatttatgcattgggcaaatacgaaaactattcttgaaatgctacgaaaatgattttagaaggagcatttttttaacct

SEQ ID NO: 47404 - protein, 389 aa, Arabidopsis thaliana
  peptide (1)..(389): Ceres Seq. ID no. 13592391
  misc_feature (86)..(223): Pfam Name: CDP-alcohol phosphatidyltransferase Pfam Description: CDP-alcohol phosphatidyltransferase
  misc_feature (14)..(387): Homolog of NCBI NO: 2425056 NR Description: LipB [Dictyostelium discoideum]
  misc_feature (1)..(389): Homolog of NCBI NO: 27762264 NR Description: aminoalcoholphosphotransferase [Brassica napus]
  misc_feature (1)..(328): Homolog of NCBI NO: 18390098 NR Description: aminoalcoholphosphotransferase [Sorghum bicolor]
  misc_feature (1)..(389): Homolog of NCBI NO: 7488701 NR Description: probable ethanolaminephosphotransferase (EC
  misc_feature (1)..(389): Homolog of NCBI NO: 3927806 NR Description: aminoalcoholphosphotransferase [Pimpinella
  misc_feature (1)..(389): Homolog of NCBI NO: 15229490 NR Description: aminoalcoholphosphotransferase, putative
  misc_feature (1)..(389): Homolog of NCBI NO: 5917787 NR Description: aminoalcoholphosphotransferase [Brassica rapa]
  misc_feature (1)..(387): Homolog of NCBI NO: 30313359 NR Description: aminoalcoholphosphotransferase [Brassica rapa
  misc_feature (1)..(389): Homolog of NCBI NO: 7488522 NR Description: ethanolaminephosphotransferase homolog - turnip
  misc_feature (1)..(389): Homolog of NCBI NO: 15222885 NR Description: aminoalcoholphosphotransferase [Arabidopsis
MGYIGAHGVAALHRYKYSGVDHSYLAKYVLQPFWTRFVKVFPLWMPPNMITLMGFMFLVTSSLLGYIYSPQLDSPPPRWVHFAHGLLLFLYQTFDAVDGKQARRTNSSSPLGELFDHGCDALACAFEAMAFGSTAMCGRDTFWFWVISAIPFYGATWEHYFTNTLILPVINGPTEGLALIFVSHFFTAIVGAEWWAQQLGQSIPLFSWVPFVNEIQTSRAVLYMMIAFAVIPTVAFNVTNVYKVVRSRNGSMVLALAMLYPFVVLLGGVLIWDYLSPINLIATYPHLVVLGTGLAFGFLVGRMILAHLCDEPKGLKTNMCMSLLYLPFALANALTARLNAGVPLVDELWVLLGYCIFTVSLYLHFATSVIHEITEALGIYCFRITRKEA

SEQ ID NO: 47405 - protein, 345 aa, Arabidopsis thaliana
  peptide (1)..(345): Ceres Seq. ID no. 13592392
  misc_feature (42)..(179): Pfam Name: CDP-alcohol phosphatidyltransferase Pfam Description: CDP-alcohol phosphatidyltransferase
  misc_feature (1)..(343): Homolog of NCBI NO: 2425056 NR Description: LipB [Dictyostelium discoideum]
  misc_feature (1)..(345): Homolog of NCBI NO: 27762264 NR Description: aminoalcoholphosphotransferase [Brassica napus]
  misc_feature (1)..(284): Homolog of NCBI NO: 18390098 NR Description: aminoalcoholphosphotransferase [Sorghum bicolor]
  misc_feature (1)..(345): Homolog of NCBI NO: 7488701 NR Description: probable ethanolaminephosphotransferase (EC
  misc_feature (1)..(345): Homolog of NCBI NO: 3927806 NR Description: aminoalcoholphosphotransferase [Pimpinella
  misc_feature (1)..(345): Homolog of NCBI NO: 15229490 NR Description: aminoalcoholphosphotransferase, putative
  misc_feature (1)..(345): Homolog of NCBI NO: 5917787 NR Description: aminoalcoholphosphotransferase [Brassica rapa]
  misc_feature (1)..(343): Homolog of NCBI NO: 30313359 NR Description: aminoalcoholphosphotransferase [Brassica rapa
  misc_feature (1)..(345): Homolog of NCBI NO: 7488522 NR Description: ethanolaminephosphotransferase homolog - turnip
  misc_feature (1)..(345): Homolog of NCBI NO: 15222885 NR Description: aminoalcoholphosphotransferase [Arabidopsis
MPPNMITLMGFMFLVTSSLLGYIYSPQLDSPPPRWVHFAHGLLLFLYQTFDAVDGKQARRTNSSSPLGELFDHGCDALACAFEAMAFGSTAMCGRDTFWFWVISAIPFYGATWEHYFTNTLILPVINGPTEGLALIFVSHFFTAIVGAEWWAQQLGQSIPLFSWVPFVNEIQTSRAVLYMMIAFAVIPTVAFNVTNVYKVVRSRNGSMVLALAMLYPFVVLLGGVLIWDYLSPINLIATYPHLVVLGTGLAFGFLVGRMILAHLCDEPKGLKTNMCMSLLYLPFALANALTARLNAGVPLVDELWVLLGYCIFTVSLYLHFATSVIHEITEALGIYCFRITRKEA

SEQ ID NO: 47406 - protein, 341 aa, Arabidopsis thaliana
  peptide (1)..(341): Ceres Seq. ID no. 13592393
  misc_feature (38)..(175): Pfam Name: CDP-alcohol phosphatidyltransferase Pfam Description: CDP-alcohol phosphatidyltransferase
  misc_feature (1)..(339): Homolog of NCBI NO: 2425056 NR Description: LipB [Dictyostelium discoideum]
  misc_feature (1)..(341): Homolog of NCBI NO: 27762264 NR Description: aminoalcoholphosphotransferase [Brassica napus]
  misc_feature (1)..(280): Homolog of NCBI NO: 18390098 NR Description: aminoalcoholphosphotransferase [Sorghum bicolor]
  misc_feature (1)..(341): Homolog of NCBI NO: 7488701 NR Description: probable ethanolaminephosphotransferase (EC
  misc_feature (1)..(341): Homolog of NCBI NO: 3927806 NR Description: aminoalcoholphosphotransferase [Pimpinella
  misc_feature (1)..(341): Homolog of NCBI NO: 15229490 NR Description: aminoalcoholphosphotransferase, putative
  misc_feature (1)..(341): Homolog of NCBI NO: 5917787 NR Description: aminoalcoholphosphotransferase [Brassica rapa]
  misc_feature (1)..(339): Homolog of NCBI NO: 30313359 NR Description: aminoalcoholphosphotransferase [Brassica rapa
  misc_feature (1)..(341): Homolog of NCBI NO: 7488522 NR Description: ethanolaminephosphotransferase homolog - turnip
  misc_feature (1)..(341): Homolog of NCBI NO: 15222885 NR Description: aminoalcoholphosphotransferase [Arabidopsis
MITLMGFMFLVTSSLLGYIYSPQLDSPPPRWVHFAHGLLLFLYQTFDAVDGKQARRTNSSSPLGELFDHGCDALACAFEAMAFGSTAMCGRDTFWFWVISAIPFYGATWEHYFTNTLILPVINGPTEGLALIFVSHFFTAIVGAEWWAQQLGQSIPLFSWVPFVNEIQTSRAVLYMMIAFAVIPTVAFNVTNVYKVVRSRNGSMVLALAMLYPFVVLLGGVLIWDYLSPINLIATYPHLVVLGTGLAFGFLVGRMILAHLCDEPKGLKTNMCMSLLYLPFALANALTARLNAGVPLVDELWVLLGYCIFTVSLYLHFATSVIHEITEALGIYCFRITRKEA

SEQ ID NO: 47407 - DNA, 1086 bp, Arabidopsis thaliana
  misc_feature (1)..(1086): Ceres Seq. ID no. 12606073
  misc_feature: MA Experiment ID: 20000180 Result: Down-regulated in Transcription
  misc_feature: MA Experiment 20000180 PARAMETER Experiment Name: At_Germinating_Seeds_P Parameter: Age (hr) Value: 24 vs. 0
  misc_feature: MA Experiment 20000180 PARAMETER Experiment Name: At_Germinating_Seeds_P Parameter: Tissue Value: Germinating Seeds
  misc_feature: MA Experiment ID: 20000437 Result: Down-regulated in Transcription
  misc_feature: MA Experiment 20000437 PARAMETER Experiment Name: At_Drought_P Parameter: Age (day) Value: 8
  misc_feature: MA Experiment 20000437 PARAMETER Experiment Name: At_Drought_P Parameter: Organism Value: A. thaliana
  misc_feature: MA Experiment 20000437 PARAMETER Experiment Name: At_Drought_P Parameter: Plant Line Value: WS
  misc_feature: MA Experiment 20000437 PARAMETER Experiment Name: At_Drought_P Parameter: Timepoint (hr) Value: 24
  misc_feature: MA Experiment 20000437 PARAMETER Experiment Name: At_Drought_P Parameter: Tissue Value: Whole Plant
  misc_feature: MA Experiment 20000437 PARAMETER Experiment Name: At_Drought_P Parameter: Treatment Value: Drought vs. No Drought
  misc_feature: MA Experiment ID: 20001248 Result: Up-regulated in Transcription
  misc_feature: MA Experiment 20001248 PARAMETER Experiment Name: At_Far-red-induction_P Parameter: Age (day) Value: 7
  misc_feature: MA Experiment 20001248 PARAMETER Experiment Name: At_Far-red-induction_P Parameter: Light Value: Far-red vs. White
  misc_feature: MA Experiment 20001248 PARAMETER Experiment Name: At_Far-red-induction_P Parameter: Organism Value: A. thaliana
  misc_feature: MA Experiment 20001248 PARAMETER Experiment Name: At_Far-red-induction_P Parameter: Plant Line Value: Columbia
  misc_feature: MA Experiment 20001248 PARAMETER Experiment Name: At_Far-red-induction_P Parameter: Timepoint (hr) Value: 4
  misc_feature: MA Experiment 20001248 PARAMETER Experiment Name: At_Far-red-induction_P Parameter: Tissue Value: Whole Plant
acgtctctctcttaacctaaccaatccaaagttgccgctagggtcaccggaaaacttcagagttgtgtcttctattgaattctccgggaagtattagtgatggggctttctcttgtggaacaacatttcattaaaggtgggattgctcaagatcttcgaactgatggtcggaaaagattgacttaccgtcctatctacgtcgaaaccggtgttattccgcaggctaatggttcagcgagagttagaattggtggaaccgatgtgattgctagtgtaaaggctgaaattgggaggccaagttcacttcaacccgataaaggaaaggttgcagttttcattgattgcagtccaacagctgaaccgacatttggggggagaggaggtgaggaattgtcttctgagcttgctttggctcttcaaagatgtcttctgggtggcaaaagtggagcaggagctggaataaatttatcttcgcttttaatcaaagaaggaaaagtttgctgggacctttatattgatggtcttgtcattagttcggatgggaatctattggatgccctgggtgctgccattaaggctgctttaaccaacacggccatcccaaaagtcaatgtttcagctgaagtagcagatgatgagcaaccagagattgacatcagcgacgaggaatatcttcaatttgacacttccagtgtcccggtcatagtcacgttaacaaaagtgggaacgcattacatagttgatgcaacagcagaagaggagtctcagatgagctcagctgtatctatatctgtgaatcggacaggccatatatgtgggttaaccaaacgaagcgggtctggcttagacccaagcgtcatccttgacatgatctctgttgccaagcatgtgacagagactctgatgagcaaacttgattcagagatttcagccgcagaggcctgcgaagacgaatcttgactcttgagtctcagagaatcaaagtttcaagatgaaacatgttagcaagggatcaacaatatttgtatctgtggaaaatcttatacgaagtcagaacagattaagctaatcaaaatcctttttccc

SEQ ID NO: 47408 - protein, 286 aa, Arabidopsis thaliana
  peptide (1)..(286): Ceres Seq. ID no. 12606074
  misc_feature (28)..(168): Pfam Name: 3' exoribonuclease family, domain 1 Pfam Description: 3' exoribonuclease family, domain 1
  misc_feature (1)..(275): Homolog of NCBI NO: 28573444 NR Description: CG8395-PA [Drosophila melanogaster]
  misc_feature (1)..(281): Homolog of NCBI NO: 21362905 NR Description: Exosome complex exonuclease RRP42 (Ribosomal RNA
  misc_feature (1)..(281): Homolog of NCBI NO: 30962875 NR Description: Similar to Exosome complex exonuclease RRP42 [Mus
  misc_feature (1)..(281): Homolog of NCBI NO: 28548933 NR Description: RIKEN cDNA 2610002K22 [Mus musculus]
  misc_feature (1)..(281): Homolog of NCBI NO: 34866707 NR Description: similar to Exosome complex exonuclease RRP42
  misc_feature (3)..(281): Homolog of NCBI NO: 24307981 NR Description: KIAA0116 protein [Homo sapiens]
  misc_feature (3)..(281): Homolog of NCBI NO: 473949 NR Description: KIAA0116 [Homo sapiens]
  misc_feature (1)..(286): Homolog of NCBI NO: 6466958 NR Description: hypothetical protein [Arabidopsis thaliana]
  misc_feature (1)..(286): Homolog of NCBI NO: 6648187 NR Description: putative 3' exoribonuclease [Arabidopsis thaliana]
  misc_feature (1)..(286): Homolog of NCBI NO: 18398046 NR Description: putative 3  exoribonuclease
MGLSLVEQHFIKGGIAQDLRTDGRKRLTYRPIYVETGVIPQANGSARVRIGGTDVIASVKAEIGRPSSLQPDKGKVAVFIDCSPTAEPTFGGRGGEELSSELALALQRCLLGGKSGAGAGINLSSLLIKEGKVCWDLYIDGLVISSDGNLLDALGAAIKAALTNTAIPKVNVSAEVADDEQPEIDISDEEYLQFDTSSVPVIVTLTKVGTHYIVDATAEEESQMSSAVSISVNRTGHICGLTKRSGSGLDPSVILDMISVAKHVTETLMSKLDSEISAAEACEDES

SEQ ID NO: 47409 - DNA, 1172 bp, Arabidopsis thaliana
  misc_feature (1)..(1172): Ceres Seq. ID no. 12591785
  misc_feature: MA Experiment ID: 20000437 Result: Down-regulated in Transcription
  misc_feature: MA Experiment 20000437 PARAMETER Experiment Name: At_Drought_P Parameter: Age (day) Value: 8
  misc_feature: MA Experiment 20000437 PARAMETER Experiment Name: At_Drought_P Parameter: Organism Value: A. thaliana
  misc_feature: MA Experiment 20000437 PARAMETER Experiment Name: At_Drought_P Parameter: Plant Line Value: WS
  misc_feature: MA Experiment 20000437 PARAMETER Experiment Name: At_Drought_P Parameter: Timepoint (hr) Value: 24
  misc_feature: MA Experiment 20000437 PARAMETER Experiment Name: At_Drought_P Parameter: Tissue Value: Whole Plant
  misc_feature: MA Experiment 20000437 PARAMETER Experiment Name: At_Drought_P Parameter: Treatment Value: Drought vs. No Drought
  misc_feature: MA Experiment ID: 20001451 Result: Down-regulated in Transcription
  misc_feature: MA Experiment 20001451 PARAMETER Experiment Name: At_Far-red-induction_P Parameter: Age (day) Value: 7
  misc_feature: MA Experiment 20001451 PARAMETER Experiment Name: At_Far-red-induction_P Parameter: Light Value: Far-red vs. White
  misc_feature: MA Experiment 20001451 PARAMETER Experiment Name: At_Far-red-induction_P Parameter: Organism Value: A. thaliana
  misc_feature: MA Experiment 20001451 PARAMETER Experiment Name: At_Far-red-induction_P Parameter: Plant Line Value: Columbia
  misc_feature: MA Experiment 20001451 PARAMETER Experiment Name: At_Far-red-induction_P Parameter: Timepoint (hr) Value: 24
  misc_feature: MA Experiment 20001451 PARAMETER Experiment Name: At_Far-red-induction_P Parameter: Tissue Value: Whole Plant
actgagtgctgctgatgaacgcttactctgtttctctcgacttcactaaaccttctctattcacacgcatcactctctcttctcagattcctctaaccatggccaccactgtaaacaaaacagttcgtgtcgcagctgctcaaatgacatcggtcaatgatctaatgaccaacttcgccacttgctctcgtctcgttcaagaagcagcattggctggtgcaaagctgatttgcttccctgagaacttctcttttgtgggagataaggaaggagagagtgtgaaaattgctgaaccattagatggcccagtgatggaacggtattgctctctcgccagggattcaaatatatggttgtctcttggaggttttcaagagagatttgatgatactcatttgtgtaatacacatgttgtgatcgatgatgctggaatgatccgagacacttatcagaaaatgcatttgtttgatgttgatgttcctggtggaagctcgtacaaagaaagcagctttacagttccagggacaaagattgtttccgtagacagccctgtcgggcgcttaggccttactgtatgctacgatttgaggttccctaagatatatcagcaactgagatttgaacagaaagctcaggttttactagtaccatcagctttcaccaaggtcactggggaggcacactgggagattcttcttcgagcccgagcaattgaaactcaatgttatgtcatagctgctgctcaagcaggaaagcataatgagaaaagagaaagttatggtgacacactgatcattgatccgtggggaactgtagttggaaggttacctgatcgtgtttcgaccggcattgtcgtggcagatattgatttttcattgattgactcagtgagaacaaaaatgccaatagataagcaacgagtctcaatagatctctgatgaaaccattggtgttgtgaaatgttgccaatatagttacaagcgtagaaacatatcaccttatttgaattctacattctctgtttgcttcggtgtattgtttcatcattggttaggtgtagatgatcattgagctttagacagtagcttgtcacctatacttttagttgcacgttgttctttggtagtatttgtacacaacatttaatagattataaataagtaacgttaaag

SEQ ID NO: 47410 - protein, 307 aa, Arabidopsis thaliana
  peptide (1)..(307): Ceres Seq. ID no. 12591786
  misc_feature (26)..(302): Homolog of NCBI NO: 31239531 NR Description: ENSANGP00000011219 [Anopheles gambiae]
  misc_feature (15)..(302): Homolog of NCBI NO: 18204913 NR Description: nitrilase 1 [Mus musculus]
  misc_feature (26)..(302): Homolog of NCBI NO: 3242980 NR Description: nitrilase homolog 1 [Mus musculus]
  misc_feature (21)..(307): Homolog of NCBI NO: 17556280 NR Description: Nitrilase and fragile histidine triad fusion
  misc_feature (15)..(302): Homolog of NCBI NO: 6754856 NR Description: nitrilase 1 [Mus musculus]
  misc_feature (39)..(298): Homolog of NCBI NO: 28828435 NR Description: similar to Y56A3A.13.p
  misc_feature (39)..(302): Homolog of NCBI NO: 5031947 NR Description: nitrilase 1 [Homo sapiens]
  misc_feature (39)..(302): Homolog of NCBI NO: 9367118 NR Description: Nit protein 1 [Xenopus laevis]
  misc_feature (1)..(303): Homolog of NCBI NO: 25407452 NR Description: nitrilase 1 like protein [imported] - Arabidopsis
  misc_feature (1)..(307): Homolog of NCBI NO: 18413157 NR Description: nitrilase 1 like protein
MNAYSVSLDFTKPSLFTRITLSSQIPLTMATTVNKTVRVAAAQMTSVNDLMTNFATCSRLVQEAALAGAKLICFPENFSFVGDKEGESVKIAEPLDGPVMERYCSLARDSNIWLSLGGFQERFDDTHLCNTHVVIDDAGMIRDTYQKMHLFDVDVPGGSSYKESSFTVPGTKIVSVDSPVGRLGLTVCYDLRFPKIYQQLRFEQKAQVLLVPSAFTKVTGEAHWEILLRARAIETQCYVIAAAQAGKHNEKRESYGDTLIIDPWGTVVGRLPDRVSTGIVVADIDFSLIDSVRTKMPIDKQRVSIDL

SEQ ID NO: 47411 - protein, 279 aa, Arabidopsis thaliana
  peptide (1)..(279): Ceres Seq. ID no. 12591787
  misc_feature (1)..(274): Homolog of NCBI NO: 31239531 NR Description: ENSANGP00000011219 [Anopheles gambiae]
  misc_feature (1)..(274): Homolog of NCBI NO: 18204913 NR Description: nitrilase 1 [Mus musculus]
  misc_feature (1)..(274): Homolog of NCBI NO: 3242980 NR Description: nitrilase homolog 1 [Mus musculus]
  misc_feature (1)..(279): Homolog of NCBI NO: 17556280 NR Description: Nitrilase and fragile histidine triad fusion
  misc_feature (1)..(274): Homolog of NCBI NO: 6754856 NR Description: nitrilase 1 [Mus musculus]
  misc_feature (11)..(270): Homolog of NCBI NO: 28828435 NR Description: similar to Y56A3A.13.p
  misc_feature (11)..(274): Homolog of NCBI NO: 5031947 NR Description: nitrilase 1 [Homo sapiens]
  misc_feature (11)..(274): Homolog of NCBI NO: 9367118 NR Description: Nit protein 1 [Xenopus laevis]
  misc_feature (1)..(275): Homolog of NCBI NO: 25407452 NR Description: nitrilase 1 like protein [imported] - Arabidopsis
  misc_feature (1)..(279): Homolog of NCBI NO: 18413157 NR Description: nitrilase 1 like protein
MATTVNKTVRVAAAQMTSVNDLMTNFATCSRLVQEAALAGAKLICFPENFSFVGDKEGESVKIAEPLDGPVMERYCSLARDSNIWLSLGGFQERFDDTHLCNTHVVIDDAGMIRDTYQKMHLFDVDVPGGSSYKESSFTVPGTKIVSVDSPVGRLGLTVCYDLRFPKIYQQLRFEQKAQVLLVPSAFTKVTGEAHWEILLRARAIETQCYVIAAAQAGKHNEKRESYGDTLIIDPWGTVVGRLPDRVSTGIVVADIDFSLIDSVRTKMPIDKQRVSIDL

SEQ ID NO: 47412 - protein, 264 aa, Arabidopsis thaliana
  peptide (1)..(264): Ceres Seq. ID no. 12591788
  misc_feature (1)..(259): Homolog of NCBI NO: 31239531 NR Description: ENSANGP00000011219 [Anopheles gambiae]
  misc_feature (1)..(259): Homolog of NCBI NO: 18204913 NR Description: nitrilase 1 [Mus musculus]
  misc_feature (1)..(259): Homolog of NCBI NO: 3242980 NR Description: nitrilase homolog 1 [Mus musculus]
  misc_feature (1)..(264): Homolog of NCBI NO: 17556280 NR Description: Nitrilase and fragile histidine triad fusion
  misc_feature (1)..(259): Homolog of NCBI NO: 6754856 NR Description: nitrilase 1 [Mus musculus]
  misc_feature (1)..(255): Homolog of NCBI NO: 28828435 NR Description: similar to Y56A3A.13.p
  misc_feature (1)..(259): Homolog of NCBI NO: 5031947 NR Description: nitrilase 1 [Homo sapiens]
  misc_feature (1)..(259): Homolog of NCBI NO: 9367118 NR Description: Nit protein 1 [Xenopus laevis]
  misc_feature (1)..(260): Homolog of NCBI NO: 25407452 NR Description: nitrilase 1 like protein [imported] - Arabidopsis
  misc_feature (1)..(264): Homolog of NCBI NO: 18413157 NR Description: nitrilase 1 like protein
MTSVNDLMTNFATCSRLVQEAALAGAKLICFPENFSFVGDKEGESVKIAEPLDGPVMERYCSLARDSNIWLSLGGFQERFDDTHLCNTHVVIDDAGMIRDTYQKMHLFDVDVPGGSSYKESSFTVPGTKIVSVDSPVGRLGLTVCYDLRFPKIYQQLRFEQKAQVLLVPSAFTKVTGEAHWEILLRARAIETQCYVIAAAQAGKHNEKRESYGDTLIIDPWGTVVGRLPDRVSTGIVVADIDFSLIDSVRTKMPIDKQRVSIDL

SEQ ID NO: 47413 - DNA, 2110 bp, Arabidopsis thaliana; identical to SEQ ID NO: 45579
  misc_feature (1)..(2110): Ceres Seq. ID no. 13646533
  misc_feature: MA Experiment ID: 20000166 Result: Down-regulated in Transcription
  misc_feature: MA Experiment 20000166 PARAMETER Experiment Name: At_100uM_ABA_P Parameter: Age (day) Value: 14
  misc_feature: MA Experiment 20000166 PARAMETER Experiment Name: At_100uM_ABA_P Parameter: Organism Value: A. thaliana
  misc_feature: MA Experiment 20000166 PARAMETER Experiment Name: At_100uM_ABA_P Parameter: Plant Line Value: WS
  misc_feature: MA Experiment 20000166 PARAMETER Experiment Name: At_100uM_ABA_P Parameter: Timepoint (hr) Value: 1
  misc_feature: MA Experiment 20000166 PARAMETER Experiment Name: At_100uM_ABA_P Parameter: Tissue Value: Aerial
  misc_feature: MA Experiment 20000166 PARAMETER Experiment Name: At_100uM_ABA_P Parameter: Treatment Value: 100uM ABA vs. No Treatment
  misc_feature: MA Experiment ID: 20000173 Result: Down-regulated in Transcription
  misc_feature: MA Experiment 20000173 PARAMETER Experiment Name: At_42deg_Heat_P Parameter: Age (day) Value: 14
  misc_feature: MA Experiment 20000173 PARAMETER Experiment Name: At_42deg_Heat_P Parameter: Organism Value: A. thaliana
  misc_feature: MA Experiment 20000173 PARAMETER Experiment Name: At_42deg_Heat_P Parameter: Plant Line Value: WS
  misc_feature: MA Experiment 20000173 PARAMETER Experiment Name: At_42deg_Heat_P Parameter: Temperature (deg C) Value: 42 vs. 22
  misc_feature: MA Experiment 20000173 PARAMETER Experiment Name: At_42deg_Heat_P Parameter: Timepoint (hr) Value: 6
  misc_feature: MA Experiment 20000173 PARAMETER Experiment Name: At_42deg_Heat_P Parameter: Tissue Value: Aerial
  misc_feature: MA Experiment ID: 20000179 Result: Down-regulated in Transcription
  misc_feature: MA Experiment 20000179 PARAMETER Experiment Name: At_Germinating_Seeds_P Parameter: Age (hr) Value: 6 vs. 0
  misc_feature: MA Experiment 20000179 PARAMETER Experiment Name: At_Germinating_Seeds_P Parameter: Tissue Value: Germinating Seeds
  misc_feature: MA Experiment ID: 20000184 Result: Down-regulated in Transcription
  misc_feature: MA Experiment 20000184 PARAMETER Experiment Name: At_Shoots__P Parameter: Age (day) Value: 7
  misc_feature: MA Experiment 20000184 PARAMETER Experiment Name: At_Shoots__P Parameter: Tissue Value: Shoots vs. Whole Plant
  misc_feature: MA Experiment ID: 20000185 Result: Up-regulated in Transcription
  misc_feature: MA Experiment 20000185 PARAMETER Experiment Name: At_Roots__P Parameter: Age (day) Value: 7 vs. 21
  misc_feature: MA Experiment 20000185 PARAMETER Experiment Name: At_Roots__P Parameter: Organism Value: A. thaliana
  misc_feature: MA Experiment 20000185 PARAMETER Experiment Name: At_Roots__P Parameter: Tissue Value: Roots vs. Whole Plant
  misc_feature: MA Experiment ID: 20000227 Result: Down-regulated in Transcription
  misc_feature: MA Experiment 20000227 PARAMETER Experiment Name: At_Root-Tips-vs-Tops_P Parameter: Tissue Value: Root Tips vs. Root Tops
  misc_feature: MA Experiment ID: 20000234 Result: Down-regulated in Transcription
  misc_feature: MA Experiment 20000234 PARAMETER Experiment Name: At_Siliques_P Parameter: Age (day) Value: 21
  misc_feature: MA Experiment 20000234 PARAMETER Experiment Name: At_Siliques_P Parameter: Organism Value: A. thaliana
  misc_feature: MA Experiment 20000234 PARAMETER Experiment Name: At_Siliques_P Parameter: Plant Line Value: WS
  misc_feature: MA Experiment 20000234 PARAMETER Experiment Name: At_Siliques_P Parameter: Tissue Value: Less Than 5mm Siliques vs. Whole Plant
  misc_feature: MA Experiment ID: 20000265 Result: Down-regulated in Transcription
  misc_feature: MA Experiment 20000265 PARAMETER Experiment Name: At_Open_Flower_P Parameter: Age (day) Value: 21
  misc_feature: MA Experiment 20000265 PARAMETER Experiment Name: At_Open_Flower_P Parameter: Plant Line Value: WS
  misc_feature: MA Experiment 20000265 PARAMETER Experiment Name: At_Open_Flower_P Parameter: Tissue Value: Closed Flower vs. Whole Plant
  misc_feature: MA Experiment ID: 20000575 Result: Down-regulated in Transcription
  misc_feature: MA Experiment 20000575 PARAMETER Experiment Name: At_100uM_ABA_Mutants__P Parameter: Organism Value: A. thaliana
  misc_feature: MA Experiment 20000575 PARAMETER Experiment Name: At_100uM_ABA_Mutants__P Parameter: Plant Line Value: CS22
  misc_feature: MA Experiment 20000575 PARAMETER Experiment Name: At_100uM_ABA_Mutants__P Parameter: Timepoint (hr) Value: 6
  misc_feature: MA Experiment 20000575 PARAMETER Experiment Name: At_100uM_ABA_Mutants__P Parameter: Tissue Value: Whole Plant
  misc_feature: MA Experiment 20000575 PARAMETER Experiment Name: At_100uM_ABA_Mutants__P Parameter: Treatment Value: 1uM ABA vs. No Treatment
  misc_feature: MA Experiment ID: 20000576 Result: Down-regulated in Transcription
  misc_feature: MA Experiment 20000576 PARAMETER Experiment Name: At_100uM_ABA_Mutants__P Parameter: Organism Value: A. thaliana
  misc_feature: MA Experiment 20000576 PARAMETER Experiment Name: At_100uM_ABA_Mutants__P Parameter: Plant Line Value: CS23
  misc_feature: MA Experiment 20000576 PARAMETER Experiment Name: At_100uM_ABA_Mutants__P Parameter: Timepoint (hr) Value: 6
  misc_feature: MA Experiment 20000576 PARAMETER Experiment Name: At_100uM_ABA_Mutants__P Parameter: Tissue Value: Whole Plant
  misc_feature: MA Experiment 20000576 PARAMETER Experiment Name: At_100uM_ABA_Mutants__P Parameter: Treatment Value: 1uM ABA vs. No Treatment
  misc_feature: MA Experiment ID: 20001451 Result: Down-regulated in Transcription
  misc_feature: MA Experiment 20001451 PARAMETER Experiment Name: At_Far-red-induction_P Parameter: Age (day) Value: 7
  misc_feature: MA Experiment 20001451 PARAMETER Experiment Name: At_Far-red-induction_P Parameter: Light Value: Far-red vs. White
  misc_feature: MA Experiment 20001451 PARAMETER Experiment Name: At_Far-red-induction_P Parameter: Organism Value: A. thaliana
  misc_feature: MA Experiment 20001451 PARAMETER Experiment Name: At_Far-red-induction_P Parameter: Plant Line Value: Columbia
  misc_feature: MA Experiment 20001451 PARAMETER Experiment Name: At_Far-red-induction_P Parameter: Timepoint (hr) Value: 24
  misc_feature: MA Experiment 20001451 PARAMETER Experiment Name: At_Far-red-induction_P Parameter: Tissue Value: Whole Plant
  misc_feature: MA Experiment ID: 20001560 Result: Down-regulated in Transcription
  misc_feature: MA Experiment 20001560 PARAMETER Experiment Name: At_Drought_Soil_Dry_P Parameter: Age (day) Value: 28
  misc_feature: MA Experiment 20001560 PARAMETER Experiment Name: At_Drought_Soil_Dry_P Parameter: Organism Value: A. thaliana
  misc_feature: MA Experiment 20001560 PARAMETER Experiment Name: At_Drought_Soil_Dry_P Parameter: Plant Line Value: WS
  misc_feature: MA Experiment 20001560 PARAMETER Experiment Name: At_Drought_Soil_Dry_P Parameter: Post Timepoint (hr) Value: None
  misc_feature: MA Experiment 20001560 PARAMETER Experiment Name: At_Drought_Soil_Dry_P Parameter: Post-Treatment Value: None
  misc_feature: MA Experiment 20001560 PARAMETER Experiment Name: At_Drought_Soil_Dry_P Parameter: Timepoint (day) Value: 14
  misc_feature: MA Experiment 20001560 PARAMETER Experiment Name: At_Drought_Soil_Dry_P Parameter: Treatment Value: Drought vs. No Drought

SEQ ID NO: 47414 - protein, 588 aa, Arabidopsis thaliana; identical to SEQ ID NO: 45580
  peptide (1)..(588): Ceres Seq. ID no. 13646534
  misc_feature (304)..(557): Pfam Name: Malic enzyme, NAD binding domain Pfam Description: Malic enzyme, NAD binding domain
  misc_feature (304)..(557): Pfam Name: Malic enzyme, NAD binding domain Pfam Description: Malic enzyme, NAD binding domain
  misc_feature (12)..(588): Homolog of NCBI NO: 547886 NR Description: NADP-DEPENDENT MALIC ENZYME, CHLOROPLAST
  misc_feature (1)..(588): Homolog of NCBI NO: 1708924 NR Description: NADP-DEPENDENT MALIC ENZYME (NADP-ME)
  misc_feature (15)..(588): Homolog of NCBI NO: 8118507 NR Description: NADP-dependent malic protein [Ricinus communis]
  misc_feature (15)..(588): Homolog of NCBI NO: 4239891 NR Description: NADP-malic enzyme [Aloe arborescens]
  misc_feature (21)..(588): Homolog of NCBI NO: 115420 NR Description: NADP-DEPENDENT MALIC ENZYME (NADP-ME)
  misc_feature (12)..(588): Homolog of NCBI NO: 547886 NR Description: NADP-DEPENDENT MALIC ENZYME, CHLOROPLAST
  misc_feature (15)..(588): Homolog of NCBI NO: 8118507 NR Description: NADP-dependent malic protein [Ricinus communis]
  misc_feature (21)..(588): Homolog of NCBI NO: 115420 NR Description: NADP-DEPENDENT MALIC ENZYME (NADP-ME)
  misc_feature (1)..(588): Homolog of NCBI NO: 15239146 NR Description: NADP dependent malic enzyme - like protein
  misc_feature (1)..(588): Homolog of NCBI NO: 15239517 NR Description: malate dehydrogenase - like protein [Arabidopsis
  misc_feature (10)..(588): Homolog of NCBI NO: 510876 NR Description: NADP dependent malic enzyme [Phaseolus vulgaris]
  misc_feature (21)..(588): Homolog of NCBI NO: 7427668 NR Description: malate dehydrogenase
  misc_feature (1)..(588): Homolog of NCBI NO: 7431234 NR Description: malate dehydrogenase
  misc_feature (15)..(588): Homolog of NCBI NO: 4239891 NR Description: NADP-malic enzyme [Aloe arborescens]
  misc_feature (1)..(588): Homolog of NCBI NO: 1708924 NR Description: NADP-DEPENDENT MALIC ENZYME (NADP-ME)
  misc_feature (1)..(588): Homolog of NCBI NO: 7431234 NR Description: malate dehydrogenase
  misc_feature (21)..(588): Homolog of NCBI NO: 7427668 NR Description: malate dehydrogenase
  misc_feature (10)..(588): Homolog of NCBI NO: 510876 NR Description: NADP dependent malic enzyme [Phaseolus vulgaris]
  misc_feature (1)..(588): Homolog of NCBI NO: 15239517 NR Description: malate dehydrogenase - like protein [Arabidopsis
  misc_feature (1)..(588): Homolog of NCBI NO: 15239146 NR Description: NADP dependent malic enzyme - like protein

SEQ ID NO: 47415 - protein, 536 aa, Arabidopsis thaliana; identical to SEQ ID NO: 45581
  peptide (1)..(536): Ceres Seq. ID no. 13646535
  misc_feature (252)..(505): Pfam Name: Malic enzyme, NAD binding domain Pfam Description: Malic enzyme, NAD binding domain
  misc_feature (252)..(505): Pfam Name: Malic enzyme, NAD binding domain Pfam Description: Malic enzyme, NAD binding domain
  misc_feature (1)..(536): Homolog of NCBI NO: 547886 NR Description: NADP-DEPENDENT MALIC ENZYME, CHLOROPLAST
  misc_feature (1)..(536): Homolog of NCBI NO: 1708924 NR Description: NADP-DEPENDENT MALIC ENZYME (NADP-ME)
  misc_feature (1)..(536): Homolog of NCBI NO: 8118507 NR Description: NADP-dependent malic protein [Ricinus communis]
  misc_feature (1)..(536): Homolog of NCBI NO: 4239891 NR Description: NADP-malic enzyme [Aloe arborescens]
  misc_feature (1)..(536): Homolog of NCBI NO: 115420 NR Description: NADP-DEPENDENT MALIC ENZYME (NADP-ME)
  misc_feature (1)..(536): Homolog of NCBI NO: 547886 NR Description: NADP-DEPENDENT MALIC ENZYME, CHLOROPLAST
  misc_feature (1)..(536): Homolog of NCBI NO: 8118507 NR Description: NADP-dependent malic protein [Ricinus communis]
  misc_feature (1)..(536): Homolog of NCBI NO: 115420 NR Description: NADP-DEPENDENT MALIC ENZYME (NADP-ME)
  misc_feature (1)..(536): Homolog of NCBI NO: 15239146 NR Description: NADP dependent malic enzyme - like protein
  misc_feature (1)..(536): Homolog of NCBI NO: 15239517 NR Description: malate dehydrogenase - like protein [Arabidopsis
  misc_feature (1)..(536): Homolog of NCBI NO: 510876 NR Description: NADP dependent malic enzyme [Phaseolus vulgaris]
  misc_feature (1)..(536): Homolog of NCBI NO: 7427668 NR Description: malate dehydrogenase
  misc_feature (1)..(536): Homolog of NCBI NO: 7431234 NR Description: malate dehydrogenase
  misc_feature (1)..(536): Homolog of NCBI NO: 4239891 NR Description: NADP-malic enzyme [Aloe arborescens]
  misc_feature (1)..(536): Homolog of NCBI NO: 1708924 NR Description: NADP-DEPENDENT MALIC ENZYME (NADP-ME)
  misc_feature (1)..(536): Homolog of NCBI NO: 7431234 NR Description: malate dehydrogenase
  misc_feature (1)..(536): Homolog of NCBI NO: 7427668 NR Description: malate dehydrogenase
  misc_feature (1)..(536): Homolog of NCBI NO: 510876 NR Description: NADP dependent malic enzyme [Phaseolus vulgaris]
  misc_feature (1)..(536): Homolog of NCBI NO: 15239517 NR Description: malate dehydrogenase - like protein [Arabidopsis
  misc_feature (1)..(536): Homolog of NCBI NO: 15239146 NR Description: NADP dependent malic enzyme - like protein

SEQ ID NO: 47416 - protein, 496 aa, Arabidopsis thaliana; identical to SEQ ID NO: 45582
  peptide (1)..(496): Ceres Seq. ID no. 13646536
  misc_feature (212)..(465): Pfam Name: Malic enzyme, NAD binding domain Pfam Description: Malic enzyme, NAD binding domain
  misc_feature (212)..(465): Pfam Name: Malic enzyme, NAD binding domain Pfam Description: Malic enzyme, NAD binding domain
  misc_feature (1)..(496): Homolog of NCBI NO: 547886 NR Description: NADP-DEPENDENT MALIC ENZYME, CHLOROPLAST
  misc_feature (1)..(496): Homolog of NCBI NO: 1708924 NR Description: NADP-DEPENDENT MALIC ENZYME (NADP-ME)
  misc_feature (1)..(496): Homolog of NCBI NO: 8118507 NR Description: NADP-dependent malic protein [Ricinus communis]
  misc_feature (1)..(496): Homolog of NCBI NO: 4239891 NR Description: NADP-malic enzyme [Aloe arborescens]
  misc_feature (1)..(496): Homolog of NCBI NO: 115420 NR Description: NADP-DEPENDENT MALIC ENZYME (NADP-ME)
  misc_feature (1)..(496): Homolog of NCBI NO: 547886 NR Description: NADP-DEPENDENT MALIC ENZYME, CHLOROPLAST
  misc_feature (1)..(496): Homolog of NCBI NO: 8118507 NR Description: NADP-dependent malic protein [Ricinus communis]
  misc_feature (1)..(496): Homolog of NCBI NO: 115420 NR Description: NADP-DEPENDENT MALIC ENZYME (NADP-ME)
  misc_feature (1)..(496): Homolog of NCBI NO: 15239146 NR Description: NADP dependent malic enzyme - like protein
  misc_feature (1)..(496): Homolog of NCBI NO: 15239517 NR Description: malate dehydrogenase - like protein [Arabidopsis
  misc_feature (1)..(496): Homolog of NCBI NO: 510876 NR Description: NADP dependent malic enzyme [Phaseolus vulgaris]
  misc_feature (1)..(496): Homolog of NCBI NO: 7427668 NR Description: malate dehydrogenase
  misc_feature (1)..(496): Homolog of NCBI NO: 7431234 NR Description: malate dehydrogenase
  misc_feature (1)..(496): Homolog of NCBI NO: 4239891 NR Description: NADP-malic enzyme [Aloe arborescens]
  misc_feature (1)..(496): Homolog of NCBI NO: 1708924 NR Description: NADP-DEPENDENT MALIC ENZYME (NADP-ME)
  misc_feature (1)..(496): Homolog of NCBI NO: 7431234 NR Description: malate dehydrogenase
  misc_feature (1)..(496): Homolog of NCBI NO: 7427668 NR Description: malate dehydrogenase
  misc_feature (1)..(496): Homolog of NCBI NO: 510876 NR Description: NADP dependent malic enzyme [Phaseolus vulgaris]
  misc_feature (1)..(496): Homolog of NCBI NO: 15239517 NR Description: malate dehydrogenase - like protein [Arabidopsis
  misc_feature (1)..(496): Homolog of NCBI NO: 15239146 NR Description: NADP dependent malic enzyme - like protein

SEQ ID NO: 47417 - DNA, 1634 bp, Arabidopsis thaliana
  misc_feature (1)..(1634): Ceres Seq. ID no. 12591789
  misc_feature: MA Experiment ID: 20000169 Result: Up-regulated in Transcription
  misc_feature: MA Experiment 20000169 PARAMETER Experiment Name: At_100uM_ABA_P Parameter: Age (day) Value: 14
  misc_feature: MA Experiment 20000169 PARAMETER Experiment Name: At_100uM_ABA_P Parameter: Organism Value: A. thaliana
  misc_feature: MA Experiment 20000169 PARAMETER Experiment Name: At_100uM_ABA_P Parameter: Plant Line Value: WS
  misc_feature: MA Experiment 20000169 PARAMETER Experiment Name: At_100uM_ABA_P Parameter: Timepoint (hr) Value: 6
  misc_feature: MA Experiment 20000169 PARAMETER Experiment Name: At_100uM_ABA_P Parameter: Tissue Value: Aerial
  misc_feature: MA Experiment 20000169 PARAMETER Experiment Name: At_100uM_ABA_P Parameter: Treatment Value: 100uM ABA vs. No Treatment
  misc_feature: MA Experiment ID: 20000173 Result: Up-regulated in Transcription
  misc_feature: MA Experiment 20000173 PARAMETER Experiment Name: At_42deg_Heat_P Parameter: Age (day) Value: 14
  misc_feature: MA Experiment 20000173 PARAMETER Experiment Name: At_42deg_Heat_P Parameter: Organism Value: A. thaliana
  misc_feature: MA Experiment 20000173 PARAMETER Experiment Name: At_42deg_Heat_P Parameter: Plant Line Value: WS
  misc_feature: MA Experiment 20000173 PARAMETER Experiment Name: At_42deg_Heat_P Parameter: Temperature (deg C) Value: 42 vs. 22
  misc_feature: MA Experiment 20000173 PARAMETER Experiment Name: At_42deg_Heat_P Parameter: Timepoint (hr) Value: 6
  misc_feature: MA Experiment 20000173 PARAMETER Experiment Name: At_42deg_Heat_P Parameter: Tissue Value: Aerial
  misc_feature: MA Experiment ID: 20000184 Result: Up-regulated in Transcription
  misc_feature: MA Experiment 20000184 PARAMETER Experiment Name: At_Shoots__P Parameter: Age (day) Value: 7
  misc_feature: MA Experiment 20000184 PARAMETER Experiment Name: At_Shoots__P Parameter: Tissue Value: Shoots vs. Whole Plant
  misc_feature: MA Experiment ID: 20000265 Result: Up-regulated in Transcription
  misc_feature: MA Experiment 20000265 PARAMETER Experiment Name: At_Open_Flower_P Parameter: Age (day) Value: 21
  misc_feature: MA Experiment 20000265 PARAMETER Experiment Name: At_Open_Flower_P Parameter: Plant Line Value: WS
  misc_feature: MA Experiment 20000265 PARAMETER Experiment Name: At_Open_Flower_P Parameter: Tissue Value: Closed Flower vs. Whole Plant
  misc_feature: MA Experiment ID: 20000267 Result: Up-regulated in Transcription
  misc_feature: MA Experiment 20000267 PARAMETER Experiment Name: At_Drought_P Parameter: Age (day) Value: 7
  misc_feature: MA Experiment 20000267 PARAMETER Experiment Name: At_Drought_P Parameter: Organism Value: A. thaliana
  misc_feature: MA Experiment 20000267 PARAMETER Experiment Name: At_Drought_P Parameter: Plant Line Value: WS
  misc_feature: MA Experiment 20000267 PARAMETER Experiment Name: At_Drought_P Parameter: Timepoint (hr) Value: 6
  misc_feature: MA Experiment 20000267 PARAMETER Experiment Name: At_Drought_P Parameter: Tissue Value: Whole Plant
  misc_feature: MA Experiment 20000267 PARAMETER Experiment Name: At_Drought_P Parameter: Treatment Value: Drought vs. No Drought
  misc_feature: MA Experiment ID: 20000268 Result: Up-regulated in Transcription
  misc_feature: MA Experiment 20000268 PARAMETER Experiment Name: At_100mM_NaCl__P Parameter: Age (day) Value: 14
  misc_feature: MA Experiment 20000268 PARAMETER Experiment Name: At_100mM_NaCl__P Parameter: Organism Value: A. thaliana
  misc_feature: MA Experiment 20000268 PARAMETER Experiment Name: At_100mM_NaCl__P Parameter: Plant Line Value: WS
  misc_feature: MA Experiment 20000268 PARAMETER Experiment Name: At_100mM_NaCl__P Parameter: Timepoint (hr) Value: 6
  misc_feature: MA Experiment 20000268 PARAMETER Experiment Name: At_100mM_NaCl__P Parameter: Tissue Value: Whole Plant
  misc_feature: MA Experiment 20000268 PARAMETER Experiment Name: At_100mM_NaCl__P Parameter: Treatment Value: 100mM NaCl vs. No Treatment
  misc_feature: MA Experiment ID: 20000436 Result: Up-regulated in Transcription
  misc_feature: MA Experiment 20000436 PARAMETER Experiment Name: At_Drought_P Parameter: Age (day) Value: 7
  misc_feature: MA Experiment 20000436 PARAMETER Experiment Name: At_Drought_P Parameter: Organism Value: A. thaliana
  misc_feature: MA Experiment 20000436 PARAMETER Experiment Name: At_Drought_P Parameter: Plant Line Value: WS
  misc_feature: MA Experiment 20000436 PARAMETER Experiment Name: At_Drought_P Parameter: Timepoint (hr) Value: 12
  misc_feature: MA Experiment 20000436 PARAMETER Experiment Name: At_Drought_P Parameter: Tissue Value: Whole Plant
  misc_feature: MA Experiment 20000436 PARAMETER Experiment Name: At_Drought_P Parameter: Treatment Value: Drought vs. No Drought
  misc_feature: MA Experiment ID: 20000437 Result: Up-regulated in Transcription
  misc_feature: MA Experiment 20000437 PARAMETER Experiment Name: At_Drought_P Parameter: Age (day) Value: 8
  misc_feature: MA Experiment 20000437 PARAMETER Experiment Name: At_Drought_P Parameter: Organism Value: A. thaliana
  misc_feature: MA Experiment 20000437 PARAMETER Experiment Name: At_Drought_P Parameter: Plant Line Value: WS
  misc_feature: MA Experiment 20000437 PARAMETER Experiment Name: At_Drought_P Parameter: Timepoint (hr) Value: 24
  misc_feature: MA Experiment 20000437 PARAMETER Experiment Name: At_Drought_P Parameter: Tissue Value: Whole Plant
  misc_feature: MA Experiment 20000437 PARAMETER Experiment Name: At_Drought_P Parameter: Treatment Value: Drought vs. No Drought
  misc_feature: MA Experiment ID: 20000438 Result: Up-regulated in Transcription
  misc_feature: MA Experiment 20000438 PARAMETER Experiment Name: At_Shoots__P Parameter: Age (day) Value: 14
  misc_feature: MA Experiment 20000438 PARAMETER Experiment Name: At_Shoots__P Parameter: Tissue Value: Shoots vs. Whole Plant
  misc_feature: MA Experiment ID: 20000495 Result: Down-regulated in Transcription
  misc_feature: MA Experiment 20000495 PARAMETER Experiment Name: At_Guard_Cells_P Parameter: Harvest Date Value: 8/2/2002
  misc_feature: MA Experiment 20000495 PARAMETER Experiment Name: At_Guard_Cells_P Parameter: Organism Value: A. thaliana
  misc_feature: MA Experiment 20000495 PARAMETER Experiment Name: At_Guard_Cells_P Parameter: Tissue Value: Guard Cells vs. Leaves
  misc_feature: MA Experiment ID: 20000496 Result: Down-regulated in Transcription
  misc_feature: MA Experiment 20000496 PARAMETER Experiment Name: At_Guard_Cells_P Parameter: Harvest Date Value: 7/19/2002
  misc_feature: MA Experiment 20000496 PARAMETER Experiment Name: At_Guard_Cells_P Parameter: Organism Value: Canola
  misc_feature: MA Experiment 20000496 PARAMETER Experiment Name: At_Guard_Cells_P Parameter: Tissue Value: Guard Cells vs. Leaves
  misc_feature: MA Experiment ID: 20000573 Result: Down-regulated in Transcription
  misc_feature: MA Experiment 20000573 PARAMETER Experiment Name: At_100uM_ABA_Mutants__P Parameter: Organism Value: A. thaliana
  misc_feature: MA Experiment 20000573 PARAMETER Experiment Name: At_100uM_ABA_Mutants__P Parameter: Plant Line Value: CS22 vs. Ler wt
  misc_feature: MA Experiment 20000573 PARAMETER Experiment Name: At_100uM_ABA_Mutants__P Parameter: Timepoint (hr) Value: N/A
  misc_feature: MA Experiment 20000573 PARAMETER Experiment Name: At_100uM_ABA_Mutants__P Parameter: Tissue Value: Whole Plant
  misc_feature: MA Experiment 20000573 PARAMETER Experiment Name: At_100uM_ABA_Mutants__P Parameter: Treatment Value: None
  misc_feature: MA Experiment ID: 20001247 Result: Up-regulated in Transcription
  misc_feature: MA Experiment 20001247 PARAMETER Experiment Name: At_Far-red-induction_P Parameter: Age (day) Value: 7
  misc_feature: MA Experiment 20001247 PARAMETER Experiment Name: At_Far-red-induction_P Parameter: Light Value: Far-red vs. White
  misc_feature: MA Experiment 20001247 PARAMETER Experiment Name: At_Far-red-induction_P Parameter: Organism Value: A. thaliana
  misc_feature: MA Experiment 20001247 PARAMETER Experiment Name: At_Far-red-induction_P Parameter: Plant Line Value: Columbia
  misc_feature: MA Experiment 20001247 PARAMETER Experiment Name: At_Far-red-induction_P Parameter: Timepoint (hr) Value: 1
  misc_feature: MA Experiment 20001247 PARAMETER Experiment Name: At_Far-red-induction_P Parameter: Tissue Value: Whole Plant
  misc_feature: MA Experiment ID: 20001248 Result: Down-regulated in Transcription
  misc_feature: MA Experiment 20001248 PARAMETER Experiment Name: At_Far-red-induction_P Parameter: Age (day) Value: 7
  misc_feature: MA Experiment 20001248 PARAMETER Experiment Name: At_Far-red-induction_P Parameter: Light Value: Far-red vs. White
  misc_feature: MA Experiment 20001248 PARAMETER Experiment Name: At_Far-red-induction_P Parameter: Organism Value: A. thaliana
  misc_feature: MA Experiment 20001248 PARAMETER Experiment Name: At_Far-red-induction_P Parameter: Plant Line Value: Columbia
  misc_feature: MA Experiment 20001248 PARAMETER Experiment Name: At_Far-red-induction_P Parameter: Timepoint (hr) Value: 4
  misc_feature: MA Experiment 20001248 PARAMETER Experiment Name: At_Far-red-induction_P Parameter: Tissue Value: Whole Plant
  misc_feature: MA Experiment ID: 20001557 Result: Down-regulated in Transcription
  misc_feature: MA Experiment 20001557 PARAMETER Experiment Name: At_Drought_Soil_Dry_P Parameter: Age (day) Value: 27
  misc_feature: MA Experiment 20001557 PARAMETER Experiment Name: At_Drought_Soil_Dry_P Parameter: Organism Value: A. thaliana
  misc_feature: MA Experiment 20001557 PARAMETER Experiment Name: At_Drought_Soil_Dry_P Parameter: Plant Line Value: WS
  misc_feature: MA Experiment 20001557 PARAMETER Experiment Name: At_Drought_Soil_Dry_P Parameter: Post Timepoint (hr) Value: 3
  misc_feature: MA Experiment 20001557 PARAMETER Experiment Name: At_Drought_Soil_Dry_P Parameter: Post-Treatment Value: Re-Water vs. No Drought
  misc_feature: MA Experiment 20001557 PARAMETER Experiment Name: At_Drought_Soil_Dry_P Parameter: Timepoint (day) Value: 13
  misc_feature: MA Experiment 20001557 PARAMETER Experiment Name: At_Drought_Soil_Dry_P Parameter: Treatment Value: Drought vs. No Drought
  misc_feature: MA Experiment ID: 20001558 Result: Down-regulated in Transcription
  misc_feature: MA Experiment 20001558 PARAMETER Experiment Name: At_Drought_Soil_Dry_P Parameter: Age (day) Value: 27
  misc_feature: MA Experiment 20001558 PARAMETER Experiment Name: At_Drought_Soil_Dry_P Parameter: Organism Value: A. thaliana
  misc_feature: MA Experiment 20001558 PARAMETER Experiment Name: At_Drought_Soil_Dry_P Parameter: Plant Line Value: WS
  misc_feature: MA Experiment 20001558 PARAMETER Experiment Name: At_Drought_Soil_Dry_P Parameter: Post Timepoint (hr) Value: 6
  misc_feature: MA Experiment 20001558 PARAMETER Experiment Name: At_Drought_Soil_Dry_P Parameter: Post-Treatment Value: Re-Water vs. No Drought
  misc_feature: MA Experiment 20001558 PARAMETER Experiment Name: At_Drought_Soil_Dry_P Parameter: Timepoint (day) Value: 13
  misc_feature: MA Experiment 20001558 PARAMETER Experiment Name: At_Drought_Soil_Dry_P Parameter: Treatment Value: Drought vs. No Drought
  misc_feature: MA Experiment ID: 20001560 Result: Down-regulated in Transcription
  misc_feature: MA Experiment 20001560 PARAMETER Experiment Name: At_Drought_Soil_Dry_P Parameter: Age (day) Value: 28
  misc_feature: MA Experiment 20001560 PARAMETER Experiment Name: At_Drought_Soil_Dry_P Parameter: Organism Value: A. thaliana
  misc_feature: MA Experiment 20001560 PARAMETER Experiment Name: At_Drought_Soil_Dry_P Parameter: Plant Line Value: WS
  misc_feature: MA Experiment 20001560 PARAMETER Experiment Name: At_Drought_Soil_Dry_P Parameter: Post Timepoint (hr) Value: None
  misc_feature: MA Experiment 20001560 PARAMETER Experiment Name: At_Drought_Soil_Dry_P Parameter: Post-Treatment Value: None
  misc_feature: MA Experiment 20001560 PARAMETER Experiment Name: At_Drought_Soil_Dry_P Parameter: Timepoint (day) Value: 14
  misc_feature: MA Experiment 20001560 PARAMETER Experiment Name: At_Drought_Soil_Dry_P Parameter: Treatment Value: Drought vs. No Drought
  misc_feature: MA Experiment ID: 20001905 Result: Up-regulated in Transcription
  misc_feature: MA Experiment 20001905 PARAMETER Experiment Name: At_Drought_Reproduction_P Parameter: Age (day) Value: 40
  misc_feature: MA Experiment 20001905 PARAMETER Experiment Name: At_Drought_Reproduction_P Parameter: Organism Value: A. thaliana
  misc_feature: MA Experiment 20001905 PARAMETER Experiment Name: At_Drought_Reproduction_P Parameter: Plant Line Value: WS
  misc_feature: MA Experiment 20001905 PARAMETER Experiment Name: At_Drought_Reproduction_P Parameter: Timepoint (day) Value: 10
  misc_feature: MA Experiment 20001905 PARAMETER Experiment Name: At_Drought_Reproduction_P Parameter: Tissue Value: Rosettes
  misc_feature: MA Experiment 20001905 PARAMETER Experiment Name: At_Drought_Reproduction_P Parameter: Treatment Value: Drought vs. No Drought
  misc_feature: MA Experiment ID: 20001911 Result: Up-regulated in Transcription
  misc_feature: MA Experiment 20001911 PARAMETER Experiment Name: At_Drought_Reproduction_P Parameter: Age (day) Value: 40
  misc_feature: MA Experiment 20001911 PARAMETER Experiment Name: At_Drought_Reproduction_P Parameter: Organism Value: A. thaliana
  misc_feature: MA Experiment 20001911 PARAMETER Experiment Name: At_Drought_Reproduction_P Parameter: Plant Line Value: WS
  misc_feature: MA Experiment 20001911 PARAMETER Experiment Name: At_Drought_Reproduction_P Parameter: Timepoint (day) Value: 10
  misc_feature: MA Experiment 20001911 PARAMETER Experiment Name: At_Drought_Reproduction_P Parameter: Tissue Value: Flowers
  misc_feature: MA Experiment 20001911 PARAMETER Experiment Name: At_Drought_Reproduction_P Parameter: Treatment Value: Drought vs. No Drought
atggagatacggagcttgattgtttctatgaaccctaatttatcttcctttgagctctctcgccctgtatctcctctcactcgctcactagttccgttccgatcgactaaactagttccccgctccatttctagggtttcggcgtcgatctccaccccgaatagtgaaactgacaagatctccgttaaacctgtttacgtcccgacgtctcccaatcgcgaactccggactcctcacagtggataccatttcgatggaacacctcggaagttcttcgagggatggtatttcagggtttccatcccagagaagagggagagtttttgttttatgtattctgtggagaatcctgcatttcggcagagtttgtcaccattggaagtggctctatatggacctagattcactggtgttggagctcagattcttggcgctaatgataaatatttatgccaatacgaacaagactctcacaatttctggggagatcgacatgagctagttttggggaatacttttagtgctgtgccaggcgcaaaggctccaaacaaggaggttccaccagaggaatttaacagaagagtgtccgaagggttccaagctactccattttggcatcaaggtcacatttgcgatgatggccgtactgactatgcggaaactgtgaaatctgctcgttgggagtatagtactcgtcccgtttacggttggggtgatgttggggccaaacagaagtcaactgcaggctggcctgcagcttttcctgtatttgagcctcattggcagatatgcatggcaggaggcctttccacagggtggatagaatggggcggtgaaaggtttgagtttcgggatgcaccttcttattcagagaagaattggggtggaggcttcccaagaaaatggttttgggtccagtgtaatgtctttgaaggggcaactggagaagttgctttaaccgcaggtggcgggttgaggcaattgcctggattgactgagacctatgaaaatgctgcactggtttgtgtacactatgatggaaaaatgtacgagtttgttccttggaatggtgttgttagatgggaaatgtctccctggggttattggtatataactgcagagaacgaaaaccatgtggtggaactagaggcaagaacaaatgaagcgggtacacctctgcgtgctcctaccacagaagttgggctagctacggcttgcagagatagttgttacggtgaattgaagttgcagatatgggaacggctatatgatggaagtaaaggcaaggtgatattagagacaaagagctcaatggcagcagtggagataggaggaggaccgtggtttgggacatggaaaggagatacgagcaacacgcccgagctactaaaacaggctcttcaggtcccattggatcttgaaagcgccttaggtttggtccctttcttcaagccaccgggtctgtaacattgatgagtgttttgtttgttgatagagacccatgtgatgaatgaagccttagtcatgtcattgctagcttcactattatgtatgtatgattttagttcgttcggtccttgtggtaaatgatacgggccagtgtaaagtctaattcaataaaagccttgagtcgc

SEQ ID NO: 47418 - protein, 488 aa, Arabidopsis thaliana
  peptide (1)..(488): Ceres Seq. ID no. 12591790
  misc_feature (132)..(453): Homolog of NCBI NO: 37522658 NR Description: hypothetical protein glr3089 [Gloeobacter
  misc_feature (78)..(448): Homolog of NCBI NO: 16330367 NR Description: unknown protein [Synechocystis sp. PCC 6803]
  misc_feature (126)..(453): Homolog of NCBI NO: 17227741 NR Description: hypothetical protein [Nostoc sp. PCC 7120]
  misc_feature (112)..(453): Homolog of NCBI NO: 23130125 NR Description: hypothetical protein [Nostoc punctiforme]
  misc_feature (112)..(452): Homolog of NCBI NO: 23041856 NR Description: hypothetical protein [Trichodesmium erythraeum
  misc_feature (23)..(488): Homolog of NCBI NO: 24212570 NR Description: Probable tocopherol cyclase, chloroplast
  misc_feature (48)..(488): Homolog of NCBI NO: 33188419 NR Description: tocopherol cyclase [Eucalyptus gunnii]
  misc_feature (419)..(488): Homolog of NCBI NO: 7486416 NR Description: hypothetical protein F4D11.30 - Arabidopsis
  misc_feature (82)..(430): Homolog of NCBI NO: 7486416 NR Description: hypothetical protein F4D11.30 - Arabidopsis
  misc_feature (1)..(488): Homolog of NCBI NO: 18418083 NR Description: putative protein
MEIRSLIVSMNPNLSSFELSRPVSPLTRSLVPFRSTKLVPRSISRVSASISTPNSETDKISVKPVYVPTSPNRELRTPHSGYHFDGTPRKFFEGWYFRVSIPEKRESFCFMYSVENPAFRQSLSPLEVALYGPRFTGVGAQILGANDKYLCQYEQDSHNFWGDRHELVLGNTFSAVPGAKAPNKEVPPEEFNRRVSEGFQATPFWHQGHICDDGRTDYAETVKSARWEYSTRPVYGWGDVGAKQKSTAGWPAAFPVFEPHWQICMAGGLSTGWIEWGGERFEFRDAPSYSEKNWGGGFPRKWFWVQCNVFEGATGEVALTAGGGLRQLPGLTETYENAALVCVHYDGKMYEFVPWNGVVRWEMSPWGYWYITAENENHVVELEARTNEAGTPLRAPTTEVGLATACRDSCYGELKLQIWERLYDGSKGKVILETKSSMAAVEIGGGPWFGTWKGDTSNTPELLKQALQVPLDLESALGLVPFFKPPGL

SEQ ID NO: 47419 - protein, 479 aa, Arabidopsis thaliana
  peptide (1)..(479): Ceres Seq. ID no. 12591791
  misc_feature (123)..(444): Homolog of NCBI NO: 37522658 NR Description: hypothetical protein glr3089 [Gloeobacter
  misc_feature (69)..(439): Homolog of NCBI NO: 16330367 NR Description: unknown protein [Synechocystis sp. PCC 6803]
  misc_feature (117)..(444): Homolog of NCBI NO: 17227741 NR Description: hypothetical protein [Nostoc sp. PCC 7120]
  misc_feature (103)..(444): Homolog of NCBI NO: 23130125 NR Description: hypothetical protein [Nostoc punctiforme]
  misc_feature (103)..(443): Homolog of NCBI NO: 23041856 NR Description: hypothetical protein [Trichodesmium erythraeum
  misc_feature (14)..(479): Homolog of NCBI NO: 24212570 NR Description: Probable tocopherol cyclase, chloroplast
  misc_feature (39)..(479): Homolog of NCBI NO: 33188419 NR Description: tocopherol cyclase [Eucalyptus gunnii]
  misc_feature (410)..(479): Homolog of NCBI NO: 7486416 NR Description: hypothetical protein F4D11.30 - Arabidopsis
  misc_feature (73)..(421): Homolog of NCBI NO: 7486416 NR Description: hypothetical protein F4D11.30 - Arabidopsis
  misc_feature (1)..(479): Homolog of NCBI NO: 18418083 NR Description: putative protein
MNPNLSSFELSRPVSPLTRSLVPFRSTKLVPRSISRVSASISTPNSETDKISVKPVYVPTSPNRELRTPHSGYHFDGTPRKFFEGWYFRVSIPEKRESFCFMYSVENPAFRQSLSPLEVALYGPRFTGVGAQILGANDKYLCQYEQDSHNFWGDRHELVLGNTFSAVPGAKAPNKEVPPEEFNRRVSEGFQATPFWHQGHICDDGRTDYAETVKSARWEYSTRPVYGWGDVGAKQKSTAGWPAAFPVFEPHWQICMAGGLSTGWIEWGGERFEFRDAPSYSEKNWGGGFPRKWFWVQCNVFEGATGEVALTAGGGLRQLPGLTETYENAALVCVHYDGKMYEFVPWNGVVRWEMSPWGYWYITAENENHVVELEARTNEAGTPLRAPTTEVGLATACRDSCYGELKLQIWERLYDGSKGKVILETKSSMAAVEIGGGPWFGTWKGDTSNTPELLKQALQVPLDLESALGLVPFFKPPGL

SEQ ID NO: 47420 - protein, 378 aa, Arabidopsis thaliana
  peptide (1)..(378): Ceres Seq. ID no. 12591792
  misc_feature (22)..(343): Homolog of NCBI NO: 37522658 NR Description: hypothetical protein glr3089 [Gloeobacter
  misc_feature (1)..(338): Homolog of NCBI NO: 16330367 NR Description: unknown protein [Synechocystis sp. PCC 6803]
  misc_feature (16)..(343): Homolog of NCBI NO: 17227741 NR Description: hypothetical protein [Nostoc sp. PCC 7120]
  misc_feature (2)..(343): Homolog of NCBI NO: 23130125 NR Description: hypothetical protein [Nostoc punctiforme]
  misc_feature (2)..(342): Homolog of NCBI NO: 23041856 NR Description: hypothetical protein [Trichodesmium erythraeum
  misc_feature (1)..(378): Homolog of NCBI NO: 24212570 NR Description: Probable tocopherol cyclase, chloroplast
  misc_feature (1)..(378): Homolog of NCBI NO: 33188419 NR Description: tocopherol cyclase [Eucalyptus gunnii]
  misc_feature (309)..(378): Homolog of NCBI NO: 7486416 NR Description: hypothetical protein F4D11.30 - Arabidopsis
  misc_feature (1)..(320): Homolog of NCBI NO: 7486416 NR Description: hypothetical protein F4D11.30 - Arabidopsis
  misc_feature (1)..(378): Homolog of NCBI NO: 18418083 NR Description: putative protein
MYSVENPAFRQSLSPLEVALYGPRFTGVGAQILGANDKYLCQYEQDSHNFWGDRHELVLGNTFSAVPGAKAPNKEVPPEEFNRRVSEGFQATPFWHQGHICDDGRTDYAETVKSARWEYSTRPVYGWGDVGAKQKSTAGWPAAFPVFEPHWQICMAGGLSTGWIEWGGERFEFRDAPSYSEKNWGGGFPRKWFWVQCNVFEGATGEVALTAGGGLRQLPGLTETYENAALVCVHYDGKMYEFVPWNGVVRWEMSPWGYWYITAENENHVVELEARTNEAGTPLRAPTTEVGLATACRDSCYGELKLQIWERLYDGSKGKVILETKSSMAAVEIGGGPWFGTWKGDTSNTPELLKQALQVPLDLESALGLVPFFKPPGL

SEQ ID NO: 47421 - DNA, 1148 bp, Arabidopsis thaliana
  misc_feature (1)..(1148): Ceres Seq. ID no. 13588370
  misc_feature: MA Experiment ID: 20000173 Result: Down-regulated in Transcription
  misc_feature: MA Experiment 20000173 PARAMETER Experiment Name: At_42deg_Heat_P Parameter: Age (day) Value: 14
  misc_feature: MA Experiment 20000173 PARAMETER Experiment Name: At_42deg_Heat_P Parameter: Organism Value: A. thaliana
  misc_feature: MA Experiment 20000173 PARAMETER Experiment Name: At_42deg_Heat_P Parameter: Plant Line Value: WS
  misc_feature: MA Experiment 20000173 PARAMETER Experiment Name: At_42deg_Heat_P Parameter: Temperature (deg C) Value: 42 vs. 22
  misc_feature: MA Experiment 20000173 PARAMETER Experiment Name: At_42deg_Heat_P Parameter: Timepoint (hr) Value: 6
  misc_feature: MA Experiment 20000173 PARAMETER Experiment Name: At_42deg_Heat_P Parameter: Tissue Value: Aerial
  misc_feature: MA Experiment ID: 20000180 Result: Down-regulated in Transcription
  misc_feature: MA Experiment 20000180 PARAMETER Experiment Name: At_Germinating_Seeds_P Parameter: Age (hr) Value: 24 vs. 0
  misc_feature: MA Experiment 20000180 PARAMETER Experiment Name: At_Germinating_Seeds_P Parameter: Tissue Value: Germinating Seeds
acttttgctttcttcaacctgtcgacaacactcccgaatttttctctggcagtgtgtttaaaaaccaatggcgctagttgtgatttgtgggcaaccttgtagtggtaagtcaatagctgcagtaactttagctgaaacattgaaagagtctgaaacgaaacagagtgttaggatcatcgatgaggcttcgtttcatctagaccgcaaccaaaactatgctaacatgcctgctgagaagaatctgagaggaaagcttaggtcagatgttgatagatcagtttcgacaggcgagattgttattgtagattccttgaatagtatcaaaggttacagatatgagctatggtgtatcgctcgtgctgctgggattaggtattgtgttgtttattgtgatgtagatgaagctcattgtaggcaatggaataaggaacggagtgatagaggtgaagatggatatgacgatggtatattcgaagatctggttagaagatttgagaaacctgagagaagaaaccgatgggattcacctctctttgagctatacccttctcgtgaagttatagacaaatcctctcctgtgattttagaggctgtgacttatctaaccaagactgttgactccaaaacccaagatgtgagaattctccaaccaagtattgccactcaggctgctagattttcagaagcaaattctctttacgagttggacagagcgacacaagaaatcatcaacgcgattgtggaacaacaatcactgggcgcggctataagcagagttactcttggcaatgaactacctccgattgaaatctgcagaccgattgggctaccggagctaaggaggcttcgaagaacgtttgttaaattgatgggtcaatcgagtctaagcggtccaccgttaccaactgatgcagacagtgcaaagagacgttttgtggattacttgaacagagagtttggaggtaataacgcttgaaatttgttgggtgaaaaacatcttatttcttaaaggtttggttatgtattttcttaactcaagacttgttcttcttcatcgaaattcttttttggggctaaattgatgtgttataataggcccgttataataatgcaaacatattttggggctatagtatattttcttgtcc

SEQ ID NO: 47422 - protein, 302 aa, Arabidopsis thaliana
  peptide (1)..(302): Ceres Seq. ID no. 13588371
  misc_feature (1)..(294): Homolog of NCBI NO: 18543259 NR Description: CG3587-PA [Drosophila melanogaster]
  misc_feature (1)..(108): Homolog of NCBI NO: 19923939 NR Description: hypothetical protein BC012173 [Homo sapiens]
  misc_feature (119)..(265): Homolog of NCBI NO: 19923939 NR Description: hypothetical protein BC012173 [Homo sapiens]
  misc_feature (1)..(108): Homolog of NCBI NO: 20270210 NR Description: RIKEN cDNA 1110001A12 [Mus musculus]
  misc_feature (134)..(295): Homolog of NCBI NO: 20270210 NR Description: RIKEN cDNA 1110001A12 [Mus musculus]
  misc_feature (1)..(294): Homolog of NCBI NO: 33300521 NR Description: Hypothetical protein Y57G11C.43 [Caenorhabditis
  misc_feature (1)..(294): Homolog of NCBI NO: 39583457 NR Description: Hypothetical protein CBG21524 [Caenorhabditis
  misc_feature (1)..(266): Homolog of NCBI NO: 28850452 NR Description: similar to similarity to S. cerevisiae kti12
  misc_feature (1)..(302): Homolog of NCBI NO: 23504265 NR Description: DRL1 protein [Arabidopsis thaliana]
  misc_feature (1)..(302): Homolog of NCBI NO: 15222972 NR Description: expressed protein [Arabidopsis thaliana]
MALVVICGQPCSGKSIAAVTLAETLKESETKQSVRIIDEASFHLDRNQNYANMPAEKNLRGKLRSDVDRSVSTGEIVIVDSLNSIKGYRYELWCIARAAGIRYCVVYCDVDEAHCRQWNKERSDRGEDGYDDGIFEDLVRRFEKPERRNRWDSPLFELYPSREVIDKSSPVILEAVTYLTKTVDSKTQDVRILQPSIATQAARFSEANSLYELDRATQEIINAIVEQQSLGAAISRVTLGNELPPIEICRPIGLPELRRLRRTFVKLMGQSSLSGPPLPTDADSAKRRFVDYLNREFGGNNA

SEQ ID NO: 47423 - protein, 250 aa, Arabidopsis thaliana
  peptide (1)..(250): Ceres Seq. ID no. 13588372
  misc_feature (1)..(242): Homolog of NCBI NO: 18543259 NR Description: CG3587-PA [Drosophila melanogaster]
  misc_feature (1)..(56): Homolog of NCBI NO: 19923939 NR Description: hypothetical protein BC012173 [Homo sapiens]
  misc_feature (67)..(213): Homolog of NCBI NO: 19923939 NR Description: hypothetical protein BC012173 [Homo sapiens]
  misc_feature (1)..(56): Homolog of NCBI NO: 20270210 NR Description: RIKEN cDNA 1110001A12 [Mus musculus]
  misc_feature (82)..(243): Homolog of NCBI NO: 20270210 NR Description: RIKEN cDNA 1110001A12 [Mus musculus]
  misc_feature (1)..(242): Homolog of NCBI NO: 33300521 NR Description: Hypothetical protein Y57G11C.43 [Caenorhabditis
  misc_feature (1)..(242): Homolog of NCBI NO: 39583457 NR Description: Hypothetical protein CBG21524 [Caenorhabditis
  misc_feature (1)..(214): Homolog of NCBI NO: 28850452 NR Description: similar to similarity to S. cerevisiae kti12
  misc_feature (1)..(250): Homolog of NCBI NO: 23504265 NR Description: DRL1 protein [Arabidopsis thaliana]
  misc_feature (1)..(250): Homolog of NCBI NO: 15222972 NR Description: expressed protein [Arabidopsis thaliana]
MPAEKNLRGKLRSDVDRSVSTGEIVIVDSLNSIKGYRYELWCIARAAGIRYCVVYCDVDEAHCRQWNKERSDRGEDGYDDGIFEDLVRRFEKPERRNRWDSPLFELYPSREVIDKSSPVILEAVTYLTKTVDSKTQDVRILQPSIATQAARFSEANSLYELDRATQEIINAIVEQQSLGAAISRVTLGNELPPIEICRPIGLPELRRLRRTFVKLMGQSSLSGPPLPTDADSAKRRFVDYLNREFGGNNA

SEQ ID NO: 47424 - DNA, 2750 bp, Arabidopsis thaliana
  misc_feature (1)..(2750): Ceres Seq. ID no. 12591695
  misc_feature: MA Experiment ID: 20000171 Result: Down-regulated in Transcription
  misc_feature: MA Experiment 20000171 PARAMETER Experiment Name: At_42deg_Heat_P Parameter: Age (day) Value: 14
  misc_feature: MA Experiment 20000171 PARAMETER Experiment Name: At_42deg_Heat_P Parameter: Organism Value: A. thaliana
  misc_feature: MA Experiment 20000171 PARAMETER Experiment Name: At_42deg_Heat_P Parameter: Plant Line Value: WS
  misc_feature: MA Experiment 20000171 PARAMETER Experiment Name: At_42deg_Heat_P Parameter: Temperature (deg C) Value: 42 vs. 22
  misc_feature: MA Experiment 20000171 PARAMETER Experiment Name: At_42deg_Heat_P Parameter: Timepoint (hr) Value: 1
  misc_feature: MA Experiment 20000171 PARAMETER Experiment Name: At_42deg_Heat_P Parameter: Tissue Value: Aerial
  misc_feature: MA Experiment ID: 20000173 Result: Down-regulated in Transcription
  misc_feature: MA Experiment 20000173 PARAMETER Experiment Name: At_42deg_Heat_P Parameter: Age (day) Value: 14
  misc_feature: MA Experiment 20000173 PARAMETER Experiment Name: At_42deg_Heat_P Parameter: Organism Value: A. thaliana
  misc_feature: MA Experiment 20000173 PARAMETER Experiment Name: At_42deg_Heat_P Parameter: Plant Line Value: WS
  misc_feature: MA Experiment 20000173 PARAMETER Experiment Name: At_42deg_Heat_P Parameter: Temperature (deg C) Value: 42 vs. 22
  misc_feature: MA Experiment 20000173 PARAMETER Experiment Name: At_42deg_Heat_P Parameter: Timepoint (hr) Value: 6
  misc_feature: MA Experiment 20000173 PARAMETER Experiment Name: At_42deg_Heat_P Parameter: Tissue Value: Aerial
  misc_feature: MA Experiment ID: 20000180 Result: Down-regulated in Transcription
  misc_feature: MA Experiment 20000180 PARAMETER Experiment Name: At_Germinating_Seeds_P Parameter: Age (hr) Value: 24 vs. 0
  misc_feature: MA Experiment 20000180 PARAMETER Experiment Name: At_Germinating_Seeds_P Parameter: Tissue Value: Germinating Seeds
  misc_feature: MA Experiment ID: 20000227 Result: Up-regulated in Transcription
  misc_feature: MA Experiment 20000227 PARAMETER Experiment Name: At_Root-Tips-vs-Tops_P Parameter: Tissue Value: Root Tips vs. Root Tops
  misc_feature: MA Experiment ID: 20000268 Result: Down-regulated in Transcription
  misc_feature: MA Experiment 20000268 PARAMETER Experiment Name: At_100mM_NaCl__P Parameter: Age (day) Value: 14
  misc_feature: MA Experiment 20000268 PARAMETER Experiment Name: At_100mM_NaCl__P Parameter: Organism Value: A. thaliana
  misc_feature: MA Experiment 20000268 PARAMETER Experiment Name: At_100mM_NaCl__P Parameter: Plant Line Value: WS
  misc_feature: MA Experiment 20000268 PARAMETER Experiment Name: At_100mM_NaCl__P Parameter: Timepoint (hr) Value: 6
  misc_feature: MA Experiment 20000268 PARAMETER Experiment Name: At_100mM_NaCl__P Parameter: Tissue Value: Whole Plant
  misc_feature: MA Experiment 20000268 PARAMETER Experiment Name: At_100mM_NaCl__P Parameter: Treatment Value: 100mM NaCl vs. No Treatment
  misc_feature: MA Experiment ID: 20000794 Result: Down-regulated in Transcription
  misc_feature: MA Experiment 20000794 PARAMETER Experiment Name: At_Petals_P Parameter: Age (day) Value: 23-25 days
  misc_feature: MA Experiment 20000794 PARAMETER Experiment Name: At_Petals_P Parameter: Plant Line Value: WS
  misc_feature: MA Experiment 20000794 PARAMETER Experiment Name: At_Petals_P Parameter: Tissue Value: Petals vs. Whole plant
  misc_feature: MA Experiment ID: 20001247 Result: Up-regulated in Transcription
  misc_feature: MA Experiment 20001247 PARAMETER Experiment Name: At_Far-red-induction_P Parameter: Age (day) Value: 7
  misc_feature: MA Experiment 20001247 PARAMETER Experiment Name: At_Far-red-induction_P Parameter: Light Value: Far-red vs. White
  misc_feature: MA Experiment 20001247 PARAMETER Experiment Name: At_Far-red-induction_P Parameter: Organism Value: A. thaliana
  misc_feature: MA Experiment 20001247 PARAMETER Experiment Name: At_Far-red-induction_P Parameter: Plant Line Value: Columbia
  misc_feature: MA Experiment 20001247 PARAMETER Experiment Name: At_Far-red-induction_P Parameter: Timepoint (hr) Value: 1
  misc_feature: MA Experiment 20001247 PARAMETER Experiment Name: At_Far-red-induction_P Parameter: Tissue Value: Whole Plant
  misc_feature: MA Experiment ID: 20001450 Result: Up-regulated in Transcription
  misc_feature: MA Experiment 20001450 PARAMETER Experiment Name: At_Far-red-induction_P Parameter: Age (day) Value: 7
  misc_feature: MA Experiment 20001450 PARAMETER Experiment Name: At_Far-red-induction_P Parameter: Light Value: Far-red vs. White
  misc_feature: MA Experiment 20001450 PARAMETER Experiment Name: At_Far-red-induction_P Parameter: Organism Value: A. thaliana
  misc_feature: MA Experiment 20001450 PARAMETER Experiment Name: At_Far-red-induction_P Parameter: Plant Line Value: Columbia
  misc_feature: MA Experiment 20001450 PARAMETER Experiment Name: At_Far-red-induction_P Parameter: Timepoint (hr) Value: 8
  misc_feature: MA Experiment 20001450 PARAMETER Experiment Name: At_Far-red-induction_P Parameter: Tissue Value: Whole Plant
  misc_feature: MA Experiment ID: 20001554 Result: Down-regulated in Transcription
  misc_feature: MA Experiment 20001554 PARAMETER Experiment Name: At_Drought_Soil_Dry_P Parameter: Age (day) Value: 21
  misc_feature: MA Experiment 20001554 PARAMETER Experiment Name: At_Drought_Soil_Dry_P Parameter: Organism Value: A. thaliana
  misc_feature: MA Experiment 20001554 PARAMETER Experiment Name: At_Drought_Soil_Dry_P Parameter: Plant Line Value: WS
  misc_feature: MA Experiment 20001554 PARAMETER Experiment Name: At_Drought_Soil_Dry_P Parameter: Post Timepoint (hr) Value: None
  misc_feature: MA Experiment 20001554 PARAMETER Experiment Name: At_Drought_Soil_Dry_P Parameter: Post-Treatment Value: None
  misc_feature: MA Experiment 20001554 PARAMETER Experiment Name: At_Drought_Soil_Dry_P Parameter: Timepoint (day) Value: 7
  misc_feature: MA Experiment 20001554 PARAMETER Experiment Name: At_Drought_Soil_Dry_P Parameter: Treatment Value: Drought vs. No Drought
  misc_feature: MA Experiment ID: 20001555 Result: Down-regulated in Transcription
  misc_feature: MA Experiment 20001555 PARAMETER Experiment Name: At_Drought_Soil_Dry_P Parameter: Age (day) Value: 24
  misc_feature: MA Experiment 20001555 PARAMETER Experiment Name: At_Drought_Soil_Dry_P Parameter: Organism Value: A. thaliana
  misc_feature: MA Experiment 20001555 PARAMETER Experiment Name: At_Drought_Soil_Dry_P Parameter: Plant Line Value: WS
  misc_feature: MA Experiment 20001555 PARAMETER Experiment Name: At_Drought_Soil_Dry_P Parameter: Post Timepoint (hr) Value: None
  misc_feature: MA Experiment 20001555 PARAMETER Experiment Name: At_Drought_Soil_Dry_P Parameter: Post-Treatment Value: None
  misc_feature: MA Experiment 20001555 PARAMETER Experiment Name: At_Drought_Soil_Dry_P Parameter: Timepoint (day) Value: 10
  misc_feature: MA Experiment 20001555 PARAMETER Experiment Name: At_Drought_Soil_Dry_P Parameter: Treatment Value: Drought vs. No Drought
  misc_feature: MA Experiment ID: 20001556 Result: Down-regulated in Transcription
  misc_feature: MA Experiment 20001556 PARAMETER Experiment Name: At_Drought_Soil_Dry_P Parameter: Age (day) Value: 26
  misc_feature: MA Experiment 20001556 PARAMETER Experiment Name: At_Drought_Soil_Dry_P Parameter: Organism Value: A. thaliana
  misc_feature: MA Experiment 20001556 PARAMETER Experiment Name: At_Drought_Soil_Dry_P Parameter: Plant Line Value: WS
  misc_feature: MA Experiment 20001556 PARAMETER Experiment Name: At_Drought_Soil_Dry_P Parameter: Post Timepoint (hr) Value: None
  misc_feature: MA Experiment 20001556 PARAMETER Experiment Name: At_Drought_Soil_Dry_P Parameter: Post-Treatment Value: None
  misc_feature: MA Experiment 20001556 PARAMETER Experiment Name: At_Drought_Soil_Dry_P Parameter: Timepoint (day) Value: 12
  misc_feature: MA Experiment 20001556 PARAMETER Experiment Name: At_Drought_Soil_Dry_P Parameter: Treatment Value: Drought vs. No Drought
  misc_feature: MA Experiment ID: 20001557 Result: Up-regulated in Transcription
  misc_feature: MA Experiment 20001557 PARAMETER Experiment Name: At_Drought_Soil_Dry_P Parameter: Age (day) Value: 27
  misc_feature: MA Experiment 20001557 PARAMETER Experiment Name: At_Drought_Soil_Dry_P Parameter: Organism Value: A. thaliana
  misc_feature: MA Experiment 20001557 PARAMETER Experiment Name: At_Drought_Soil_Dry_P Parameter: Plant Line Value: WS
  misc_feature: MA Experiment 20001557 PARAMETER Experiment Name: At_Drought_Soil_Dry_P Parameter: Post Timepoint (hr) Value: 3
  misc_feature: MA Experiment 20001557 PARAMETER Experiment Name: At_Drought_Soil_Dry_P Parameter: Post-Treatment Value: Re-Water vs. No Drought
  misc_feature: MA Experiment 20001557 PARAMETER Experiment Name: At_Drought_Soil_Dry_P Parameter: Timepoint (day) Value: 13
  misc_feature: MA Experiment 20001557 PARAMETER Experiment Name: At_Drought_Soil_Dry_P Parameter: Treatment Value: Drought vs. No Drought
  misc_feature: MA Experiment ID: 20001558 Result: Up-regulated in Transcription
  misc_feature: MA Experiment 20001558 PARAMETER Experiment Name: At_Drought_Soil_Dry_P Parameter: Age (day) Value: 27
  misc_feature: MA Experiment 20001558 PARAMETER Experiment Name: At_Drought_Soil_Dry_P Parameter: Organism Value: A. thaliana
  misc_feature: MA Experiment 20001558 PARAMETER Experiment Name: At_Drought_Soil_Dry_P Parameter: Plant Line Value: WS
  misc_feature: MA Experiment 20001558 PARAMETER Experiment Name: At_Drought_Soil_Dry_P Parameter: Post Timepoint (hr) Value: 6
  misc_feature: MA Experiment 20001558 PARAMETER Experiment Name: At_Drought_Soil_Dry_P Parameter: Post-Treatment Value: Re-Water vs. No Drought
  misc_feature: MA Experiment 20001558 PARAMETER Experiment Name: At_Drought_Soil_Dry_P Parameter: Timepoint (day) Value: 13
  misc_feature: MA Experiment 20001558 PARAMETER Experiment Name: At_Drought_Soil_Dry_P Parameter: Treatment Value: Drought vs. No Drought
  misc_feature: MA Experiment ID: 20001560 Result: Up-regulated in Transcription
  misc_feature: MA Experiment 20001560 PARAMETER Experiment Name: At_Drought_Soil_Dry_P Parameter: Age (day) Value: 28
  misc_feature: MA Experiment 20001560 PARAMETER Experiment Name: At_Drought_Soil_Dry_P Parameter: Organism Value: A. thaliana
  misc_feature: MA Experiment 20001560 PARAMETER Experiment Name: At_Drought_Soil_Dry_P Parameter: Plant Line Value: WS
  misc_feature: MA Experiment 20001560 PARAMETER Experiment Name: At_Drought_Soil_Dry_P Parameter: Post Timepoint (hr) Value: None
  misc_feature: MA Experiment 20001560 PARAMETER Experiment Name: At_Drought_Soil_Dry_P Parameter: Post-Treatment Value: None
  misc_feature: MA Experiment 20001560 PARAMETER Experiment Name: At_Drought_Soil_Dry_P Parameter: Timepoint (day) Value: 14
  misc_feature: MA Experiment 20001560 PARAMETER Experiment Name: At_Drought_Soil_Dry_P Parameter: Treatment Value: Drought vs. No Drought
  misc_feature: MA Experiment ID: 20001757 Result: Up-regulated in Transcription
  misc_feature: MA Experiment 20001757 PARAMETER Experiment Name: At_50mM_NH4NO3_L-to-H_P Parameter: Timepoint (hr) Value: 6
  misc_feature: MA Experiment 20001757 PARAMETER Experiment Name: At_50mM_NH4NO3_L-to-H_P Parameter: Tissue Value: Leaf
  misc_feature: MA Experiment 20001757 PARAMETER Experiment Name: At_50mM_NH4NO3_L-to-H_P Parameter: Treatment Value: 50mM NH4NO3 vs 100mM Mannitol
  misc_feature: MA Experiment ID: 20001904 Result: Down-regulated in Transcription
  misc_feature: MA Experiment 20001904 PARAMETER Experiment Name: At_Drought_Reproduction_P Parameter: Age (day) Value: 37
  misc_feature: MA Experiment 20001904 PARAMETER Experiment Name: At_Drought_Reproduction_P Parameter: Organism Value: A. thaliana
  misc_feature: MA Experiment 20001904 PARAMETER Experiment Name: At_Drought_Reproduction_P Parameter: Plant Line Value: WS
  misc_feature: MA Experiment 20001904 PARAMETER Experiment Name: At_Drought_Reproduction_P Parameter: Timepoint (day) Value: 7
  misc_feature: MA Experiment 20001904 PARAMETER Experiment Name: At_Drought_Reproduction_P Parameter: Tissue Value: Rosettes
  misc_feature: MA Experiment 20001904 PARAMETER Experiment Name: At_Drought_Reproduction_P Parameter: Treatment Value: Drought vs. No Drought
  misc_feature: MA Experiment ID: 20001905 Result: Down-regulated in Transcription
  misc_feature: MA Experiment 20001905 PARAMETER Experiment Name: At_Drought_Reproduction_P Parameter: Age (day) Value: 40
  misc_feature: MA Experiment 20001905 PARAMETER Experiment Name: At_Drought_Reproduction_P Parameter: Organism Value: A. thaliana
  misc_feature: MA Experiment 20001905 PARAMETER Experiment Name: At_Drought_Reproduction_P Parameter: Plant Line Value: WS
  misc_feature: MA Experiment 20001905 PARAMETER Experiment Name: At_Drought_Reproduction_P Parameter: Timepoint (day) Value: 10
  misc_feature: MA Experiment 20001905 PARAMETER Experiment Name: At_Drought_Reproduction_P Parameter: Tissue Value: Rosettes
  misc_feature: MA Experiment 20001905 PARAMETER Experiment Name: At_Drought_Reproduction_P Parameter: Treatment Value: Drought vs. No Drought
  misc_feature: MA Experiment ID: 20001906 Result: Down-regulated in Transcription
  misc_feature: MA Experiment 20001906 PARAMETER Experiment Name: At_Drought_Reproduction_P Parameter: Age (day) Value: 35
  misc_feature: MA Experiment 20001906 PARAMETER Experiment Name: At_Drought_Reproduction_P Parameter: Organism Value: A. thaliana
  misc_feature: MA Experiment 20001906 PARAMETER Experiment Name: At_Drought_Reproduction_P Parameter: Plant Line Value: WS
  misc_feature: MA Experiment 20001906 PARAMETER Experiment Name: At_Drought_Reproduction_P Parameter: Timepoint (day) Value: 5
  misc_feature: MA Experiment 20001906 PARAMETER Experiment Name: At_Drought_Reproduction_P Parameter: Tissue Value: Siliques
  misc_feature: MA Experiment 20001906 PARAMETER Experiment Name: At_Drought_Reproduction_P Parameter: Treatment Value: Drought vs. No Drought
  misc_feature: MA Experiment ID: 20001911 Result: Down-regulated in Transcription
  misc_feature: MA Experiment 20001911 PARAMETER Experiment Name: At_Drought_Reproduction_P Parameter: Age (day) Value: 40
  misc_feature: MA Experiment 20001911 PARAMETER Experiment Name: At_Drought_Reproduction_P Parameter: Organism Value: A. thaliana
  misc_feature: MA Experiment 20001911 PARAMETER Experiment Name: At_Drought_Reproduction_P Parameter: Plant Line Value: WS
  misc_feature: MA Experiment 20001911 PARAMETER Experiment Name: At_Drought_Reproduction_P Parameter: Timepoint (day) Value: 10
  misc_feature: MA Experiment 20001911 PARAMETER Experiment Name: At_Drought_Reproduction_P Parameter: Tissue Value: Flowers
  misc_feature: MA Experiment 20001911 PARAMETER Experiment Name: At_Drought_Reproduction_P Parameter: Treatment Value: Drought vs. No Drought
atggtgttcacaaaatcattacttgttcttctttggttcctctcttgttacactactactacttcatcagctttgtttaatccgccagacaattacttgatctcttgtggctcatcacaaaacataactttccaaaacagaatctttgttccagattcactccactcttctcttgtactcaaaatcggaaactcttctgttgcaacatcaactacttccaacaattcaaccaattccatctaccaaaccgctcgtgttttctccagtttagcttcttacagattcaaaatcacttctttaggtcgacattggatccgtcttcatttctcacctatcaacaactctacttggaacttaacctctgcttcaatcactgtcgtaacagaagacttcgtgctcttgaacaacttctccttcaacaacttcaacggttcttacatcttcaaagagtacacagtcaatgtcacttcagagttcttgactttaagtttcattccttcaaacaattcggtggtctttgtcaacgctattgaagttgtctctgttccggataatcttatccctgatcaagctttggcgttaaacccttcaacaccatttagtggtctctctctgcttgcatttgaaacagtctacagattaaatatgggaggaccattgttgacttctcaaaacgatacattggggagacaatgggataatgatgcagagtatcttcatgtgaacagctctgttcttgttgtaacggcgaatccttcttcgattaagtactctccttctgtgactcaagaaacagctcctaacatggtttatgcaactgctgatacaatgggtgatgctaatgttgcgagtccaagttttaatgttacttgggttcttcctgttgatccagacttcaggtactttgttcgtgttcatttctgtgatattgtgagtcaagctttgaacacgcttgttttcaatctttatgtgaatgatgatcttgctcttggaagtcttgatctctctacgttgactaatggtcttaaagttccttactttaaggattttatctccaatggttctgttgaatcttccggtgttttaaccgttagcgttggacctgattcacaagctgatatcactaatgcgactatgaatgggttagaggttttgaagattagtaacgaagctaagagcttaagtggtgtttcttcggttaagtcgttacttccgggaggatcaggttctaagagcaagaagaaggcagtgatcattggttctttggttggtgcggttacattgattctgctgattgctgtttgttgctattgctgtttggttgcttcaaggaagcagaggtcgacgagtcctcaagaaggcggtaatggacatccgtggttgccattacctttatatggactctctcagactcttactaaatcaaccgcttctcacaagagtgccacagctagttgcatttcattagcttctactcatcttggacgttgctttatgtttcaagaaatcatggacgctactaataagttcgatgagagttcgttgcttggggttggtggatttggccgcgtttataaaggaactttagaagacgggactaaagtcgcggttaaaagaggtaacccgagatcagaacaaggtatggctgagttcagaacagagattgaaatgctgtcaaaactcagacatcgacatctcgtctctcttatcggttactgcgacgagaggtctgaaatgatactggtctatgagtacatggcgaatggaccgttgaggagtcatctatatggagctgatcttcctccattgtcttggaaacaaagactcgagatttgcatcggtgcagcgagaggattacattatctacacaccggtgcatcgcagagcattatacaccgtgatgttaaaaccacgaatatcttactcgacgagaatctagtcgccaaagttgcagactttggactatccaaaaccggcccttcgctcgatcaaacacacgtgagcacggcggttaaaggaagctttggttatctagacccggaatacttcaggagacagcagttaacagagaaatcagacgtttattcgtttggtgttgtactaatggaagtactctgttgtagaccggctttaaacccggtattacctagagaacaagtgaacatagcggaatgggcaatggcgtggcagaaaaagggtctgctagatcaaatcatggacagtaacttaaccgggaaggtgaaccctgcctcgttgaagaaatttggagaaaccgcagagaaatgtttagcggaatacggtgtggaccggccttctatgggagatgtattgtggaatttggagtacgcgttacagctagaagaaacatcttcggctttgatggagcctgatgacaatagtacaaaccacattccagggattccaatggcgccaatggaaccgtttgataacagtatgagtataatcgatagaggaggagtaaattcggggaccgggactgatgatgatgcggaagacgcgactactagtgcggtgttttcgcagcttgttcatcctcgtggaaggtagaagaagaacacatttggtgaaaacaacagcagagacagacattgtttgtttttgaaaaatttatagaaagaaagttatttattgaagacttttgggaacaaacaacaaaatgattcattcagcatttattttcgattttttacggtgtatttgttttgtaatatagtgagtactgatgtttt

SEQ ID NO: 47425 - protein, 855 aa, Arabidopsis thaliana
  peptide (1)..(855): Ceres Seq. ID no. 12591696
  misc_feature (71)..(821): Homolog of NCBI NO: 15240228 NR Description: receptor-like protein kinase precursor - like
  misc_feature (19)..(822): Homolog of NCBI NO: 34898020 NR Description: Similar to putative receptor-like protein kinase
  misc_feature (19)..(855): Homolog of NCBI NO: 25553554 NR Description: OSJNBa0038F22.1 [Oryza sativa (japonica
  misc_feature (6)..(805): Homolog of NCBI NO: 14488367 NR Description: putative protein kinase [Oryza sativa (japonica
  misc_feature (7)..(855): Homolog of NCBI NO: 15234944 NR Description: putative receptor-like protein kinase; protein
  misc_feature (1)..(855): Homolog of NCBI NO: 15226565 NR Description: putative protein kinase; protein id: At2g21480.1
  misc_feature (26)..(469): Homolog of NCBI NO: 15231393 NR Description: receptor protein kinase -like; protein id:
  misc_feature (396)..(855): Homolog of NCBI NO: 15231393 NR Description: receptor protein kinase -like; protein id:
  misc_feature (399)..(855): Homolog of NCBI NO: 15238498 NR Description: receptor-like protein kinase precursor - like
  misc_feature (10)..(485): Homolog of NCBI NO: 15238498 NR Description: receptor-like protein kinase precursor - like
MVFTKSLLVLLWFLSCYTTTTSSALFNPPDNYLISCGSSQNITFQNRIFVPDSLHSSLVLKIGNSSVATSTTSNNSTNSIYQTARVFSSLASYRFKITSLGRHWIRLHFSPINNSTWNLTSASITVVTEDFVLLNNFSFNNFNGSYIFKEYTVNVTSEFLTLSFIPSNNSVVFVNAIEVVSVPDNLIPDQALALNPSTPFSGLSLLAFETVYRLNMGGPLLTSQNDTLGRQWDNDAEYLHVNSSVLVVTANPSSIKYSPSVTQETAPNMVYATADTMGDANVASPSFNVTWVLPVDPDFRYFVRVHFCDIVSQALNTLVFNLYVNDDLALGSLDLSTLTNGLKVPYFKDFISNGSVESSGVLTVSVGPDSQADITNATMNGLEVLKISNEAKSLSGVSSVKSLLPGGSGSKSKKKAVIIGSLVGAVTLILLIAVCCYCCLVASRKQRSTSPQEGGNGHPWLPLPLYGLSQTLTKSTASHKSATASCISLASTHLGRCFMFQEIMDATNKFDESSLLGVGGFGRVYKGTLEDGTKVAVKRGNPRSEQGMAEFRTEIEMLSKLRHRHLVSLIGYCDERSEMILVYEYMANGPLRSHLYGADLPPLSWKQRLEICIGAARGLHYLHTGASQSIIHRDVKTTNILLDENLVAKVADFGLSKTGPSLDQTHVSTAVKGSFGYLDPEYFRRQQLTEKSDVYSFGVVLMEVLCCRPALNPVLPREQVNIAEWAMAWQKKGLLDQIMDSNLTGKVNPASLKKFGETAEKCLAEYGVDRPSMGDVLWNLEYALQLEETSSALMEPDDNSTNHIPGIPMAPMEPFDNSMSIIDRGGVNSGTGTDDDAEDATTSAVFSQLVHPRGR

SEQ ID NO: 47426 - protein, 640 aa, Arabidopsis thaliana
  peptide (1)..(640): Ceres Seq. ID no. 12591697
  misc_feature (1)..(606): Homolog of NCBI NO: 15240228 NR Description: receptor-like protein kinase precursor - like
  misc_feature (1)..(607): Homolog of NCBI NO: 34898020 NR Description: Similar to putative receptor-like protein kinase
  misc_feature (1)..(640): Homolog of NCBI NO: 25553554 NR Description: OSJNBa0038F22.1 [Oryza sativa (japonica
  misc_feature (1)..(590): Homolog of NCBI NO: 14488367 NR Description: putative protein kinase [Oryza sativa (japonica
  misc_feature (1)..(640): Homolog of NCBI NO: 15234944 NR Description: putative receptor-like protein kinase; protein
  misc_feature (1)..(640): Homolog of NCBI NO: 15226565 NR Description: putative protein kinase; protein id: At2g21480.1
  misc_feature (1)..(254): Homolog of NCBI NO: 15231393 NR Description: receptor protein kinase -like; protein id:
  misc_feature (181)..(640): Homolog of NCBI NO: 15231393 NR Description: receptor protein kinase -like; protein id:
  misc_feature (184)..(640): Homolog of NCBI NO: 15238498 NR Description: receptor-like protein kinase precursor - like
  misc_feature (1)..(270): Homolog of NCBI NO: 15238498 NR Description: receptor-like protein kinase precursor - like
MGGPLLTSQNDTLGRQWDNDAEYLHVNSSVLVVTANPSSIKYSPSVTQETAPNMVYATADTMGDANVASPSFNVTWVLPVDPDFRYFVRVHFCDIVSQALNTLVFNLYVNDDLALGSLDLSTLTNGLKVPYFKDFISNGSVESSGVLTVSVGPDSQADITNATMNGLEVLKISNEAKSLSGVSSVKSLLPGGSGSKSKKKAVIIGSLVGAVTLILLIAVCCYCCLVASRKQRSTSPQEGGNGHPWLPLPLYGLSQTLTKSTASHKSATASCISLASTHLGRCFMFQEIMDATNKFDESSLLGVGGFGRVYKGTLEDGTKVAVKRGNPRSEQGMAEFRTEIEMLSKLRHRHLVSLIGYCDERSEMILVYEYMANGPLRSHLYGADLPPLSWKQRLEICIGAARGLHYLHTGASQSIIHRDVKTTNILLDENLVAKVADFGLSKTGPSLDQTHVSTAVKGSFGYLDPEYFRRQQLTEKSDVYSFGVVLMEVLCCRPALNPVLPREQVNIAEWAMAWQKKGLLDQIMDSNLTGKVNPASLKKFGETAEKCLAEYGVDRPSMGDVLWNLEYALQLEETSSALMEPDDNSTNHIPGIPMAPMEPFDNSMSIIDRGGVNSGTGTDDDAEDATTSAVFSQLVHPRGR

SEQ ID NO: 47427 - protein, 587 aa, Arabidopsis thaliana
  peptide (1)..(587): Ceres Seq. ID no. 12591698
  misc_feature (1)..(553): Homolog of NCBI NO: 15240228 NR Description: receptor-like protein kinase precursor - like
  misc_feature (1)..(554): Homolog of NCBI NO: 34898020 NR Description: Similar to putative receptor-like protein kinase
  misc_feature (1)..(587): Homolog of NCBI NO: 25553554 NR Description: OSJNBa0038F22.1 [Oryza sativa (japonica
  misc_feature (1)..(537): Homolog of NCBI NO: 14488367 NR Description: putative protein kinase [Oryza sativa (japonica
  misc_feature (1)..(587): Homolog of NCBI NO: 15234944 NR Description: putative receptor-like protein kinase; protein
  misc_feature (1)..(587): Homolog of NCBI NO: 15226565 NR Description: putative protein kinase; protein id: At2g21480.1
  misc_feature (1)..(201): Homolog of NCBI NO: 15231393 NR Description: receptor protein kinase -like; protein id:
  misc_feature (128)..(587): Homolog of NCBI NO: 15231393 NR Description: receptor protein kinase -like; protein id:
  misc_feature (131)..(587): Homolog of NCBI NO: 15238498 NR Description: receptor-like protein kinase precursor - like
  misc_feature (1)..(217): Homolog of NCBI NO: 15238498 NR Description: receptor-like protein kinase precursor - like
MVYATADTMGDANVASPSFNVTWVLPVDPDFRYFVRVHFCDIVSQALNTLVFNLYVNDDLALGSLDLSTLTNGLKVPYFKDFISNGSVESSGVLTVSVGPDSQADITNATMNGLEVLKISNEAKSLSGVSSVKSLLPGGSGSKSKKKAVIIGSLVGAVTLILLIAVCCYCCLVASRKQRSTSPQEGGNGHPWLPLPLYGLSQTLTKSTASHKSATASCISLASTHLGRCFMFQEIMDATNKFDESSLLGVGGFGRVYKGTLEDGTKVAVKRGNPRSEQGMAEFRTEIEMLSKLRHRHLVSLIGYCDERSEMILVYEYMANGPLRSHLYGADLPPLSWKQRLEICIGAARGLHYLHTGASQSIIHRDVKTTNILLDENLVAKVADFGLSKTGPSLDQTHVSTAVKGSFGYLDPEYFRRQQLTEKSDVYSFGVVLMEVLCCRPALNPVLPREQVNIAEWAMAWQKKGLLDQIMDSNLTGKVNPASLKKFGETAEKCLAEYGVDRPSMGDVLWNLEYALQLEETSSALMEPDDNSTNHIPGIPMAPMEPFDNSMSIIDRGGVNSGTGTDDDAEDATTSAVFSQLVHPRGR

SEQ ID NO: 47428 - DNA, 926 bp, Arabidopsis thaliana
  misc_feature (1)..(926): Ceres Seq. ID no. 14304392
  misc_feature: MA Experiment ID: 20000179 Result: Down-regulated in Transcription
  misc_feature: MA Experiment 20000179 PARAMETER Experiment Name: At_Germinating_Seeds_P Parameter: Age (hr) Value: 6 vs. 0
  misc_feature: MA Experiment 20000179 PARAMETER Experiment Name: At_Germinating_Seeds_P Parameter: Tissue Value: Germinating Seeds
  misc_feature: MA Experiment ID: 20000180 Result: Down-regulated in Transcription
  misc_feature: MA Experiment 20000180 PARAMETER Experiment Name: At_Germinating_Seeds_P Parameter: Age (hr) Value: 24 vs. 0
  misc_feature: MA Experiment 20000180 PARAMETER Experiment Name: At_Germinating_Seeds_P Parameter: Tissue Value: Germinating Seeds
  misc_feature: MA Experiment ID: 20000264 Result: Up-regulated in Transcription
  misc_feature: MA Experiment 20000264 PARAMETER Experiment Name: At_Open_Flower_P Parameter: Age (day) Value: 21
  misc_feature: MA Experiment 20000264 PARAMETER Experiment Name: At_Open_Flower_P Parameter: Plant Line Value: WS
  misc_feature: MA Experiment 20000264 PARAMETER Experiment Name: At_Open_Flower_P Parameter: Tissue Value: Open Flower vs. Whole Plant
  misc_feature: MA Experiment ID: 20000286 Result: Up-regulated in Transcription
  misc_feature: MA Experiment 20000286 PARAMETER Experiment Name: At_Open_Flower_P Parameter: Age (day) Value: 21
  misc_feature: MA Experiment 20000286 PARAMETER Experiment Name: At_Open_Flower_P Parameter: Plant Line Value: WS
  misc_feature: MA Experiment 20000286 PARAMETER Experiment Name: At_Open_Flower_P Parameter: Tissue Value: Half Open vs. Whole Plant
ggatttgcttctccgatgtcaatcccaccatcttcaggttcttcttcttcatcttcctcgtctcagtacacatacgcagctaattcttactattccgctccgtatcagcctccacagccttacgcggcggcgccttcgcctgctgtaccggcgcctgtggcatccattcccggagctacggtctatcctcagcctgttggaccggttcctgccgtctacgcttaccctcagtaccaacaggcacatcaattgttccaaagagatgcacagacaattacaccagaagctcttgagaatgtaaaagctgctttggcaagtagtgaaaccgaacacaaagcagaaactaaaaagagagccattcctcgtaaagctgctggacagtcttgggaggatcctactctttcagaatggccagaaaatgactatcgtctgttctgtggtgatcttgggaacgaagtgaatgatgatgttctttccaaagcatttgctagattccccaccttcaatatggccaaggtcattagagataagcggactggtaaaaccaagggttatgggtttgtgagtttcttaaatcctgcggatccagcagcagccttaaaagaaatgaatggtaagtatgttggaaatcgtccgataaaactacgaaagagtagctggaaagagagaacagatcaggaggctgctgaaagacaaaagcatcacagcaataagaagcaaaaaactgtgaagaagagcatacttcacaagtgacgatctcttttatttttgtggcttaaaatttccaaacctgttactcataaatataaatgaacaaacattatcattagttttgttgaaaacggtatggttatgtattgttgggctgctatgtttagctttagccccaacgcggtggtatttactttatgaaaacgtgtgtccac

SEQ ID NO: 47429 - protein, 250 aa, Arabidopsis thaliana
  peptide (1)..(250): Ceres Seq. ID no. 14304393
  misc_feature (144)..(215): Pfam Name: RNA recognition motif. (a.k.a. RRM, RBD, or RNP domain) Pfam Description: RNA recognition motif. (a.k.a. RRM, RBD, or RNP
  misc_feature (4)..(233): Homolog of NCBI NO: 21357051 NR Description: CG2931-PA [Drosophila melanogaster]
  misc_feature (34)..(233): Homolog of NCBI NO: 39582665 NR Description: Hypothetical protein CBG21313 [Caenorhabditis
  misc_feature (35)..(233): Homolog of NCBI NO: 17556216 NR Description: protein conserved like (3G242) [Caenorhabditis
  misc_feature (96)..(233): Homolog of NCBI NO: 21594922 NR Description: hypothetical protein MGC10433 [Homo sapiens]
  misc_feature (96)..(233): Homolog of NCBI NO: 21359951 NR Description: hypothetical protein MGC10433 [Homo sapiens]
  misc_feature (96)..(233): Homolog of NCBI NO: 34855705 NR Description: similar to RIKEN cDNA 3100004P22 [Rattus
  misc_feature (96)..(233): Homolog of NCBI NO: 12804031 NR Description: Unknown (protein for MGC:10433) [Homo sapiens]
  misc_feature (96)..(233): Homolog of NCBI NO: 19526864 NR Description: RIKEN cDNA 3100004P22 [Mus musculus]
  misc_feature (96)..(233): Homolog of NCBI NO: 2098575 NR Description: F25451_2 [Homo sapiens]
  misc_feature (6)..(250): Homolog of NCBI NO: 15229308 NR Description: RNA recognition motif (RRM)-containing protein
GFASPMSIPPSSGSSSSSSSSQYTYAANSYYSAPYQPPQPYAAAPSPAVPAPVASIPGATVYPQPVGPVPAVYAYPQYQQAHQLFQRDAQTITPEALENVKAALASSETEHKAETKKRAIPRKAAGQSWEDPTLSEWPENDYRLFCGDLGNEVNDDVLSKAFARFPTFNMAKVIRDKRTGKTKGYGFVSFLNPADPAAALKEMNGKYVGNRPIKLRKSSWKERTDQEAAERQKHHSNKKQKTVKKSILHK

SEQ ID NO: 47430 - protein, 245 aa, Arabidopsis thaliana
  peptide (1)..(245): Ceres Seq. ID no. 14304394
  misc_feature (139)..(210): Pfam Name: RNA recognition motif. (a.k.a. RRM, RBD, or RNP domain) Pfam Description: RNA recognition motif. (a.k.a. RRM, RBD, or RNP
  misc_feature (1)..(228): Homolog of NCBI NO: 21357051 NR Description: CG2931-PA [Drosophila melanogaster]
  misc_feature (29)..(228): Homolog of NCBI NO: 39582665 NR Description: Hypothetical protein CBG21313 [Caenorhabditis
  misc_feature (30)..(228): Homolog of NCBI NO: 17556216 NR Description: protein conserved like (3G242) [Caenorhabditis
  misc_feature (91)..(228): Homolog of NCBI NO: 12804031 NR Description: Unknown (protein for MGC:10433) [Homo sapiens]
  misc_feature (91)..(228): Homolog of NCBI NO: 19526864 NR Description: RIKEN cDNA 3100004P22 [Mus musculus]
  misc_feature (91)..(228): Homolog of NCBI NO: 21359951 NR Description: hypothetical protein MGC10433 [Homo sapiens]
  misc_feature (91)..(228): Homolog of NCBI NO: 21594922 NR Description: hypothetical protein MGC10433 [Homo sapiens]
  misc_feature (91)..(228): Homolog of NCBI NO: 34855705 NR Description: similar to RIKEN cDNA 3100004P22 [Rattus
  misc_feature (91)..(228): Homolog of NCBI NO: 2098575 NR Description: F25451_2 [Homo sapiens]
  misc_feature (1)..(245): Homolog of NCBI NO: 15229308 NR Description: RNA recognition motif (RRM)-containing protein
MSIPPSSGSSSSSSSSQYTYAANSYYSAPYQPPQPYAAAPSPAVPAPVASIPGATVYPQPVGPVPAVYAYPQYQQAHQLFQRDAQTITPEALENVKAALASSETEHKAETKKRAIPRKAAGQSWEDPTLSEWPENDYRLFCGDLGNEVNDDVLSKAFARFPTFNMAKVIRDKRTGKTKGYGFVSFLNPADPAAALKEMNGKYVGNRPIKLRKSSWKERTDQEAAERQKHHSNKKQKTVKKSILHK

SEQ ID NO: 47431 - DNA, 1453 bp, Arabidopsis thaliana
  misc_feature (1)..(1453): Ceres Seq. ID no. 12601489
  misc_feature: MA Experiment ID: 20000171 Result: Down-regulated in Transcription
  misc_feature: MA Experiment 20000171 PARAMETER Experiment Name: At_42deg_Heat_P Parameter: Age (day) Value: 14
  misc_feature: MA Experiment 20000171 PARAMETER Experiment Name: At_42deg_Heat_P Parameter: Organism Value: A. thaliana
  misc_feature: MA Experiment 20000171 PARAMETER Experiment Name: At_42deg_Heat_P Parameter: Plant Line Value: WS
  misc_feature: MA Experiment 20000171 PARAMETER Experiment Name: At_42deg_Heat_P Parameter: Temperature (deg C) Value: 42 vs. 22
  misc_feature: MA Experiment 20000171 PARAMETER Experiment Name: At_42deg_Heat_P Parameter: Timepoint (hr) Value: 1
  misc_feature: MA Experiment 20000171 PARAMETER Experiment Name: At_42deg_Heat_P Parameter: Tissue Value: Aerial
  misc_feature: MA Experiment ID: 20000173 Result: Down-regulated in Transcription
  misc_feature: MA Experiment 20000173 PARAMETER Experiment Name: At_42deg_Heat_P Parameter: Age (day) Value: 14
  misc_feature: MA Experiment 20000173 PARAMETER Experiment Name: At_42deg_Heat_P Parameter: Organism Value: A. thaliana
  misc_feature: MA Experiment 20000173 PARAMETER Experiment Name: At_42deg_Heat_P Parameter: Plant Line Value: WS
  misc_feature: MA Experiment 20000173 PARAMETER Experiment Name: At_42deg_Heat_P Parameter: Temperature (deg C) Value: 42 vs. 22
  misc_feature: MA Experiment 20000173 PARAMETER Experiment Name: At_42deg_Heat_P Parameter: Timepoint (hr) Value: 6
  misc_feature: MA Experiment 20000173 PARAMETER Experiment Name: At_42deg_Heat_P Parameter: Tissue Value: Aerial
  misc_feature: MA Experiment ID: 20000184 Result: Down-regulated in Transcription
  misc_feature: MA Experiment 20000184 PARAMETER Experiment Name: At_Shoots__P Parameter: Age (day) Value: 7
  misc_feature: MA Experiment 20000184 PARAMETER Experiment Name: At_Shoots__P Parameter: Tissue Value: Shoots vs. Whole Plant
  misc_feature: MA Experiment ID: 20000227 Result: Down-regulated in Transcription
  misc_feature: MA Experiment 20000227 PARAMETER Experiment Name: At_Root-Tips-vs-Tops_P Parameter: Tissue Value: Root Tips vs. Root Tops
  misc_feature: MA Experiment ID: 20000234 Result: Down-regulated in Transcription
  misc_feature: MA Experiment 20000234 PARAMETER Experiment Name: At_Siliques_P Parameter: Age (day) Value: 21
  misc_feature: MA Experiment 20000234 PARAMETER Experiment Name: At_Siliques_P Parameter: Organism Value: A. thaliana
  misc_feature: MA Experiment 20000234 PARAMETER Experiment Name: At_Siliques_P Parameter: Plant Line Value: WS
  misc_feature: MA Experiment 20000234 PARAMETER Experiment Name: At_Siliques_P Parameter: Tissue Value: Less Than 5mm Siliques vs. Whole Plant
  misc_feature: MA Experiment ID: 20000264 Result: Down-regulated in Transcription
  misc_feature: MA Experiment 20000264 PARAMETER Experiment Name: At_Open_Flower_P Parameter: Age (day) Value: 21
  misc_feature: MA Experiment 20000264 PARAMETER Experiment Name: At_Open_Flower_P Parameter: Plant Line Value: WS
  misc_feature: MA Experiment 20000264 PARAMETER Experiment Name: At_Open_Flower_P Parameter: Tissue Value: Open Flower vs. Whole Plant
  misc_feature: MA Experiment ID: 20000265 Result: Down-regulated in Transcription
  misc_feature: MA Experiment 20000265 PARAMETER Experiment Name: At_Open_Flower_P Parameter: Age (day) Value: 21
  misc_feature: MA Experiment 20000265 PARAMETER Experiment Name: At_Open_Flower_P Parameter: Plant Line Value: WS
  misc_feature: MA Experiment 20000265 PARAMETER Experiment Name: At_Open_Flower_P Parameter: Tissue Value: Closed Flower vs. Whole Plant
  misc_feature: MA Experiment ID: 20000438 Result: Down-regulated in Transcription
  misc_feature: MA Experiment 20000438 PARAMETER Experiment Name: At_Shoots__P Parameter: Age (day) Value: 14
  misc_feature: MA Experiment 20000438 PARAMETER Experiment Name: At_Shoots__P Parameter: Tissue Value: Shoots vs. Whole Plant
  misc_feature: MA Experiment ID: 20000794 Result: Down-regulated in Transcription
  misc_feature: MA Experiment 20000794 PARAMETER Experiment Name: At_Petals_P Parameter: Age (day) Value: 23-25 days
  misc_feature: MA Experiment 20000794 PARAMETER Experiment Name: At_Petals_P Parameter: Plant Line Value: WS
  misc_feature: MA Experiment 20000794 PARAMETER Experiment Name: At_Petals_P Parameter: Tissue Value: Petals vs. Whole plant
  misc_feature: MA Experiment ID: 20001248 Result: Up-regulated in Transcription
  misc_feature: MA Experiment 20001248 PARAMETER Experiment Name: At_Far-red-induction_P Parameter: Age (day) Value: 7
  misc_feature: MA Experiment 20001248 PARAMETER Experiment Name: At_Far-red-induction_P Parameter: Light Value: Far-red vs. White
  misc_feature: MA Experiment 20001248 PARAMETER Experiment Name: At_Far-red-induction_P Parameter: Organism Value: A. thaliana
  misc_feature: MA Experiment 20001248 PARAMETER Experiment Name: At_Far-red-induction_P Parameter: Plant Line Value: Columbia
  misc_feature: MA Experiment 20001248 PARAMETER Experiment Name: At_Far-red-induction_P Parameter: Timepoint (hr) Value: 4
  misc_feature: MA Experiment 20001248 PARAMETER Experiment Name: At_Far-red-induction_P Parameter: Tissue Value: Whole Plant
  misc_feature: MA Experiment ID: 20001450 Result: Up-regulated in Transcription
  misc_feature: MA Experiment 20001450 PARAMETER Experiment Name: At_Far-red-induction_P Parameter: Age (day) Value: 7
  misc_feature: MA Experiment 20001450 PARAMETER Experiment Name: At_Far-red-induction_P Parameter: Light Value: Far-red vs. White
  misc_feature: MA Experiment 20001450 PARAMETER Experiment Name: At_Far-red-induction_P Parameter: Organism Value: A. thaliana
  misc_feature: MA Experiment 20001450 PARAMETER Experiment Name: At_Far-red-induction_P Parameter: Plant Line Value: Columbia
  misc_feature: MA Experiment 20001450 PARAMETER Experiment Name: At_Far-red-induction_P Parameter: Timepoint (hr) Value: 8
  misc_feature: MA Experiment 20001450 PARAMETER Experiment Name: At_Far-red-induction_P Parameter: Tissue Value: Whole Plant
  misc_feature: MA Experiment ID: 20001560 Result: Down-regulated in Transcription
  misc_feature: MA Experiment 20001560 PARAMETER Experiment Name: At_Drought_Soil_Dry_P Parameter: Age (day) Value: 28
  misc_feature: MA Experiment 20001560 PARAMETER Experiment Name: At_Drought_Soil_Dry_P Parameter: Organism Value: A. thaliana
  misc_feature: MA Experiment 20001560 PARAMETER Experiment Name: At_Drought_Soil_Dry_P Parameter: Plant Line Value: WS
  misc_feature: MA Experiment 20001560 PARAMETER Experiment Name: At_Drought_Soil_Dry_P Parameter: Post Timepoint (hr) Value: None
  misc_feature: MA Experiment 20001560 PARAMETER Experiment Name: At_Drought_Soil_Dry_P Parameter: Post-Treatment Value: None
  misc_feature: MA Experiment 20001560 PARAMETER Experiment Name: At_Drought_Soil_Dry_P Parameter: Timepoint (day) Value: 14
  misc_feature: MA Experiment 20001560 PARAMETER Experiment Name: At_Drought_Soil_Dry_P Parameter: Treatment Value: Drought vs. No Drought
  misc_feature: MA Experiment ID: 20001904 Result: Down-regulated in Transcription
  misc_feature: MA Experiment 20001904 PARAMETER Experiment Name: At_Drought_Reproduction_P Parameter: Age (day) Value: 37
  misc_feature: MA Experiment 20001904 PARAMETER Experiment Name: At_Drought_Reproduction_P Parameter: Organism Value: A. thaliana
  misc_feature: MA Experiment 20001904 PARAMETER Experiment Name: At_Drought_Reproduction_P Parameter: Plant Line Value: WS
  misc_feature: MA Experiment 20001904 PARAMETER Experiment Name: At_Drought_Reproduction_P Parameter: Timepoint (day) Value: 7
  misc_feature: MA Experiment 20001904 PARAMETER Experiment Name: At_Drought_Reproduction_P Parameter: Tissue Value: Rosettes
  misc_feature: MA Experiment 20001904 PARAMETER Experiment Name: At_Drought_Reproduction_P Parameter: Treatment Value: Drought vs. No Drought
  misc_feature: MA Experiment ID: 20001905 Result: Down-regulated in Transcription
  misc_feature: MA Experiment 20001905 PARAMETER Experiment Name: At_Drought_Reproduction_P Parameter: Age (day) Value: 40
  misc_feature: MA Experiment 20001905 PARAMETER Experiment Name: At_Drought_Reproduction_P Parameter: Organism Value: A. thaliana
  misc_feature: MA Experiment 20001905 PARAMETER Experiment Name: At_Drought_Reproduction_P Parameter: Plant Line Value: WS
  misc_feature: MA Experiment 20001905 PARAMETER Experiment Name: At_Drought_Reproduction_P Parameter: Timepoint (day) Value: 10
  misc_feature: MA Experiment 20001905 PARAMETER Experiment Name: At_Drought_Reproduction_P Parameter: Tissue Value: Rosettes
  misc_feature: MA Experiment 20001905 PARAMETER Experiment Name: At_Drought_Reproduction_P Parameter: Treatment Value: Drought vs. No Drought
  misc_feature: MA Experiment ID: 20001906 Result: Down-regulated in Transcription
  misc_feature: MA Experiment 20001906 PARAMETER Experiment Name: At_Drought_Reproduction_P Parameter: Age (day) Value: 35
  misc_feature: MA Experiment 20001906 PARAMETER Experiment Name: At_Drought_Reproduction_P Parameter: Organism Value: A. thaliana
  misc_feature: MA Experiment 20001906 PARAMETER Experiment Name: At_Drought_Reproduction_P Parameter: Plant Line Value: WS
  misc_feature: MA Experiment 20001906 PARAMETER Experiment Name: At_Drought_Reproduction_P Parameter: Timepoint (day) Value: 5
  misc_feature: MA Experiment 20001906 PARAMETER Experiment Name: At_Drought_Reproduction_P Parameter: Tissue Value: Siliques
  misc_feature: MA Experiment 20001906 PARAMETER Experiment Name: At_Drought_Reproduction_P Parameter: Treatment Value: Drought vs. No Drought
  misc_feature: MA Experiment ID: 20001908 Result: Down-regulated in Transcription
  misc_feature: MA Experiment 20001908 PARAMETER Experiment Name: At_Drought_Reproduction_P Parameter: Age (day) Value: 40
  misc_feature: MA Experiment 20001908 PARAMETER Experiment Name: At_Drought_Reproduction_P Parameter: Organism Value: A. thaliana
  misc_feature: MA Experiment 20001908 PARAMETER Experiment Name: At_Drought_Reproduction_P Parameter: Plant Line Value: WS
  misc_feature: MA Experiment 20001908 PARAMETER Experiment Name: At_Drought_Reproduction_P Parameter: Timepoint (day) Value: 10
  misc_feature: MA Experiment 20001908 PARAMETER Experiment Name: At_Drought_Reproduction_P Parameter: Tissue Value: Siliques
  misc_feature: MA Experiment 20001908 PARAMETER Experiment Name: At_Drought_Reproduction_P Parameter: Treatment Value: Drought vs. No Drought
cgctctcagaatcctcttttaagtctctgtttcataaataaaactaataaagaagaagaagaaaacagagcaattaaagtccttaaatcttcttcttctccaattcaatggctcttccgttgccattgatcttccttatcttctctcatttgttcgtttctggagttagatcaacgagcttcattatggtgaacaaatgcgaatacacagtctggcctggacttttatcaaacgccggagttccaccacttccgacgaccggattcgttctccaaaaaggcgaagaacgaacaatcagcgctccaacttcatggggaggaagattctgggggagaactcaatgttccaccgacaccgacggaaaattcacttgtctcaccggagattgcggatctggtaccctcgaatgctccggatccggagcaacaccaccagcaacactagcggaattcacactagacggatctaacggactcgatttctacgacgttagtctcgtcgacggttacaacgtcccgatgctagtggctccacaaggaggctcgggtttaaactgtagcagcaccggatgcgttgtagatctgaacggttcgtgtccgtcggagcttaaagtgacgagtttagacggcagaggtaaacaatccatgggatgtaaaagcgcgtgtgaagcttttcgtacgccggagtattgttgcagcggcgcccacggtacacctgacacgtgtaaaccgtcgtcgtactcgttgatgtttaaaactgcgtgtccacgtgcttacagctacgcttacgatgatcagagtagtaccttcacatgtgctgaatctcctaattacgttatcacgttttgccctactcctaacaccagtcaaaaatcatctcaagatcagagcccagatcccaaaccgacgacaccaaccgggacgtcgtcgacaactcctgccggagatagtagtacgacgtggtcaccggtagatacatcaatgatatacgaaggagctttggatcaaaacaaaggatcaccgtccacgtgtcatctttcgttatgtggaatcacagtcacacttgcgctggccttttgtcggatgtggcggctcttttgacacctaactttgtctcccgcgtaaaacactgaagaatgtgggccctcactgacgaaagccttatctcgttccggcccatgtgaaccggttattcccgaacgacgtcggattgggtcagagttgagaaaaaaagttaacaacaccctacagttacgaaaatatccttcattcatgttcatgggagaattcttaatttgggtgaggaacacgtgggcaagaaagtgggctgctggtggagttcataaaagatgggaatgtttaattgtaaggtcagaatatttatttgatttataatgtaactaggattagaagaatattatgtacactatataaagcagtaatctatttagttt

SEQ ID NO: 47432 - protein, 330 aa, Arabidopsis thaliana
  peptide (1)..(330): Ceres Seq. ID no. 12601490
  misc_feature (29)..(248): Pfam Name: Thaumatin family Pfam Description: Thaumatin family
  misc_feature (29)..(248): Pfam Name: Thaumatin family Pfam Description: Thaumatin family
  misc_feature (5)..(258): Homolog of NCBI NO: 1235680 NR Description: receptor serine/threonine kinase PR5K
  misc_feature (1)..(262): Homolog of NCBI NO: 37531042 NR Description: putative thaumatin-like protein
  misc_feature (9)..(251): Homolog of NCBI NO: 15227907 NR Description: putative thaumatin-like pathogenesis-related
  misc_feature (11)..(255): Homolog of NCBI NO: 6273383 NR Description: SCUTL1 [Vitis vinifera]
  misc_feature (5)..(252): Homolog of NCBI NO: 4239765 NR Description: putative thaumatin-like protein precursor
  misc_feature (5)..(258): Homolog of NCBI NO: 1235680 NR Description: receptor serine/threonine kinase PR5K
  misc_feature (9)..(251): Homolog of NCBI NO: 15227907 NR Description: putative thaumatin-like pathogenesis-related
  misc_feature (5)..(252): Homolog of NCBI NO: 4239765 NR Description: putative thaumatin-like protein precursor
  misc_feature (1)..(330): Homolog of NCBI NO: 15222875 NR Description: thaumatin, putative
  misc_feature (1)..(252): Homolog of NCBI NO: 4105697 NR Description: thaumatin-like protein [Arabidopsis thaliana]
  misc_feature (9)..(330): Homolog of NCBI NO: 25296204 NR Description: hypothetical protein T20H2.19 [imported] -
  misc_feature (22)..(330): Homolog of NCBI NO: 30686652 NR Description: thaumatin family [Arabidopsis thaliana]
  misc_feature (8)..(288): Homolog of NCBI NO: 15233437 NR Description: thaumatin-like protein
  misc_feature (11)..(255): Homolog of NCBI NO: 6273383 NR Description: SCUTL1 [Vitis vinifera]
  misc_feature (1)..(262): Homolog of NCBI NO: 37531042 NR Description: putative thaumatin-like protein
  misc_feature (8)..(288): Homolog of NCBI NO: 15233437 NR Description: thaumatin-like protein
  misc_feature (22)..(330): Homolog of NCBI NO: 30686652 NR Description: thaumatin family [Arabidopsis thaliana]
  misc_feature (9)..(330): Homolog of NCBI NO: 25296204 NR Description: hypothetical protein T20H2.19 [imported] -
  misc_feature (1)..(252): Homolog of NCBI NO: 4105697 NR Description: thaumatin-like protein [Arabidopsis thaliana]
  misc_feature (1)..(330): Homolog of NCBI NO: 15222875 NR Description: thaumatin, putative
MALPLPLIFLIFSHLFVSGVRSTSFIMVNKCEYTVWPGLLSNAGVPPLPTTGFVLQKGEERTISAPTSWGGRFWGRTQCSTDTDGKFTCLTGDCGSGTLECSGSGATPPATLAEFTLDGSNGLDFYDVSLVDGYNVPMLVAPQGGSGLNCSSTGCVVDLNGSCPSELKVTSLDGRGKQSMGCKSACEAFRTPEYCCSGAHGTPDTCKPSSYSLMFKTACPRAYSYAYDDQSSTFTCAESPNYVITFCPTPNTSQKSSQDQSPDPKPTTPTGTSSTTPAGDSSTTWSPVDTSMIYEGALDQNKGSPSTCHLSLCGITVTLALAFCRMWRLF

SEQ ID NO: 47433 - protein, 304 aa, Arabidopsis thaliana
  peptide (1)..(304): Ceres Seq. ID no. 12601491
  misc_feature (3)..(222): Pfam Name: Thaumatin family Pfam Description: Thaumatin family
  misc_feature (3)..(222): Pfam Name: Thaumatin family Pfam Description: Thaumatin family
  misc_feature (1)..(232): Homolog of NCBI NO: 1235680 NR Description: receptor serine/threonine kinase PR5K
  misc_feature (1)..(236): Homolog of NCBI NO: 37531042 NR Description: putative thaumatin-like protein
  misc_feature (1)..(225): Homolog of NCBI NO: 15227907 NR Description: putative thaumatin-like pathogenesis-related
  misc_feature (1)..(229): Homolog of NCBI NO: 6273383 NR Description: SCUTL1 [Vitis vinifera]
  misc_feature (1)..(226): Homolog of NCBI NO: 4239765 NR Description: putative thaumatin-like protein precursor
  misc_feature (1)..(232): Homolog of NCBI NO: 1235680 NR Description: receptor serine/threonine kinase PR5K
  misc_feature (1)..(225): Homolog of NCBI NO: 15227907 NR Description: putative thaumatin-like pathogenesis-related
  misc_feature (1)..(226): Homolog of NCBI NO: 4239765 NR Description: putative thaumatin-like protein precursor
  misc_feature (1)..(304): Homolog of NCBI NO: 15222875 NR Description: thaumatin, putative
  misc_feature (1)..(226): Homolog of NCBI NO: 4105697 NR Description: thaumatin-like protein [Arabidopsis thaliana]
  misc_feature (1)..(304): Homolog of NCBI NO: 25296204 NR Description: hypothetical protein T20H2.19 [imported] -
  misc_feature (1)..(304): Homolog of NCBI NO: 30686652 NR Description: thaumatin family [Arabidopsis thaliana]
  misc_feature (1)..(262): Homolog of NCBI NO: 15233437 NR Description: thaumatin-like protein
  misc_feature (1)..(229): Homolog of NCBI NO: 6273383 NR Description: SCUTL1 [Vitis vinifera]
  misc_feature (1)..(236): Homolog of NCBI NO: 37531042 NR Description: putative thaumatin-like protein
  misc_feature (1)..(262): Homolog of NCBI NO: 15233437 NR Description: thaumatin-like protein
  misc_feature (1)..(304): Homolog of NCBI NO: 30686652 NR Description: thaumatin family [Arabidopsis thaliana]
  misc_feature (1)..(304): Homolog of NCBI NO: 25296204 NR Description: hypothetical protein T20H2.19 [imported] -
  misc_feature (1)..(226): Homolog of NCBI NO: 4105697 NR Description: thaumatin-like protein [Arabidopsis thaliana]
  misc_feature (1)..(304): Homolog of NCBI NO: 15222875 NR Description: thaumatin, putative
MVNKCEYTVWPGLLSNAGVPPLPTTGFVLQKGEERTISAPTSWGGRFWGRTQCSTDTDGKFTCLTGDCGSGTLECSGSGATPPATLAEFTLDGSNGLDFYDVSLVDGYNVPMLVAPQGGSGLNCSSTGCVVDLNGSCPSELKVTSLDGRGKQSMGCKSACEAFRTPEYCCSGAHGTPDTCKPSSYSLMFKTACPRAYSYAYDDQSSTFTCAESPNYVITFCPTPNTSQKSSQDQSPDPKPTTPTGTSSTTPAGDSSTTWSPVDTSMIYEGALDQNKGSPSTCHLSLCGITVTLALAFCRMWRLF

SEQ ID NO: 47434 - protein, 193 aa, Arabidopsis thaliana
  peptide (1)..(193): Ceres Seq. ID no. 12601492
  misc_feature (1)..(111): Pfam Name: Thaumatin family Pfam Description: Thaumatin family
  misc_feature (1)..(111): Pfam Name: Thaumatin family Pfam Description: Thaumatin family
  misc_feature (1)..(121): Homolog of NCBI NO: 1235680 NR Description: receptor serine/threonine kinase PR5K
  misc_feature (1)..(125): Homolog of NCBI NO: 37531042 NR Description: putative thaumatin-like protein
  misc_feature (1)..(114): Homolog of NCBI NO: 15227907 NR Description: putative thaumatin-like pathogenesis-related
  misc_feature (1)..(118): Homolog of NCBI NO: 6273383 NR Description: SCUTL1 [Vitis vinifera]
  misc_feature (1)..(115): Homolog of NCBI NO: 4239765 NR Description: putative thaumatin-like protein precursor
  misc_feature (1)..(121): Homolog of NCBI NO: 1235680 NR Description: receptor serine/threonine kinase PR5K
  misc_feature (1)..(114): Homolog of NCBI NO: 15227907 NR Description: putative thaumatin-like pathogenesis-related
  misc_feature (1)..(115): Homolog of NCBI NO: 4239765 NR Description: putative thaumatin-like protein precursor
  misc_feature (1)..(193): Homolog of NCBI NO: 15222875 NR Description: thaumatin, putative
  misc_feature (1)..(115): Homolog of NCBI NO: 4105697 NR Description: thaumatin-like protein [Arabidopsis thaliana]
  misc_feature (1)..(193): Homolog of NCBI NO: 25296204 NR Description: hypothetical protein T20H2.19 [imported] -
  misc_feature (1)..(193): Homolog of NCBI NO: 30686652 NR Description: thaumatin family [Arabidopsis thaliana]
  misc_feature (1)..(151): Homolog of NCBI NO: 15233437 NR Description: thaumatin-like protein
  misc_feature (1)..(118): Homolog of NCBI NO: 6273383 NR Description: SCUTL1 [Vitis vinifera]
  misc_feature (1)..(125): Homolog of NCBI NO: 37531042 NR Description: putative thaumatin-like protein
  misc_feature (1)..(151): Homolog of NCBI NO: 15233437 NR Description: thaumatin-like protein
  misc_feature (1)..(193): Homolog of NCBI NO: 30686652 NR Description: thaumatin family [Arabidopsis thaliana]
  misc_feature (1)..(193): Homolog of NCBI NO: 25296204 NR Description: hypothetical protein T20H2.19 [imported] -
  misc_feature (1)..(115): Homolog of NCBI NO: 4105697 NR Description: thaumatin-like protein [Arabidopsis thaliana]
  misc_feature (1)..(193): Homolog of NCBI NO: 15222875 NR Description: thaumatin, putative
MLVAPQGGSGLNCSSTGCVVDLNGSCPSELKVTSLDGRGKQSMGCKSACEAFRTPEYCCSGAHGTPDTCKPSSYSLMFKTACPRAYSYAYDDQSSTFTCAESPNYVITFCPTPNTSQKSSQDQSPDPKPTTPTGTSSTTPAGDSSTTWSPVDTSMIYEGALDQNKGSPSTCHLSLCGITVTLALAFCRMWRLF

SEQ ID NO: 47435 - DNA, 1066 bp, Arabidopsis thaliana; identical to SEQ ID NO: 47008
  misc_feature (1)..(1066): Ceres Seq. ID no. 12576107
  misc_feature: MA Experiment ID: 20000185 Result: Down-regulated in Transcription
  misc_feature: MA Experiment 20000185 PARAMETER Experiment Name: At_Roots__P Parameter: Age (day) Value: 7 vs. 21
  misc_feature: MA Experiment 20000185 PARAMETER Experiment Name: At_Roots__P Parameter: Organism Value: A. thaliana
  misc_feature: MA Experiment 20000185 PARAMETER Experiment Name: At_Roots__P Parameter: Tissue Value: Roots vs. Whole Plant
  misc_feature: MA Experiment ID: 20000439 Result: Down-regulated in Transcription
  misc_feature: MA Experiment 20000439 PARAMETER Experiment Name: At_Roots__P Parameter: Age (day) Value: 14 vs. 21
  misc_feature: MA Experiment 20000439 PARAMETER Experiment Name: At_Roots__P Parameter: Organism Value: A. thaliana
  misc_feature: MA Experiment 20000439 PARAMETER Experiment Name: At_Roots__P Parameter: Tissue Value: Roots vs. Whole Plant
  misc_feature: MA Experiment ID: 20000495 Result: Down-regulated in Transcription
  misc_feature: MA Experiment 20000495 PARAMETER Experiment Name: At_Guard_Cells_P Parameter: Harvest Date Value: 8/2/2002
  misc_feature: MA Experiment 20000495 PARAMETER Experiment Name: At_Guard_Cells_P Parameter: Organism Value: A. thaliana
  misc_feature: MA Experiment 20000495 PARAMETER Experiment Name: At_Guard_Cells_P Parameter: Tissue Value: Guard Cells vs. Leaves
  misc_feature: MA Experiment ID: 20001450 Result: Down-regulated in Transcription
  misc_feature: MA Experiment 20001450 PARAMETER Experiment Name: At_Far-red-induction_P Parameter: Age (day) Value: 7
  misc_feature: MA Experiment 20001450 PARAMETER Experiment Name: At_Far-red-induction_P Parameter: Light Value: Far-red vs. White
  misc_feature: MA Experiment 20001450 PARAMETER Experiment Name: At_Far-red-induction_P Parameter: Organism Value: A. thaliana
  misc_feature: MA Experiment 20001450 PARAMETER Experiment Name: At_Far-red-induction_P Parameter: Plant Line Value: Columbia
  misc_feature: MA Experiment 20001450 PARAMETER Experiment Name: At_Far-red-induction_P Parameter: Timepoint (hr) Value: 8
  misc_feature: MA Experiment 20001450 PARAMETER Experiment Name: At_Far-red-induction_P Parameter: Tissue Value: Whole Plant
  misc_feature: MA Experiment ID: 20001451 Result: Down-regulated in Transcription
  misc_feature: MA Experiment 20001451 PARAMETER Experiment Name: At_Far-red-induction_P Parameter: Age (day) Value: 7
  misc_feature: MA Experiment 20001451 PARAMETER Experiment Name: At_Far-red-induction_P Parameter: Light Value: Far-red vs. White
  misc_feature: MA Experiment 20001451 PARAMETER Experiment Name: At_Far-red-induction_P Parameter: Organism Value: A. thaliana
  misc_feature: MA Experiment 20001451 PARAMETER Experiment Name: At_Far-red-induction_P Parameter: Plant Line Value: Columbia
  misc_feature: MA Experiment 20001451 PARAMETER Experiment Name: At_Far-red-induction_P Parameter: Timepoint (hr) Value: 24
  misc_feature: MA Experiment 20001451 PARAMETER Experiment Name: At_Far-red-induction_P Parameter: Tissue Value: Whole Plant

SEQ ID NO: 47436 - protein, 291 aa, Arabidopsis thaliana; identical to SEQ ID NO: 47009
  peptide (1)..(291): Ceres Seq. ID no. 12576108
  misc_feature (211)..(282): Pfam Name: RNA recognition motif. (a.k.a. RRM, RBD, or RNP domain) Pfam Description: RNA recognition motif. (a.k.a. RRM, RBD, or RNP
  misc_feature (211)..(282): Pfam Name: RNA recognition motif. (a.k.a. RRM, RBD, or RNP domain) Pfam Description: RNA recognition motif. (a.k.a. RRM, RBD, or RNP
  misc_feature (72)..(291): Homolog of NCBI NO: 133247 NR Description: 28 KDA RIBONUCLEOPROTEIN, CHLOROPLAST (28RNP)
  misc_feature (73)..(291): Homolog of NCBI NO: 629557 NR Description: RNA-binding protein RNP-D precursor - Arabidopsis
  misc_feature (73)..(291): Homolog of NCBI NO: 15233980 NR Description: 31 kDa ribonucleoprotein, chloroplast precursor
  misc_feature (73)..(291): Homolog of NCBI NO: 15294254 NR Description: AT4g24770/F22K18_30 [Arabidopsis thaliana]
  misc_feature (73)..(291): Homolog of NCBI NO: 475719 NR Description: RNA-binding protein 2
  misc_feature (72)..(291): Homolog of NCBI NO: 133247 NR Description: 28 KDA RIBONUCLEOPROTEIN, CHLOROPLAST (28RNP)
  misc_feature (73)..(291): Homolog of NCBI NO: 15233980 NR Description: 31 kDa ribonucleoprotein, chloroplast precursor
  misc_feature (73)..(291): Homolog of NCBI NO: 475719 NR Description: RNA-binding protein 2
  misc_feature (3)..(291): Homolog of NCBI NO: 15240641 NR Description: chloroplast RNA-binding protein cp31, putative
  misc_feature (41)..(291): Homolog of NCBI NO: 681908 NR Description: cp31 [Arabidopsis thaliana]
  misc_feature (41)..(291): Homolog of NCBI NO: 1076305 NR Description: RNA-binding protein cp31 precursor - Arabidopsis
  misc_feature (18)..(291): Homolog of NCBI NO: 1076251 NR Description: RNA-binding protein - common ice plant
  misc_feature (63)..(291): Homolog of NCBI NO: 99684 NR Description: DNA-binding protein - Arabidopsis thaliana
  misc_feature (73)..(291): Homolog of NCBI NO: 15294254 NR Description: AT4g24770/F22K18_30 [Arabidopsis thaliana]
  misc_feature (73)..(291): Homolog of NCBI NO: 629557 NR Description: RNA-binding protein RNP-D precursor - Arabidopsis
  misc_feature (63)..(291): Homolog of NCBI NO: 99684 NR Description: DNA-binding protein - Arabidopsis thaliana
  misc_feature (18)..(291): Homolog of NCBI NO: 1076251 NR Description: RNA-binding protein - common ice plant
  misc_feature (41)..(291): Homolog of NCBI NO: 1076305 NR Description: RNA-binding protein cp31 precursor - Arabidopsis
  misc_feature (41)..(291): Homolog of NCBI NO: 681908 NR Description: cp31 [Arabidopsis thaliana]
  misc_feature (3)..(291): Homolog of NCBI NO: 15240641 NR Description: chloroplast RNA-binding protein cp31, putative

SEQ ID NO: 47437 - protein, 289 aa, Arabidopsis thaliana; identical to SEQ ID NO: 47010
  peptide (1)..(289): Ceres Seq. ID no. 12576109
  misc_feature (209)..(280): Pfam Name: RNA recognition motif. (a.k.a. RRM, RBD, or RNP domain) Pfam Description: RNA recognition motif. (a.k.a. RRM, RBD, or RNP
  misc_feature (209)..(280): Pfam Name: RNA recognition motif. (a.k.a. RRM, RBD, or RNP domain) Pfam Description: RNA recognition motif. (a.k.a. RRM, RBD, or RNP
  misc_feature (70)..(289): Homolog of NCBI NO: 133247 NR Description: 28 KDA RIBONUCLEOPROTEIN, CHLOROPLAST (28RNP)
  misc_feature (71)..(289): Homolog of NCBI NO: 629557 NR Description: RNA-binding protein RNP-D precursor - Arabidopsis
  misc_feature (71)..(289): Homolog of NCBI NO: 15233980 NR Description: 31 kDa ribonucleoprotein, chloroplast precursor
  misc_feature (71)..(289): Homolog of NCBI NO: 15294254 NR Description: AT4g24770/F22K18_30 [Arabidopsis thaliana]
  misc_feature (71)..(289): Homolog of NCBI NO: 475719 NR Description: RNA-binding protein 2
  misc_feature (70)..(289): Homolog of NCBI NO: 133247 NR Description: 28 KDA RIBONUCLEOPROTEIN, CHLOROPLAST (28RNP)
  misc_feature (71)..(289): Homolog of NCBI NO: 15233980 NR Description: 31 kDa ribonucleoprotein, chloroplast precursor
  misc_feature (71)..(289): Homolog of NCBI NO: 475719 NR Description: RNA-binding protein 2
  misc_feature (1)..(289): Homolog of NCBI NO: 15240641 NR Description: chloroplast RNA-binding protein cp31, putative
  misc_feature (39)..(289): Homolog of NCBI NO: 681908 NR Description: cp31 [Arabidopsis thaliana]
  misc_feature (39)..(289): Homolog of NCBI NO: 1076305 NR Description: RNA-binding protein cp31 precursor - Arabidopsis
  misc_feature (16)..(289): Homolog of NCBI NO: 1076251 NR Description: RNA-binding protein - common ice plant
  misc_feature (61)..(289): Homolog of NCBI NO: 99684 NR Description: DNA-binding protein - Arabidopsis thaliana
  misc_feature (71)..(289): Homolog of NCBI NO: 15294254 NR Description: AT4g24770/F22K18_30 [Arabidopsis thaliana]
  misc_feature (71)..(289): Homolog of NCBI NO: 629557 NR Description: RNA-binding protein RNP-D precursor - Arabidopsis
  misc_feature (61)..(289): Homolog of NCBI NO: 99684 NR Description: DNA-binding protein - Arabidopsis thaliana
  misc_feature (16)..(289): Homolog of NCBI NO: 1076251 NR Description: RNA-binding protein - common ice plant
  misc_feature (39)..(289): Homolog of NCBI NO: 1076305 NR Description: RNA-binding protein cp31 precursor - Arabidopsis
  misc_feature (39)..(289): Homolog of NCBI NO: 681908 NR Description: cp31 [Arabidopsis thaliana]
  misc_feature (1)..(289): Homolog of NCBI NO: 15240641 NR Description: chloroplast RNA-binding protein cp31, putative

SEQ ID NO: 47438 - protein, 275 aa, Arabidopsis thaliana; identical to SEQ ID NO: 47011
  peptide (1)..(275): Ceres Seq. ID no. 12576110
  misc_feature (195)..(266): Pfam Name: RNA recognition motif. (a.k.a. RRM, RBD, or RNP domain) Pfam Description: RNA recognition motif. (a.k.a. RRM, RBD, or RNP
  misc_feature (195)..(266): Pfam Name: RNA recognition motif. (a.k.a. RRM, RBD, or RNP domain) Pfam Description: RNA recognition motif. (a.k.a. RRM, RBD, or RNP
  misc_feature (56)..(275): Homolog of NCBI NO: 133247 NR Description: 28 KDA RIBONUCLEOPROTEIN, CHLOROPLAST (28RNP)
  misc_feature (57)..(275): Homolog of NCBI NO: 15233980 NR Description: 31 kDa ribonucleoprotein, chloroplast precursor
  misc_feature (57)..(275): Homolog of NCBI NO: 15294254 NR Description: AT4g24770/F22K18_30 [Arabidopsis thaliana]
  misc_feature (57)..(275): Homolog of NCBI NO: 629557 NR Description: RNA-binding protein RNP-D precursor - Arabidopsis
  misc_feature (57)..(275): Homolog of NCBI NO: 475719 NR Description: RNA-binding protein 2
  misc_feature (56)..(275): Homolog of NCBI NO: 133247 NR Description: 28 KDA RIBONUCLEOPROTEIN, CHLOROPLAST (28RNP)
  misc_feature (57)..(275): Homolog of NCBI NO: 15294254 NR Description: AT4g24770/F22K18_30 [Arabidopsis thaliana]
  misc_feature (57)..(275): Homolog of NCBI NO: 475719 NR Description: RNA-binding protein 2
  misc_feature (1)..(275): Homolog of NCBI NO: 15240641 NR Description: chloroplast RNA-binding protein cp31, putative
  misc_feature (25)..(275): Homolog of NCBI NO: 681908 NR Description: cp31 [Arabidopsis thaliana]
  misc_feature (25)..(275): Homolog of NCBI NO: 1076305 NR Description: RNA-binding protein cp31 precursor - Arabidopsis
  misc_feature (2)..(275): Homolog of NCBI NO: 1076251 NR Description: RNA-binding protein - common ice plant
  misc_feature (47)..(275): Homolog of NCBI NO: 99684 NR Description: DNA-binding protein - Arabidopsis thaliana
  misc_feature (57)..(275): Homolog of NCBI NO: 629557 NR Description: RNA-binding protein RNP-D precursor - Arabidopsis
  misc_feature (57)..(275): Homolog of NCBI NO: 15233980 NR Description: 31 kDa ribonucleoprotein, chloroplast precursor
  misc_feature (47)..(275): Homolog of NCBI NO: 99684 NR Description: DNA-binding protein - Arabidopsis thaliana
  misc_feature (2)..(275): Homolog of NCBI NO: 1076251 NR Description: RNA-binding protein - common ice plant
  misc_feature (25)..(275): Homolog of NCBI NO: 1076305 NR Description: RNA-binding protein cp31 precursor - Arabidopsis
  misc_feature (25)..(275): Homolog of NCBI NO: 681908 NR Description: cp31 [Arabidopsis thaliana]
  misc_feature (1)..(275): Homolog of NCBI NO: 15240641 NR Description: chloroplast RNA-binding protein cp31, putative

SEQ ID NO: 47439 - DNA, 2066 bp, Arabidopsis thaliana; identical to SEQ ID NO: 39017
  misc_feature (1)..(2066): Ceres Seq. ID no. 13495924
  misc_feature: MA Experiment ID: 108434 Result: Down-regulated in Transcription
  misc_feature: MA Experiment 108434 PARAMETER Experiment Name: At_Root_Tips_cDNA_P Parameter: Tissue Value: Root Tips
  misc_feature: MA Experiment ID: 108435 Result: Down-regulated in Transcription
  misc_feature: MA Experiment 108435 PARAMETER Experiment Name: At_stm_Mutants_cDNA_P Parameter: Plant Line Value: wt Landsburg vs stm
  misc_feature: MA Experiment 108435 PARAMETER Experiment Name: At_stm_Mutants_cDNA_P Parameter: Tissue Value: Shoot Apical Meristem Region
  misc_feature: MA Experiment ID: 108463 Result: Up-regulated in Transcription
  misc_feature: MA Experiment 108463 PARAMETER Experiment Name: At_Germinating_Seeds_cDNA_P Parameter: Age (day) Value: 3 vs. 0
  misc_feature: MA Experiment 108463 PARAMETER Experiment Name: At_Germinating_Seeds_cDNA_P Parameter: Tissue Value: Germinating Seeds
  misc_feature: MA Experiment ID: 108573 Result: Up-regulated in Transcription
  misc_feature: MA Experiment 108573 PARAMETER Experiment Name: At_Drought_cDNA_P Parameter: Timepoint (hr) Value: 6
  misc_feature: MA Experiment 108573 PARAMETER Experiment Name: At_Drought_cDNA_P Parameter: Tissue Value: Aerial
  misc_feature: MA Experiment 108573 PARAMETER Experiment Name: At_Drought_cDNA_P Parameter: Treatment Value: Drought vs. No Drought
  misc_feature: MA Experiment ID: 108574 Result: Down-regulated in Transcription
  misc_feature: MA Experiment 108574 PARAMETER Experiment Name: At_Wounding__cDNA_P Parameter: Timepoint (hr) Value: 1
  misc_feature: MA Experiment 108574 PARAMETER Experiment Name: At_Wounding__cDNA_P Parameter: Tissue Value: Aerial
  misc_feature: MA Experiment 108574 PARAMETER Experiment Name: At_Wounding__cDNA_P Parameter: Treatment Value: Wounding vs. No Wounding
  misc_feature: MA Experiment ID: 108577 Result: Down-regulated in Transcription
  misc_feature: MA Experiment 108577 PARAMETER Experiment Name: At_42deg_Heat_cDNA_P Parameter: Temperature (deg C) Value: 42 vs. 22
  misc_feature: MA Experiment 108577 PARAMETER Experiment Name: At_42deg_Heat_cDNA_P Parameter: Timepoint (hr) Value: 6
  misc_feature: MA Experiment 108577 PARAMETER Experiment Name: At_42deg_Heat_cDNA_P Parameter: Tissue Value: Aerial
  misc_feature: MA Experiment ID: 108668 Result: Down-regulated in Transcription
  misc_feature: MA Experiment 108668 PARAMETER Experiment Name: At_2mM_SA_cDNA_P Parameter: Plant Line Value: WS
  misc_feature: MA Experiment 108668 PARAMETER Experiment Name: At_2mM_SA_cDNA_P Parameter: Timepoint (hr) Value: 6
  misc_feature: MA Experiment 108668 PARAMETER Experiment Name: At_2mM_SA_cDNA_P Parameter: Treatment Value: 2mM SA vs. No Treatment
  misc_feature: MA Experiment ID: 20000030 Result: Down-regulated in Transcription
  misc_feature: MA Experiment 20000030 PARAMETER Experiment Name: At_CS6630_Roots_cDNA_P Parameter: Plant Line Value: CS6630 vs. WS
  misc_feature: MA Experiment 20000030 PARAMETER Experiment Name: At_CS6630_Roots_cDNA_P Parameter: Tissue Value: Roots
  misc_feature: MA Experiment ID: 20000071 Result: Up-regulated in Transcription
  misc_feature: MA Experiment 20000071 PARAMETER Experiment Name: At_100uM_ABA_Mutants_cDNA_P Parameter: Plant Line Value: CS8104
  misc_feature: MA Experiment 20000071 PARAMETER Experiment Name: At_100uM_ABA_Mutants_cDNA_P Parameter: Timepoint (hr) Value: 6
  misc_feature: MA Experiment 20000071 PARAMETER Experiment Name: At_100uM_ABA_Mutants_cDNA_P Parameter: Tissue Value: Aerial
  misc_feature: MA Experiment 20000071 PARAMETER Experiment Name: At_100uM_ABA_Mutants_cDNA_P Parameter: Treatment Value: 100uM ABA vs. No Treatment
  misc_feature: MA Experiment ID: 20000224 Result: Up-regulated in Transcription
  misc_feature: MA Experiment ID: 20000315 Result: Down-regulated in Transcription
  misc_feature: MA Experiment 20000315 PARAMETER Experiment Name: At_14day_Shoots-Roots_Sub_P Parameter: Age (day) Value: 14
  misc_feature: MA Experiment 20000315 PARAMETER Experiment Name: At_14day_Shoots-Roots_Sub_P Parameter: Organism Value: A. thaliana
  misc_feature: MA Experiment 20000315 PARAMETER Experiment Name: At_14day_Shoots-Roots_Sub_P Parameter: Plant Line Value: WS
  misc_feature: MA Experiment 20000315 PARAMETER Experiment Name: At_14day_Shoots-Roots_Sub_P Parameter: Tissue Value: Shoots vs. Whole Plant
  misc_feature: MA Experiment ID: 20000328 Result: Down-regulated in Transcription
  misc_feature: MA Experiment 20000328 PARAMETER Experiment Name: At_42deg_Heat_Sub_P Parameter: Age (day) Value: 14
  misc_feature: MA Experiment 20000328 PARAMETER Experiment Name: At_42deg_Heat_Sub_P Parameter: Organism Value: A. thaliana
  misc_feature: MA Experiment 20000328 PARAMETER Experiment Name: At_42deg_Heat_Sub_P Parameter: Plant Line Value: WS
  misc_feature: MA Experiment 20000328 PARAMETER Experiment Name: At_42deg_Heat_Sub_P Parameter: Temperature (deg C) Value: 42 vs. 22
  misc_feature: MA Experiment 20000328 PARAMETER Experiment Name: At_42deg_Heat_Sub_P Parameter: Timepoint (hr) Value: 6
  misc_feature: MA Experiment 20000328 PARAMETER Experiment Name: At_42deg_Heat_Sub_P Parameter: Tissue Value: Aerial
  misc_feature: MA Experiment ID: 20000355 Result: Down-regulated in Transcription
  misc_feature: MA Experiment 20000355 PARAMETER Experiment Name: At_Siliques_Sub_P Parameter: Age (day) Value: 21
  misc_feature: MA Experiment 20000355 PARAMETER Experiment Name: At_Siliques_Sub_P Parameter: Organism Value: A. thaliana
  misc_feature: MA Experiment 20000355 PARAMETER Experiment Name: At_Siliques_Sub_P Parameter: Plant Line Value: WS
  misc_feature: MA Experiment 20000355 PARAMETER Experiment Name: At_Siliques_Sub_P Parameter: Tissue Value: Less Than 5mm Siliques vs. Whole Plant
  misc_feature: MA Experiment ID: 20000440 Result: Down-regulated in Transcription
  misc_feature: MA Experiment 20000440 PARAMETER Experiment Name: At_Closed-Flower__Sub_P Parameter: Tissue Value: Closed Flower vs. Whole Plant

SEQ ID NO: 47440 - protein, 573 aa, Arabidopsis thaliana; identical to SEQ ID NO: 39018
  peptide (1)..(573): Ceres Seq. ID no. 13495925
  misc_feature (305)..(489): Pfam Name: CRAL/TRIO domain Pfam Description: CRAL/TRIO domain
  misc_feature (305)..(489): Pfam Name: CRAL/TRIO domain Pfam Description: CRAL/TRIO domain
  misc_feature (305)..(489): Pfam Name: CRAL/TRIO domain Pfam Description: CRAL/TRIO domain
  misc_feature (5)..(489): Homolog of NCBI NO: 25407487 NR Description: hypothetical protein AT4g09160 [imported] -
  misc_feature (5)..(573): Homolog of NCBI NO: 30680992 NR Description: expressed protein [Arabidopsis thaliana]
  misc_feature (27)..(573): Homolog of NCBI NO: 14334978 NR Description: unknown protein [Arabidopsis thaliana]
  misc_feature (27)..(573): Homolog of NCBI NO: 18397616 NR Description: expressed protein [Arabidopsis thaliana]
  misc_feature (239)..(573): Homolog of NCBI NO: 15081614 NR Description: At1g72160/T9N14_8 [Arabidopsis thaliana]
  misc_feature (5)..(489): Homolog of NCBI NO: 25407487 NR Description: hypothetical protein AT4g09160 [imported] -
  misc_feature (27)..(573): Homolog of NCBI NO: 14334978 NR Description: unknown protein [Arabidopsis thaliana]
  misc_feature (239)..(573): Homolog of NCBI NO: 15081614 NR Description: At1g72160/T9N14_8 [Arabidopsis thaliana]
  misc_feature (27)..(573): Homolog of NCBI NO: 18397616 NR Description: expressed protein [Arabidopsis thaliana]
  misc_feature (27)..(573): Homolog of NCBI NO: 14334978 NR Description: unknown protein [Arabidopsis thaliana]
  misc_feature (5)..(573): Homolog of NCBI NO: 30680992 NR Description: expressed protein [Arabidopsis thaliana]
  misc_feature (5)..(489): Homolog of NCBI NO: 25407487 NR Description: hypothetical protein AT4g09160 [imported] -
  misc_feature (1)..(573): Homolog of NCBI NO: 15218382 NR Description: cytosolic factor -related [Arabidopsis thaliana]
  misc_feature (1)..(573): Homolog of NCBI NO: 15219901 NR Description: expressed protein [Arabidopsis thaliana]
  misc_feature (121)..(572): Homolog of NCBI NO: 8894548 NR Description: hypothetical protein [Cicer arietinum]
  misc_feature (36)..(573): Homolog of NCBI NO: 34907288 NR Description: contains ESTs
  misc_feature (117)..(573): Homolog of NCBI NO: 15218383 NR Description: cytosolic factor -related [Arabidopsis thaliana]
  misc_feature (1)..(573): Homolog of NCBI NO: 15218382 NR Description: cytosolic factor -related [Arabidopsis thaliana]
  misc_feature (1)..(573): Homolog of NCBI NO: 15219901 NR Description: expressed protein [Arabidopsis thaliana]
  misc_feature (121)..(572): Homolog of NCBI NO: 8894548 NR Description: hypothetical protein [Cicer arietinum]
  misc_feature (36)..(573): Homolog of NCBI NO: 34907288 NR Description: contains ESTs
  misc_feature (117)..(573): Homolog of NCBI NO: 15218383 NR Description: cytosolic factor -related [Arabidopsis thaliana]
  misc_feature (239)..(573): Homolog of NCBI NO: 15081614 NR Description: At1g72160/T9N14_8 [Arabidopsis thaliana]
  misc_feature (27)..(573): Homolog of NCBI NO: 18397616 NR Description: expressed protein [Arabidopsis thaliana]
  misc_feature (5)..(573): Homolog of NCBI NO: 30680992 NR Description: expressed protein [Arabidopsis thaliana]
  misc_feature (117)..(573): Homolog of NCBI NO: 15218383 NR Description: cytosolic factor -related [Arabidopsis thaliana]
  misc_feature (36)..(573): Homolog of NCBI NO: 34907288 NR Description: contains ESTs
  misc_feature (121)..(572): Homolog of NCBI NO: 8894548 NR Description: hypothetical protein [Cicer arietinum]
  misc_feature (1)..(573): Homolog of NCBI NO: 15219901 NR Description: expressed protein [Arabidopsis thaliana]
  misc_feature (1)..(573): Homolog of NCBI NO: 15218382 NR Description: cytosolic factor -related [Arabidopsis thaliana]

SEQ ID NO: 47441 - protein, 298 aa, Arabidopsis thaliana; identical to SEQ ID NO: 39019
  peptide (1)..(298): Ceres Seq. ID no. 13495926
  misc_feature (30)..(214): Pfam Name: CRAL/TRIO domain Pfam Description: CRAL/TRIO domain
  misc_feature (30)..(214): Pfam Name: CRAL/TRIO domain Pfam Description: CRAL/TRIO domain
  misc_feature (30)..(214): Pfam Name: CRAL/TRIO domain Pfam Description: CRAL/TRIO domain
  misc_feature (1)..(214): Homolog of NCBI NO: 25407487 NR Description: hypothetical protein AT4g09160 [imported] -
  misc_feature (1)..(298): Homolog of NCBI NO: 30680992 NR Description: expressed protein [Arabidopsis thaliana]
  misc_feature (1)..(298): Homolog of NCBI NO: 14334978 NR Description: unknown protein [Arabidopsis thaliana]
  misc_feature (1)..(298): Homolog of NCBI NO: 18397616 NR Description: expressed protein [Arabidopsis thaliana]
  misc_feature (1)..(298): Homolog of NCBI NO: 15081614 NR Description: At1g72160/T9N14_8 [Arabidopsis thaliana]
  misc_feature (1)..(214): Homolog of NCBI NO: 25407487 NR Description: hypothetical protein AT4g09160 [imported] -
  misc_feature (1)..(298): Homolog of NCBI NO: 14334978 NR Description: unknown protein [Arabidopsis thaliana]
  misc_feature (1)..(298): Homolog of NCBI NO: 15081614 NR Description: At1g72160/T9N14_8 [Arabidopsis thaliana]
  misc_feature (1)..(298): Homolog of NCBI NO: 18397616 NR Description: expressed protein [Arabidopsis thaliana]
  misc_feature (1)..(298): Homolog of NCBI NO: 14334978 NR Description: unknown protein [Arabidopsis thaliana]
  misc_feature (1)..(298): Homolog of NCBI NO: 30680992 NR Description: expressed protein [Arabidopsis thaliana]
  misc_feature (1)..(214): Homolog of NCBI NO: 25407487 NR Description: hypothetical protein AT4g09160 [imported] -
  misc_feature (1)..(298): Homolog of NCBI NO: 15218382 NR Description: cytosolic factor -related [Arabidopsis thaliana]
  misc_feature (1)..(298): Homolog of NCBI NO: 15219901 NR Description: expressed protein [Arabidopsis thaliana]
  misc_feature (1)..(297): Homolog of NCBI NO: 8894548 NR Description: hypothetical protein [Cicer arietinum]
  misc_feature (1)..(298): Homolog of NCBI NO: 34907288 NR Description: contains ESTs
  misc_feature (1)..(298): Homolog of NCBI NO: 15218383 NR Description: cytosolic factor -related [Arabidopsis thaliana]
  misc_feature (1)..(298): Homolog of NCBI NO: 15218382 NR Description: cytosolic factor -related [Arabidopsis thaliana]
  misc_feature (1)..(298): Homolog of NCBI NO: 15219901 NR Description: expressed protein [Arabidopsis thaliana]
  misc_feature (1)..(297): Homolog of NCBI NO: 8894548 NR Description: hypothetical protein [Cicer arietinum]
  misc_feature (1)..(298): Homolog of NCBI NO: 34907288 NR Description: contains ESTs
  misc_feature (1)..(298): Homolog of NCBI NO: 15218383 NR Description: cytosolic factor -related [Arabidopsis thaliana]
  misc_feature (1)..(298): Homolog of NCBI NO: 15081614 NR Description: At1g72160/T9N14_8 [Arabidopsis thaliana]
  misc_feature (1)..(298): Homolog of NCBI NO: 18397616 NR Description: expressed protein [Arabidopsis thaliana]
  misc_feature (1)..(298): Homolog of NCBI NO: 30680992 NR Description: expressed protein [Arabidopsis thaliana]
  misc_feature (1)..(298): Homolog of NCBI NO: 15218383 NR Description: cytosolic factor -related [Arabidopsis thaliana]
  misc_feature (1)..(298): Homolog of NCBI NO: 34907288 NR Description: contains ESTs
  misc_feature (1)..(297): Homolog of NCBI NO: 8894548 NR Description: hypothetical protein [Cicer arietinum]
  misc_feature (1)..(298): Homolog of NCBI NO: 15219901 NR Description: expressed protein [Arabidopsis thaliana]
  misc_feature (1)..(298): Homolog of NCBI NO: 15218382 NR Description: cytosolic factor -related [Arabidopsis thaliana]

SEQ ID NO: 47442 - DNA, 1038 bp, Arabidopsis thaliana
  misc_feature (1)..(1038): Ceres Seq. ID no. 13592611
  misc_feature: MA Experiment ID: 20000173 Result: Down-regulated in Transcription
  misc_feature: MA Experiment 20000173 PARAMETER Experiment Name: At_42deg_Heat_P Parameter: Age (day) Value: 14
  misc_feature: MA Experiment 20000173 PARAMETER Experiment Name: At_42deg_Heat_P Parameter: Organism Value: A. thaliana
  misc_feature: MA Experiment 20000173 PARAMETER Experiment Name: At_42deg_Heat_P Parameter: Plant Line Value: WS
  misc_feature: MA Experiment 20000173 PARAMETER Experiment Name: At_42deg_Heat_P Parameter: Temperature (deg C) Value: 42 vs. 22
  misc_feature: MA Experiment 20000173 PARAMETER Experiment Name: At_42deg_Heat_P Parameter: Timepoint (hr) Value: 6
  misc_feature: MA Experiment 20000173 PARAMETER Experiment Name: At_42deg_Heat_P Parameter: Tissue Value: Aerial
  misc_feature: MA Experiment ID: 20000180 Result: Up-regulated in Transcription
  misc_feature: MA Experiment 20000180 PARAMETER Experiment Name: At_Germinating_Seeds_P Parameter: Age (hr) Value: 24 vs. 0
  misc_feature: MA Experiment 20000180 PARAMETER Experiment Name: At_Germinating_Seeds_P Parameter: Tissue Value: Germinating Seeds
  misc_feature: MA Experiment ID: 20000182 Result: Down-regulated in Transcription
  misc_feature: MA Experiment 20000182 PARAMETER Experiment Name: At_2mM_SA_P Parameter: Age (day) Value: 14
  misc_feature: MA Experiment 20000182 PARAMETER Experiment Name: At_2mM_SA_P Parameter: Organism Value: A. thaliana
  misc_feature: MA Experiment 20000182 PARAMETER Experiment Name: At_2mM_SA_P Parameter: Plant Line Value: WS
  misc_feature: MA Experiment 20000182 PARAMETER Experiment Name: At_2mM_SA_P Parameter: Timepoint (hr) Value: 6
  misc_feature: MA Experiment 20000182 PARAMETER Experiment Name: At_2mM_SA_P Parameter: Tissue Value: Aerial
  misc_feature: MA Experiment 20000182 PARAMETER Experiment Name: At_2mM_SA_P Parameter: Treatment Value: 2mM SA vs. No Treatment
  misc_feature: MA Experiment ID: 20000185 Result: Down-regulated in Transcription
  misc_feature: MA Experiment 20000185 PARAMETER Experiment Name: At_Roots__P Parameter: Age (day) Value: 7 vs. 21
  misc_feature: MA Experiment 20000185 PARAMETER Experiment Name: At_Roots__P Parameter: Organism Value: A. thaliana
  misc_feature: MA Experiment 20000185 PARAMETER Experiment Name: At_Roots__P Parameter: Tissue Value: Roots vs. Whole Plant
  misc_feature: MA Experiment ID: 20000436 Result: Down-regulated in Transcription
  misc_feature: MA Experiment 20000436 PARAMETER Experiment Name: At_Drought_P Parameter: Age (day) Value: 7
  misc_feature: MA Experiment 20000436 PARAMETER Experiment Name: At_Drought_P Parameter: Organism Value: A. thaliana
  misc_feature: MA Experiment 20000436 PARAMETER Experiment Name: At_Drought_P Parameter: Plant Line Value: WS
  misc_feature: MA Experiment 20000436 PARAMETER Experiment Name: At_Drought_P Parameter: Timepoint (hr) Value: 12
  misc_feature: MA Experiment 20000436 PARAMETER Experiment Name: At_Drought_P Parameter: Tissue Value: Whole Plant
  misc_feature: MA Experiment 20000436 PARAMETER Experiment Name: At_Drought_P Parameter: Treatment Value: Drought vs. No Drought
  misc_feature: MA Experiment ID: 20000437 Result: Down-regulated in Transcription
  misc_feature: MA Experiment 20000437 PARAMETER Experiment Name: At_Drought_P Parameter: Age (day) Value: 8
  misc_feature: MA Experiment 20000437 PARAMETER Experiment Name: At_Drought_P Parameter: Organism Value: A. thaliana
  misc_feature: MA Experiment 20000437 PARAMETER Experiment Name: At_Drought_P Parameter: Plant Line Value: WS
  misc_feature: MA Experiment 20000437 PARAMETER Experiment Name: At_Drought_P Parameter: Timepoint (hr) Value: 24
  misc_feature: MA Experiment 20000437 PARAMETER Experiment Name: At_Drought_P Parameter: Tissue Value: Whole Plant
  misc_feature: MA Experiment 20000437 PARAMETER Experiment Name: At_Drought_P Parameter: Treatment Value: Drought vs. No Drought
  misc_feature: MA Experiment ID: 20000438 Result: Up-regulated in Transcription
  misc_feature: MA Experiment 20000438 PARAMETER Experiment Name: At_Shoots__P Parameter: Age (day) Value: 14
  misc_feature: MA Experiment 20000438 PARAMETER Experiment Name: At_Shoots__P Parameter: Tissue Value: Shoots vs. Whole Plant
  misc_feature: MA Experiment ID: 20000439 Result: Down-regulated in Transcription
  misc_feature: MA Experiment 20000439 PARAMETER Experiment Name: At_Roots__P Parameter: Age (day) Value: 14 vs. 21
  misc_feature: MA Experiment 20000439 PARAMETER Experiment Name: At_Roots__P Parameter: Organism Value: A. thaliana
  misc_feature: MA Experiment 20000439 PARAMETER Experiment Name: At_Roots__P Parameter: Tissue Value: Roots vs. Whole Plant
  misc_feature: MA Experiment ID: 20000794 Result: Down-regulated in Transcription
  misc_feature: MA Experiment 20000794 PARAMETER Experiment Name: At_Petals_P Parameter: Age (day) Value: 23-25 days
  misc_feature: MA Experiment 20000794 PARAMETER Experiment Name: At_Petals_P Parameter: Plant Line Value: WS
  misc_feature: MA Experiment 20000794 PARAMETER Experiment Name: At_Petals_P Parameter: Tissue Value: Petals vs. Whole plant
  misc_feature: MA Experiment ID: 20001557 Result: Down-regulated in Transcription
  misc_feature: MA Experiment 20001557 PARAMETER Experiment Name: At_Drought_Soil_Dry_P Parameter: Age (day) Value: 27
  misc_feature: MA Experiment 20001557 PARAMETER Experiment Name: At_Drought_Soil_Dry_P Parameter: Organism Value: A. thaliana
  misc_feature: MA Experiment 20001557 PARAMETER Experiment Name: At_Drought_Soil_Dry_P Parameter: Plant Line Value: WS
  misc_feature: MA Experiment 20001557 PARAMETER Experiment Name: At_Drought_Soil_Dry_P Parameter: Post Timepoint (hr) Value: 3
  misc_feature: MA Experiment 20001557 PARAMETER Experiment Name: At_Drought_Soil_Dry_P Parameter: Post-Treatment Value: Re-Water vs. No Drought
  misc_feature: MA Experiment 20001557 PARAMETER Experiment Name: At_Drought_Soil_Dry_P Parameter: Timepoint (day) Value: 13
  misc_feature: MA Experiment 20001557 PARAMETER Experiment Name: At_Drought_Soil_Dry_P Parameter: Treatment Value: Drought vs. No Drought
  misc_feature: MA Experiment ID: 20001904 Result: Down-regulated in Transcription
  misc_feature: MA Experiment 20001904 PARAMETER Experiment Name: At_Drought_Reproduction_P Parameter: Age (day) Value: 37
  misc_feature: MA Experiment 20001904 PARAMETER Experiment Name: At_Drought_Reproduction_P Parameter: Organism Value: A. thaliana
  misc_feature: MA Experiment 20001904 PARAMETER Experiment Name: At_Drought_Reproduction_P Parameter: Plant Line Value: WS
  misc_feature: MA Experiment 20001904 PARAMETER Experiment Name: At_Drought_Reproduction_P Parameter: Timepoint (day) Value: 7
  misc_feature: MA Experiment 20001904 PARAMETER Experiment Name: At_Drought_Reproduction_P Parameter: Tissue Value: Rosettes
  misc_feature: MA Experiment 20001904 PARAMETER Experiment Name: At_Drought_Reproduction_P Parameter: Treatment Value: Drought vs. No Drought
tcaagtgaagcagaatcaaagttgccacttagtccggaagactgtgattgtgattttgaatgaactcatggaacaagtttcctctagatcaagctctctcactgtcggagagcaattctgcgccgtctttatacctttctttgccattatcgatgtcctagtttcctccgtcggacaatgcttcgattgccgcagcacatcgcctcggacatgtcagcacgcggatctggaacgtcttgctcgtgaatctcaattttcagtcaatgaagttgaagctttgtatgagctattcaagaaattgagctgttcaattattgatgacggcttgattcacaaggaagagcttagactggcgctgttccaagctccatatggtgagaacctctttcttgatagggtttttgatttgttcgatgaaaagaagaatggggttattgagtttgaggaattcatccatgcactcagtgtctttcatccctatgcatcaatccaggagaagaccgattttgcatttaggctctatgatctaagacaaactggattcattgagcgagaagaggtgcaacaaatggtttctgctattctcttggaatctgatatgatgctatccgatgaacttctgaccatgattattgataaaacatttgctgatgcagattctgacaaagacggtaaaattagtaaggatgaatggaatgtctatgtgcataaacatcctagcttgttgaagaatatgactcttccttacctaaaggatgtgacgacagcattcccaagttttatattcaacactgaggttgaagactgaggcacaactgtccatgcaacaccggtcatcttttttctgcttggtcctgtaattcgagtgagattgtcatagcgcaagagcagaacgaggaaagaaggttttccttattttattttaagccaacgtagttgatgattattagctgtaagtaaaattgtcaagcactttgctttgttttgatgactttactgtaattgttccattgaaagtaatgaagcatttttcttttc

SEQ ID NO: 47443 - protein, 268 aa, Arabidopsis thaliana
  peptide (1)..(268): Ceres Seq. ID no. 13592612
  misc_feature (210)..(238): Pfam Name: EF hand Pfam Description: EF hand
  misc_feature (53)..(268): Homolog of NCBI NO: 15241101 NR Description: calcineurin B-like protein 2 (gb|AAC26009.1)
  misc_feature (55)..(268): Homolog of NCBI NO: 30687272 NR Description: calcineurin B-like protein 3 (CBL3) [Arabidopsis
  misc_feature (60)..(268): Homolog of NCBI NO: 15238015 NR Description: calcineurin B-like protein 9 (CBL9) [Arabidopsis
  misc_feature (59)..(268): Homolog of NCBI NO: 16924116 NR Description: putative calcineurin B-like protein [Oryza sativa]
  misc_feature (53)..(268): Homolog of NCBI NO: 22137326 NR Description: calcineurin B [Pisum sativum]
  misc_feature (55)..(268): Homolog of NCBI NO: 15236778 NR Description: calcineurin B-like protein 3 (CBL3) [Arabidopsis
  misc_feature (76)..(251): Homolog of NCBI NO: 34913062 NR Description: putative calcium sensor protein
  misc_feature (29)..(251): Homolog of NCBI NO: 7486208 NR Description: hypothetical protein F26P21.120 - Arabidopsis
  misc_feature (20)..(268): Homolog of NCBI NO: 15234011 NR Description: calcineurin B-like protein (fragment)
  misc_feature (23)..(268): Homolog of NCBI NO: 30689575 NR Description: calcineurin B-like protein (fragment)
QVKQNQSCHLVRKTVIVILNELMEQVSSRSSSLTVGEQFCAVFIPFFAIIDVLVSSVGQCFDCRSTSPRTCQHADLERLARESQFSVNEVEALYELFKKLSCSIIDDGLIHKEELRLALFQAPYGENLFLDRVFDLFDEKKNGVIEFEEFIHALSVFHPYASIQEKTDFAFRLYDLRQTGFIEREEVQQMVSAILLESDMMLSDELLTMIIDKTFADADSDKDGKISKDEWNVYVHKHPSLLKNMTLPYLKDVTTAFPSFIFNTEVED

SEQ ID NO: 47444 - protein, 246 aa, Arabidopsis thaliana
  peptide (1)..(246): Ceres Seq. ID no. 13592613
  misc_feature (188)..(216): Pfam Name: EF hand Pfam Description: EF hand
  misc_feature (31)..(246): Homolog of NCBI NO: 15241101 NR Description: calcineurin B-like protein 2 (gb|AAC26009.1)
  misc_feature (33)..(246): Homolog of NCBI NO: 30687272 NR Description: calcineurin B-like protein 3 (CBL3) [Arabidopsis
  misc_feature (38)..(246): Homolog of NCBI NO: 15238015 NR Description: calcineurin B-like protein 9 (CBL9) [Arabidopsis
  misc_feature (37)..(246): Homolog of NCBI NO: 16924116 NR Description: putative calcineurin B-like protein [Oryza sativa]
  misc_feature (31)..(246): Homolog of NCBI NO: 22137326 NR Description: calcineurin B [Pisum sativum]
  misc_feature (33)..(246): Homolog of NCBI NO: 15236778 NR Description: calcineurin B-like protein 3 (CBL3) [Arabidopsis
  misc_feature (54)..(229): Homolog of NCBI NO: 34913062 NR Description: putative calcium sensor protein
  misc_feature (7)..(229): Homolog of NCBI NO: 7486208 NR Description: hypothetical protein F26P21.120 - Arabidopsis
  misc_feature (1)..(246): Homolog of NCBI NO: 15234011 NR Description: calcineurin B-like protein (fragment)
  misc_feature (1)..(246): Homolog of NCBI NO: 30689575 NR Description: calcineurin B-like protein (fragment)
MEQVSSRSSSLTVGEQFCAVFIPFFAIIDVLVSSVGQCFDCRSTSPRTCQHADLERLARESQFSVNEVEALYELFKKLSCSIIDDGLIHKEELRLALFQAPYGENLFLDRVFDLFDEKKNGVIEFEEFIHALSVFHPYASIQEKTDFAFRLYDLRQTGFIEREEVQQMVSAILLESDMMLSDELLTMIIDKTFADADSDKDGKISKDEWNVYVHKHPSLLKNMTLPYLKDVTTAFPSFIFNTEVED

SEQ ID NO: 47445 - DNA, 1388 bp, Arabidopsis thaliana
  misc_feature (1)..(1388): Ceres Seq. ID no. 13648440
  misc_feature: MA Experiment ID: 20000184 Result: Down-regulated in Transcription
  misc_feature: MA Experiment 20000184 PARAMETER Experiment Name: At_Shoots__P Parameter: Age (day) Value: 7
  misc_feature: MA Experiment 20000184 PARAMETER Experiment Name: At_Shoots__P Parameter: Tissue Value: Shoots vs. Whole Plant
  misc_feature: MA Experiment ID: 20000185 Result: Down-regulated in Transcription
  misc_feature: MA Experiment 20000185 PARAMETER Experiment Name: At_Roots__P Parameter: Age (day) Value: 7 vs. 21
  misc_feature: MA Experiment 20000185 PARAMETER Experiment Name: At_Roots__P Parameter: Organism Value: A. thaliana
  misc_feature: MA Experiment 20000185 PARAMETER Experiment Name: At_Roots__P Parameter: Tissue Value: Roots vs. Whole Plant
  misc_feature: MA Experiment ID: 20001451 Result: Down-regulated in Transcription
  misc_feature: MA Experiment 20001451 PARAMETER Experiment Name: At_Far-red-induction_P Parameter: Age (day) Value: 7
  misc_feature: MA Experiment 20001451 PARAMETER Experiment Name: At_Far-red-induction_P Parameter: Light Value: Far-red vs. White
  misc_feature: MA Experiment 20001451 PARAMETER Experiment Name: At_Far-red-induction_P Parameter: Organism Value: A. thaliana
  misc_feature: MA Experiment 20001451 PARAMETER Experiment Name: At_Far-red-induction_P Parameter: Plant Line Value: Columbia
  misc_feature: MA Experiment 20001451 PARAMETER Experiment Name: At_Far-red-induction_P Parameter: Timepoint (hr) Value: 24
  misc_feature: MA Experiment 20001451 PARAMETER Experiment Name: At_Far-red-induction_P Parameter: Tissue Value: Whole Plant
  misc_feature: MA Experiment ID: 20001557 Result: Up-regulated in Transcription
  misc_feature: MA Experiment 20001557 PARAMETER Experiment Name: At_Drought_Soil_Dry_P Parameter: Age (day) Value: 27
  misc_feature: MA Experiment 20001557 PARAMETER Experiment Name: At_Drought_Soil_Dry_P Parameter: Organism Value: A. thaliana
  misc_feature: MA Experiment 20001557 PARAMETER Experiment Name: At_Drought_Soil_Dry_P Parameter: Plant Line Value: WS
  misc_feature: MA Experiment 20001557 PARAMETER Experiment Name: At_Drought_Soil_Dry_P Parameter: Post Timepoint (hr) Value: 3
  misc_feature: MA Experiment 20001557 PARAMETER Experiment Name: At_Drought_Soil_Dry_P Parameter: Post-Treatment Value: Re-Water vs. No Drought
  misc_feature: MA Experiment 20001557 PARAMETER Experiment Name: At_Drought_Soil_Dry_P Parameter: Timepoint (day) Value: 13
  misc_feature: MA Experiment 20001557 PARAMETER Experiment Name: At_Drought_Soil_Dry_P Parameter: Treatment Value: Drought vs. No Drought
  misc_feature: MA Experiment ID: 20001558 Result: Up-regulated in Transcription
  misc_feature: MA Experiment 20001558 PARAMETER Experiment Name: At_Drought_Soil_Dry_P Parameter: Age (day) Value: 27
  misc_feature: MA Experiment 20001558 PARAMETER Experiment Name: At_Drought_Soil_Dry_P Parameter: Organism Value: A. thaliana
  misc_feature: MA Experiment 20001558 PARAMETER Experiment Name: At_Drought_Soil_Dry_P Parameter: Plant Line Value: WS
  misc_feature: MA Experiment 20001558 PARAMETER Experiment Name: At_Drought_Soil_Dry_P Parameter: Post Timepoint (hr) Value: 6
  misc_feature: MA Experiment 20001558 PARAMETER Experiment Name: At_Drought_Soil_Dry_P Parameter: Post-Treatment Value: Re-Water vs. No Drought
  misc_feature: MA Experiment 20001558 PARAMETER Experiment Name: At_Drought_Soil_Dry_P Parameter: Timepoint (day) Value: 13
  misc_feature: MA Experiment 20001558 PARAMETER Experiment Name: At_Drought_Soil_Dry_P Parameter: Treatment Value: Drought vs. No Drought
  misc_feature: MA Experiment ID: 20001757 Result: Up-regulated in Transcription
  misc_feature: MA Experiment 20001757 PARAMETER Experiment Name: At_50mM_NH4NO3_L-to-H_P Parameter: Timepoint (hr) Value: 6
  misc_feature: MA Experiment 20001757 PARAMETER Experiment Name: At_50mM_NH4NO3_L-to-H_P Parameter: Tissue Value: Leaf
  misc_feature: MA Experiment 20001757 PARAMETER Experiment Name: At_50mM_NH4NO3_L-to-H_P Parameter: Treatment Value: 50mM NH4NO3 vs 100mM Mannitol
gtggtgacatttacgcgcagaaacgttgatactctctctctctcgacggaaaattcttcctcggagatatggtgacggagctggaagagcttgtcgaatttttgtcatctccttcaccgcctgtgaagaaagctgcggtggaaattgttagtggtttaactggttccgaggaaggtttacaatctctatcaaagtattccgagattcttcttccatcattgtctcagcttctaaatgaaagcaaggaggtatcagagccagcagctcaagctcttgttaatctttctcagaagtgtgaattggcaaagaagatgattcaaatgggtttgattaaagtggccatggacatgttgtataagccagagtcatgtattaccagattacttgttatgcttctagtgaatcttactcagttggatgatggggtttcttctttgcttcagattgacgatgagaagatgcatggactacatatcatgaagcttgttaggtcattttgcaggtcttctggtgaaactgctgatgatcagtttgagcatgttggttcgatccttgtcaacatatcaaaaacagaagatgggaggaaattgttactggagccaaagagacgactattaaaacagatcattaggcagtttgattcaacaaatcagttgcgaaagaaaggggttgctgggactattcgtaactgttgttttgaagccaaaaaccaactccagaatatactcttgatatcagagtttctttggcccgctctgctcctaccagttgcaggcagcaagacatacagtgagcaagatgtcgcaaaaatgccacctgagcttggaagtgcactgtccattgagcgagaaccagttactgatcctgacattcgcgttcagacactcgaagctatatatttgatcatcttagaggaggcaggtcgaagggcattttggtcagtcaacggcccacggattctacaattgggatacgaatatgaagaagatccgaaagcaatgagagcctatgagcaagtcggttctttgcttgttgaggaagctggaggtccggaagagtcgttggagccaacaaaagcagagtcttgaagttcattatttgttgttctccgactctagtccccattattggctgccctcgcaaagtaagttacttatcctgttatgaaagagttactactacatcttgtgcactactagttgtaacactagattcgttattgacttacgcgatcttattagtgctccattttctatttttggttgtaattttattttatattagacattatagtatgttatcttcgttagacaatatatttgtgtattcttacacacattttttgctaagaaaaaaaaaaaaaaaaaactcgagggggggcccggtac

SEQ ID NO: 47446 - protein, 339 aa, Arabidopsis thaliana
  peptide (1)..(339): Ceres Seq. ID no. 13648441
  misc_feature (92)..(271): Pfam Name: Domain of unknown function (DUF383) Pfam Description: Domain of unknown function (DUF383)
  misc_feature (51)..(307): Homolog of NCBI NO: 40745990 NR Description: hypothetical protein AN9409.2 [Aspergillus
  misc_feature (2)..(330): Homolog of NCBI NO: 19115795 NR Description: hypothetical protein [Schizosaccharomyces pombe]
  misc_feature (1)..(329): Homolog of NCBI NO: 32417104 NR Description: hypothetical protein [Neurospora crassa]
  misc_feature (5)..(338): Homolog of NCBI NO: 21356909 NR Description: CG6073-PA [Drosophila melanogaster]
  misc_feature (4)..(333): Homolog of NCBI NO: 19569883 NR Description: SIMILAR TO HYPOTHETICAL PROTEIN [Dictyostelium
  misc_feature (1)..(126): Homolog of NCBI NO: 37534210 NR Description: unknown protein [Oryza sativa (japonica
  misc_feature (124)..(321): Homolog of NCBI NO: 37534210 NR Description: unknown protein [Oryza sativa (japonica
  misc_feature (1)..(339): Homolog of NCBI NO: 26449855 NR Description: unknown protein [Arabidopsis thaliana]
  misc_feature (1)..(339): Homolog of NCBI NO: 15223707 NR Description: expressed protein [Arabidopsis thaliana]
MVTELEELVEFLSSPSPPVKKAAVEIVSGLTGSEEGLQSLSKYSEILLPSLSQLLNESKEVSEPAAQALVNLSQKCELAKKMIQMGLIKVAMDMLYKPESCITRLLVMLLVNLTQLDDGVSSLLQIDDEKMHGLHIMKLVRSFCRSSGETADDQFEHVGSILVNISKTEDGRKLLLEPKRRLLKQIIRQFDSTNQLRKKGVAGTIRNCCFEAKNQLQNILLISEFLWPALLLPVAGSKTYSEQDVAKMPPELGSALSIEREPVTDPDIRVQTLEAIYLIILEEAGRRAFWSVNGPRILQLGYEYEEDPKAMRAYEQVGSLLVEEAGGPEESLEPTKAES

SEQ ID NO: 47447 - protein, 258 aa, Arabidopsis thaliana
  peptide (1)..(258): Ceres Seq. ID no. 13648442
  misc_feature (11)..(190): Pfam Name: Domain of unknown function (DUF383) Pfam Description: Domain of unknown function (DUF383)
  misc_feature (1)..(226): Homolog of NCBI NO: 40745990 NR Description: hypothetical protein AN9409.2 [Aspergillus
  misc_feature (1)..(249): Homolog of NCBI NO: 19115795 NR Description: hypothetical protein [Schizosaccharomyces pombe]
  misc_feature (1)..(248): Homolog of NCBI NO: 32417104 NR Description: hypothetical protein [Neurospora crassa]
  misc_feature (1)..(257): Homolog of NCBI NO: 21356909 NR Description: CG6073-PA [Drosophila melanogaster]
  misc_feature (1)..(252): Homolog of NCBI NO: 19569883 NR Description: SIMILAR TO HYPOTHETICAL PROTEIN [Dictyostelium
  misc_feature (1)..(45): Homolog of NCBI NO: 37534210 NR Description: unknown protein [Oryza sativa (japonica
  misc_feature (43)..(240): Homolog of NCBI NO: 37534210 NR Description: unknown protein [Oryza sativa (japonica
  misc_feature (1)..(258): Homolog of NCBI NO: 26449855 NR Description: unknown protein [Arabidopsis thaliana]
  misc_feature (1)..(258): Homolog of NCBI NO: 15223707 NR Description: expressed protein [Arabidopsis thaliana]
MIQMGLIKVAMDMLYKPESCITRLLVMLLVNLTQLDDGVSSLLQIDDEKMHGLHIMKLVRSFCRSSGETADDQFEHVGSILVNISKTEDGRKLLLEPKRRLLKQIIRQFDSTNQLRKKGVAGTIRNCCFEAKNQLQNILLISEFLWPALLLPVAGSKTYSEQDVAKMPPELGSALSIEREPVTDPDIRVQTLEAIYLIILEEAGRRAFWSVNGPRILQLGYEYEEDPKAMRAYEQVGSLLVEEAGGPEESLEPTKAES

SEQ ID NO: 47448 - protein, 255 aa, Arabidopsis thaliana
  peptide (1)..(255): Ceres Seq. ID no. 13648443
  misc_feature (8)..(187): Pfam Name: Domain of unknown function (DUF383) Pfam Description: Domain of unknown function (DUF383)
  misc_feature (1)..(223): Homolog of NCBI NO: 40745990 NR Description: hypothetical protein AN9409.2 [Aspergillus
  misc_feature (1)..(246): Homolog of NCBI NO: 19115795 NR Description: hypothetical protein [Schizosaccharomyces pombe]
  misc_feature (1)..(245): Homolog of NCBI NO: 32417104 NR Description: hypothetical protein [Neurospora crassa]
  misc_feature (1)..(254): Homolog of NCBI NO: 21356909 NR Description: CG6073-PA [Drosophila melanogaster]
  misc_feature (1)..(249): Homolog of NCBI NO: 19569883 NR Description: SIMILAR TO HYPOTHETICAL PROTEIN [Dictyostelium
  misc_feature (1)..(42): Homolog of NCBI NO: 37534210 NR Description: unknown protein [Oryza sativa (japonica
  misc_feature (40)..(237): Homolog of NCBI NO: 37534210 NR Description: unknown protein [Oryza sativa (japonica
  misc_feature (1)..(255): Homolog of NCBI NO: 26449855 NR Description: unknown protein [Arabidopsis thaliana]
  misc_feature (1)..(255): Homolog of NCBI NO: 15223707 NR Description: expressed protein [Arabidopsis thaliana]
MGLIKVAMDMLYKPESCITRLLVMLLVNLTQLDDGVSSLLQIDDEKMHGLHIMKLVRSFCRSSGETADDQFEHVGSILVNISKTEDGRKLLLEPKRRLLKQIIRQFDSTNQLRKKGVAGTIRNCCFEAKNQLQNILLISEFLWPALLLPVAGSKTYSEQDVAKMPPELGSALSIEREPVTDPDIRVQTLEAIYLIILEEAGRRAFWSVNGPRILQLGYEYEEDPKAMRAYEQVGSLLVEEAGGPEESLEPTKAES
